United States Patent Application Publication US 2014/0259212 A1 - sequence listing, part 13

SEQ ID NO: 40783 - DNA, 1029 bp, Salmonella typhimurium
  CDS (1)..(1029): transl_table=11
atggcgaccataaaagatgtagcccgactggccggtgtttcagtcgccaccgtttctcgcgttattaacgattcgccaaaagccagcgaagcgtcccggctggcggtaaccagcgcaatggagtccctgagctatcaccctaacgccaacgcgcgcgcgctggcacagcaggcaacggaaaccctcggtctggtggtcggcgacgtttccgatccttttttcggcgcgatggtgaaagccgttgaacaggtggcgtatcacaccggcaattttttactgattggcaacgggtatcataacgaacaaaaagagcgtcaggctattgaacagttgattcgtcatcgttgcgcagcgttagtggtgcacgccaaaatgattccggatgcggacctggcctcattaatgaagcaaatccccggcatggtgctgattaaccgcattttaccggggttagaacaccgctgtgtcgcgctggatgaccgttacggggcatggctggcgacccggcatctgatccagcaaggtcatacgcgtattgggtatatctgttccaatcacactatctctgatgccgaagatcgcctgaggggctattacgatgcgctggcggaaagccatatcccggctaacgatcggctggtgacgttcggcgaaccggatgaaagcggcggcgagcaggcgatgactgagttattaggtcgcggcagaaattttaccgcggtggcctgctataacgactcgatggcggctggcgcgatgggtgtattaaatgataatggcgtgggggtgccgggcgaagtatcgctcatcggttttgatgatgtactggtctcacgctatgtgcgtccccgactgaccaccattcggtatccgatcgtcaccatggcgacacaggcggcggagctggccttagcgctggcagggaaatgtcctacgccagaagtaactcatgtatttagtccgacactggtacgccgacattcggtgtccacgccgacggataccgggcacctgtcgacaaccgattaa

SEQ ID NO: 40784 - protein, 342 aa, Salmonella typhimurium
MATIKDVARLAGVSVATVSRVINDSPKASEASRLAVTSAMESLSYHPNANARALAQQATETLGLVVGDVSDPFFGAMVKAVEQVAYHTGNFLLIGNGYHNEQKERQAIEQLIRHRCAALVVHAKMIPDADLASLMKQIPGMVLINRILPGLEHRCVALDDRYGAWLATRHLIQQGHTRIGYICSNHTISDAEDRLRGYYDALAESHIPANDRLVTFGEPDESGGEQAMTELLGRGRNFTAVACYNDSMAAGAMGVLNDNGVGVPGEVSLIGFDDVLVSRYVRPRLTTIRYPIVTMATQAAELALALAGKCPTPEVTHVFSPTLVRRHSVSTPTDTGHLSTTD

SEQ ID NO: 40785 - DNA, 1041 bp, Escherichia coli
  CDS (1)..(1041): transl_table=11
atgatcaccattcgtgatgtagcgcgtcaggctggcgtctctgtggcaacggtttcccgggtgctcaataacagcacgctggtcagtgccgacacgcgtgaagcagtaatgaaagccgtgagtgagctggattatcggccaaacgccaatgcccaggcgctggcaactcaggttagcgacaccattggcgtggtggtgatggacgtttctgatgcgtttttcggcgcgctggtaaaagcggtggatctggtcgctcagcagcatcagaaatacgtgctaatcggcaatagctatcatgaagcggaaaaagagcgtcacgccattgaggtgttaattcgccagcgttgtaatgcgttgattgttcactcaaaagcattgagtgacgatgaactggcgcaatttatggataacattcccggtatggtgttaatcaaccgcgttgtgccggggtacgcccatcgttgcgtttgcctggataatctcagcggtgcccgaatggcgacgcgcatgttgctgaataacggtcatcaacgtattggttatctttcttccagccacggcattgaagatgacgccatgcgtaaagcaggctggatgagtgcgttgaaagagcaggatattattccgccggaaagctggattggcgctggtacgccggacatgccgggcggtgaggcggcgatggttgaactgctggggcgcaatctacaacttaccgctgtatttgcttataacgacaatatggccgctggcgcactgacagcattaaaagataatggcattgcgattccgttacatctctcaatcatcggtttcgatgatattcccatcgcccgttacaccgacccgcaattaacgaccgtgcgttatcccattgcttcaatggcgaaattagccaccgaactggccttgcagggggcagcaggcaatattgatcctcgtgccagccactgttttatgccgacgttagtgcgtcgccattctgtcgcaacacgccagaatgcggcggcgatcactaactcaacaaatcaggcgatgtaa

SEQ ID NO: 40786 - protein, 346 aa, Escherichia coli
MITIRDVARQAGVSVATVSRVLNNSTLVSADTREAVMKAVSELDYRPNANAQALATQVSDTIGVVVMDVSDAFFGALVKAVDLVAQQHQKYVLIGNSYHEAEKERHAIEVLIRQRCNALIVHSKALSDDELAQFMDNIPGMVLINRVVPGYAHRCVCLDNLSGARMATRMLLNNGHQRIGYLSSSHGIEDDAMRKAGWMSALKEQDIIPPESWIGAGTPDMPGGEAAMVELLGRNLQLTAVFAYNDNMAAGALTALKDNGIAIPLHLSIIGFDDIPIARYTDPQLTTVRYPIASMAKLATELALQGAAGNIDPRASHCFMPTLVRRHSVATRQNAAAITNSTNQAM

SEQ ID NO: 40787 - DNA, 1023 bp, Salmonella typhimurium
  CDS (1)..(1023): transl_table=11
atgatcaccattcgtgatgtagcgcgccaggctggcgtgtctgtagcgaccgtttcccgcgtactgaataacagcgcgttggtcagtcccgacacccgtgacgccgttatgcaggccgtcaccctgctgggatatcggccaaatgcgaatgcgcaagcgctggccactcaggtgagcgacaccatcggcgtcgtggttatggatgtttccgatgcctttttcggcgctctggtgaaagccgtagatctggtcgcgcagcagcaccagaaatatgttctcattggcaacagttatcatgaggcggaaaaagagcgccatgcgattgaagtcttgatccgtcagcgttgtaacgcattgattgttcactcaaaagccttaaccgatcgcgagctgagcgactttatggatcagatccccggtatggtgctgattaaccgtatcgtgccgggttatgcgcatcgttgtgtttgtctcgacaatgtgagcggcgccagaatggcgacccgaatgttgctgaataatggacatcaacgcatcggctacctggcctccagccaccgtattgaagatgacgcgatgcgcagagaagggtggttacacgcgctgcaagagcaggggattgctgcgtcggagagctggataggcaccggcacgccggacatgcagggcggcgagtcggcaatggttgagttgctgggacgcaatctgcaactgacggcggtatttgcctataacgataacatggcggcgggcgcgctgacggcgttaaaagataacggcatcgccattcccttgcatctgtctgtcatcggtttcgatgatatccctattgctcgttataccgatcctcagttgactaccgtgcgctatcctattgcttctatggcgaaaatcgcgaccgagctggcgttacagggggccgcaggcacgctggatatcacggcgacgcactgctttatgccgaccctggtacggcgccattcggtggcatggcgacagaatgcggtactgatcactaactga

SEQ ID NO: 40788 - protein, 340 aa, Salmonella typhimurium
MITIRDVARQAGVSVATVSRVLNNSALVSPDTRDAVMQAVTLLGYRPNANAQALATQVSDTIGVVVMDVSDAFFGALVKAVDLVAQQHQKYVLIGNSYHEAEKERHAIEVLIRQRCNALIVHSKALTDRELSDFMDQIPGMVLINRIVPGYAHRCVCLDNVSGARMATRMLLNNGHQRIGYLASSHRIEDDAMRREGWLHALQEQGIAASESWIGTGTPDMQGGESAMVELLGRNLQLTAVFAYNDNMAAGALTALKDNGIAIPLHLSVIGFDDIPIARYTDPQLTTVRYPIASMAKIATELALQGAAGTLDITATHCFMPTLVRRHSVAWRQNAVLITN

SEQ ID NO: 40789 - DNA, 23 bp, Artificial sequence
  primer
atgatgacgacgatgctggaagt

SEQ ID NO: 40790 - DNA, 23 bp, Artificial sequence
  primer
ttatcgcgaaggagcaatgagtg

SEQ ID NO: 40791 - protein, 348 aa, Artificial sequence
  consensus sequence
  Variant (2)..(2): Xaa in position 2 is any amino acid
  Variant (4)..(6): Xaa in position 4 to 6 is any amino acid
  Variant (9)..(10): Xaa in position 9 to 10 is any amino acid
  Variant (15)..(15): Xaa in position 15 is any amino acid
  Variant (22)..(35): Xaa in position 22 to 35 is any amino acid
  Variant (37)..(38): Xaa in position 37 to 38 is any amino acid
  Variant (40)..(44): Xaa in position 40 to 44 is any amino acid
  Variant (46)..(46): Xaa in position 46 is any amino acid
  Variant (49)..(50): Xaa in position 49 to 50 is any amino acid
  Variant (52)..(53): Xaa in position 52 to 53 is any amino acid
  Variant (55)..(62): Xaa in position 55 to 62 is any amino acid
  Variant (64)..(65): Xaa in position 64 to 65 is any amino acid
  Variant (67)..(73): Xaa in position 67 to 73 is any amino acid
  Variant (74)..(78): Xaa in position 74 to 78 is any or no amino acid
  Variant (80)..(108): Xaa in position 80 to 108 is any amino acid
  Variant (109)..(114): Xaa in position 109 to 114 is any or no amino acid
  Variant (116)..(116): Xaa in position 116 is any amino acid
  Variant (117)..(117): Xaa in position 117 is any or no amino acid
  Variant (119)..(121): Xaa in position 119 to 121 is any amino acid
  Variant (123)..(125): Xaa in position 123 to 125 is any amino acid
  Variant (128)..(155): Xaa in position 128 to 155 is any amino acid
  Variant (156)..(157): Xaa in position 156 to 157 is any or no amino acid
  Variant (159)..(169): Xaa in position 159 to 169 is any amino acid
  Variant (170)..(178): Xaa in position 170 to 178 is any or no amino acid
  Variant (180)..(186): Xaa in position 180 to 186 is any amino acid
  Variant (188)..(190): Xaa in position 188 to 190 is any amino acid
  Variant (192)..(194): Xaa in position 192 to 194 is any amino acid
  Variant (197)..(198): Xaa in position 197 to 198 is any amino acid
  Variant (200)..(213): Xaa in position 200 to 213 is any amino acid
  Variant (215)..(216): Xaa in position 215 to 216 is any amino acid
  Variant (218)..(220): Xaa in position 218 to 220 is any amino acid
  Variant (223)..(234): Xaa in position 223 to 234 is any amino acid
  Variant (235)..(236): Xaa in position 235 to 236 is any or no amino acid
  Variant (238)..(243): Xaa in position 238 to 243 is any amino acid
  Variant (245)..(246): Xaa in position 245 to 246 is any amino acid
  Variant (248)..(250): Xaa in position 248 to 250 is any amino acid
  Variant (253)..(264): Xaa in position 253 to 264 is any amino acid
  Variant (267)..(267): Xaa in position 267 is any amino acid
  Variant (270)..(270): Xaa in position 270 is any amino acid
  Variant (273)..(275): Xaa in position 273 to 275 is any amino acid
  Variant (277)..(279): Xaa in position 277 to 279 is any amino acid
  Variant (281)..(283): Xaa in position 281 to 283 is any amino acid
  Variant (285)..(287): Xaa in position 285 to 287 is any amino acid
  Variant (289)..(290): Xaa in position 289 to 290 is any amino acid
  Variant (295)..(297): Xaa in position 295 to 297 is any amino acid
  Variant (299)..(302): Xaa in position 299 to 302 is any amino acid
  Variant (304)..(304): Xaa in position 304 is any amino acid
  Variant (306)..(307): Xaa in position 306 to 307 is any amino acid
  Variant (309)..(310): Xaa in position 309 to 310 is any amino acid
  Variant (312)..(314): Xaa in position 312 to 314 is any amino acid
  Variant (316)..(336): Xaa in position 316 to 336 is any amino acid
  Variant (337)..(342): Xaa in position 337 to 342 is any or no amino acid
  Variant (344)..(345): Xaa in position 344 to 345 is any amino acid
  Variant (347)..(347): Xaa in position 347 is any amino acid
MXTXXXVAXXAGVSXATVSRVXXXXXXXXXXXXXXVXXAXXXXXYXPNXXAXXLXXXXXXXXGXXVXXXXXXXXXXXXFXXXXXXXXXXXXXXXXXXXXXXXXXXXXXXXXXXXEXXAXXXLXXXRCXXXXXXXXXXXXXXXXXXXXXXXXXXXXXXRXXXXXXXXXXXXXXXXXXXXDXXXXXXXAXXXLXXXGHXXIXXXXXXXXXXXXXXRXXGXXXALXXXXXXXXXXXXXXGXXXXXXGXXAXXXLLXXXXXXXXXXXXNDXMAXGAXXXLXXXGXXXPXXXSXXGFDDXXXAXXXXPXLXXVXXPXXXMXXXXXXXXXXXXXXXXXXXXXXXXXXXLXXRXS

SEQ ID NO: 40792 - protein, 58 aa, Artificial sequence
  protein pattern
  Variant (2)..(8): Xaa in position 2 to 8 is any amino acid
  Variant (9)..(9): Xaa in position 9 is any or no amino acid
  Variant (14)..(14): Xaa in position 14 is any amino acid
  Variant (15)..(15): Xaa in position 15 is Ala or Gln
  Variant (21)..(21): Xaa in position 21 is Ile, Leu or Val
  Variant (22)..(22): Xaa in position 22 is Asn, Ser or Thr
  Variant (23)..(24): Xaa in position 23 to 24 is any amino acid
  Variant (25)..(25): Xaa in position 25 is Ala, Gly, Asn, Pro, Ser or Thr
  Variant (26)..(26): Xaa in position 26 is any amino acid
  Variant (27)..(27): Xaa in position 27 is Ala, Thr or Val
  Variant (28)..(30): Xaa in position 28 to 30 is any amino acid
  Variant (31)..(31): Xaa in position 31 is Ser or Thr
  Variant (32)..(34): Xaa in position 32 to 34 is any amino acid
  Variant (36)..(37): Xaa in position 36 to 37 is any amino acid
  Variant (39)..(39): Xaa in position 39 is Ile, Met or Val
  Variant (40)..(42): Xaa in position 40 to 42 is any amino acid
  Variant (43)..(43): Xaa in position 43 is Asp, Gly, Asn or Ser
  Variant (45)..(45): Xaa in position 45 is any amino acid
  Variant (47)..(47): Xaa in position 47 is any amino acid
  Variant (48)..(49): Xaa in position 48 to 49 is any or no amino acid
  Variant (51)..(51): Xaa in position 51 is any amino acid
  Variant (52)..(52): Xaa in position 52 is Ala, Asn, Gln or Ser
  Variant (54)..(54): Xaa in position 54 is Ala, Ser or Val
  Variant (55)..(57): Xaa in position 55 to 57 is any amino acid
  Variant (58)..(58): Xaa in position 58 is Ser or Thr
TXXXXXXXXAGVSXXTVSRVXXXXXXXXXXXXXXVXXAXXXXXYXPXXXAXXLXXXXX

SEQ ID NO: 40793 - protein, 53 aa, Artificial sequence
  protein pattern
  Variant (2)..(2): Xaa in position 2 is any amino acid
  Variant (3)..(5): Xaa in position 3 to 5 is any or no amino acid
  Variant (8)..(9): Xaa in position 8 to 9 is any amino acid
  Variant (11)..(11): Xaa in position 11 is any amino acid
  Variant (14)..(15): Xaa in position 14 to 15 is any amino acid
  Variant (16)..(16): Xaa in position 16 is Ala or Val
  Variant (17)..(17): Xaa in position 17 is Ile, Leu or Met
  Variant (18)..(18): Xaa in position 18 is any amino acid
  Variant (19)..(19): Xaa in position 19 is Asp, Glu or Gln
  Variant (20)..(20): Xaa in position 20 is any amino acid
  Variant (22)..(23): Xaa in position 22 to 23 is any amino acid
  Variant (24)..(24): Xaa in position 24 is Ile, Leu or Val
  Variant (25)..(25): Xaa in position 25 is Gly or Pro
  Variant (26)..(27): Xaa in position 26 to 27 is any amino acid
  Variant (28)..(28): Xaa in position 28 is Ile, Leu or Val
  Variant (30)..(30): Xaa in position 30 is Ile, Leu, Met or Val
  Variant (31)..(31): Xaa in position 31 is any amino acid
  Variant (33)..(33): Xaa in position 33 is any amino acid
  Variant (35)..(35): Xaa in position 35 is Asp or Asn
  Variant (36)..(38): Xaa in position 36 to 38 is any amino acid
  Variant (39)..(39): Xaa in position 39 is Ala or Ser
  Variant (40)..(43): Xaa in position 40 to 43 is any amino acid
  Variant (45)..(45): Xaa in position 45 is any amino acid
  Variant (47)..(48): Xaa in position 47 to 48 is Ser or Thr
  Variant (49)..(49): Xaa in position 49 is Ile or Val
  Variant (50)..(51): Xaa in position 50 to 51 is any amino acid
  Variant (52)..(52): Xaa in position 52 is Asp or Pro
  Variant (53)..(53): Xaa in position 53 is Phe, Ile, Leu or Val
AXXXXNDXXAXGAXXXXXXXGXXXXXXXSXXGXDXXXXXXXXXPXLXXXXXXX

SEQ ID NO: 40794 - protein, 46 aa, Artificial sequence
  protein pattern
  Variant (2)..(8): Xaa in position 2 to 8 is any amino acid
  Variant (9)..(10): Xaa in position 9 to 10 is any or no amino acid
  Variant (12)..(12): Xaa in position 12 is any amino acid
  Variant (13)..(14): Xaa in position 13 to 14 is any or no amino acid
  Variant (16)..(16): Xaa in position 16 is Ile or Leu
  Variant (17)..(18): Xaa in position 17 to 18 is any amino acid
  Variant (20)..(20): Xaa in position 20 is His or Arg
  Variant (21)..(22): Xaa in position 21 to 22 is any amino acid
  Variant (23)..(23): Xaa in position 23 is Ile or Leu
  Variant (24)..(24): Xaa in position 24 is Ala, Gly or Val
  Variant (25)..(25): Xaa in position 25 is any amino acid
  Variant (26)..(26): Xaa in position 26 is Ile or Leu
  Variant (27)..(27): Xaa in position 27 is Ala, Cys, Ser or Thr
  Variant (28)..(34): Xaa in position 28 to 34 is any amino acid
  Variant (35)..(35): Xaa in position 35 is Ala, Asp, Gly, Ser or Thr
  Variant (36)..(37): Xaa in position 36 to 37 is any amino acid
  Variant (39)..(40): Xaa in position 39 to 40 is any amino acid
  Variant (41)..(41): Xaa in position 41 is Gly or Val
  Variant (42)..(42): Xaa in position 42 is Phe, His, Trp or Tyr
  Variant (43)..(44): Xaa in position 43 to 44 is any amino acid
  Variant (46)..(46): Xaa in position 46 is Leu or Met
DXXXXXXXXXAXXXLXXXGXXXXXXXXXXXXXXXXXXRXXXXXXAX

SEQ ID NO: 40795 - DNA, 807 bp, Escherichia coli
  CDS (1)..(807): transl_table=11
atgtctgtggtaattagtgatgcatggcgtcagcgttttggtggcacagcgcgtctgtatggtgaaaaagcgttgcaactgtttgctgacgcgcatatttgtgtggttggtatcggtggtgtcggttcctgggcggcggaagcgctggcgcgcacggggattggcgcaatcacgcttatcgatatggatgatgtgtgcgtcaccaataccaatcggcaaattcatgccctgcgcgataacgttgggctggcaaaagcggaagttatggcggagcgtattcgccagattaacccggagtgccgtgtaacggtggtggatgatttcgtgacgccggataacgtagcgcagtatatgagcgtgggttattcgtacgtgattgatgccattgatagtgtacggcccaaagcggcgctgattgcttattgtcggcgcaataaaatcccactggtcacaaccggtggcgcgggtgggcagattgatccgacgcagattcaggttaccgatctggcgaaaacgattcaggacccgctggcggcgaagttgcgcgagcgcctgaaaagcgattttggcgtagtgaaaaacagtaaaggtaagctcggcgtggattgcgtgttttctactgaagcgctggtgtacccgcagtcagacggtacggtgtgtgcgatgaaagccacggcagaagggccgaagcggatggattgtgcatctggatttggcgcggcaacgatggtgaccgccacctttgggtttgttgcggtttctcatgcgctgaagaagatgatggcgaaagcggcgcgtcagggttaa

SEQ ID NO: 40796 - protein, 268 aa, Escherichia coli
MSVVISDAWRQRFGGTARLYGEKALQLFADAHICVVGIGGVGSWAAEALARTGIGAITLIDMDDVCVTNTNRQIHALRDNVGLAKAEVMAERIRQINPECRVTVVDDFVTPDNVAQYMSVGYSYVIDAIDSVRPKAALIAYCRRNKIPLVTTGGAGGQIDPTQIQVTDLAKTIQDPLAAKLRERLKSDFGVVKNSKGKLGVDCVFSTEALVYPQSDGTVCAMKATAEGPKRMDCASGFGAATMVTATFGFVAVSHALKKMMAKAARQG

SEQ ID NO: 40797 - DNA, 1434 bp, Oryza sativa (japonica cultivar-group)
  CDS (1)..(1434)
atgggggagagagcgaggcagtggctcctcgtcgccggcgccggcgccgcggttggggcgctctccaccgccgccgtcatgaggatcctctcgagatccaagcggagggaggggtacgtgcgcagcctgctggagtcgaacggcgtcgccagtggtggtgctggatcgagcgttggtactcgggttgtcgctacttcggatcttcttgatgatgaagtggtctccgaacagctcacaaggaatatacaattttttggcatggaatctcagaagaaagtgacagggtcgtttgttgtagtaattggtcttggaggggttggcagtcatgctgcttcaatgcttcttagatctggtgttggccggttgctccttgtggattttgatcaggtttcgctgtcttcgctgaatcggcatgctgtggcaacaagagatgacgttggaacacctaaagcattatgcctcaagaagcatttttcgatgatatatccagagtgtcaaatcgaagcaaaagtgcagttgtatgatccatcatgcgaggatgaaattctttctggacaaccagactttgttcttgattgtatagataacattgatacgaaggttgcactccttgcggcttgcgtacgcagaggtttaagggtgctttcagcaatgggggctggggctcgagcggacccaaccagaattcgtgttgcagatttgagggaatcaagcaatgatcctctttctcgggctgtgcggtatcggctgaagaaggaccatggaattgaaggtggaataccggtagttttttccttggagaagcccaaggcaaagctacttccttttcaagcttcaaaagaagaagaaactccatcagattaccagatcgtgccaggattcagggtgcgcattatcccagtgctgggaactatccctgcaatatttggtcaagttatggcctcatatgtgattactcagcttgccaagttggattttcaaactgaaccaattgttaacatggatttggatcattaccgtattcttcaccatcgtcttcttgagcatgaggagctaatatatggttctgctgaacaagttttggtcgatgctgaagaagtaatgtacattgtcaaagaattgtggcgtggtcgaagtgctagagatcaaaatctgaaggacactggccgtaaaatgtggagatctgtcaatgaattaatgcttgttcggtgggataaatcaaagcctgctggcgtgtcaaacttaatacttctcaagttcaatgagacacctgataatggaaaattgacttcaaatattagtggacatgcatttctgagaggggcagatgcacatgaatccaccactcttgaccaaataaaggaagaagaacctgaattttacaacatggtttcacgtgttctgaaacaagctgaagcagaatttgctttatga

SEQ ID NO: 40798 - protein, 477 aa, Oryza sativa (japonica cultivar-group)
MGERARQWLLVAGAGAAVGALSTAAVMRILSRSKRREGYVRSLLESNGVASGGAGSSVGTRVVATSDLLDDEVVSEQLTRNIQFFGMESQKKVTGSFVVVIGLGGVGSHAASMLLRSGVGRLLLVDFDQVSLSSLNRHAVATRDDVGTPKALCLKKHFSMIYPECQIEAKVQLYDPSCEDEILSGQPDFVLDCIDNIDTKVALLAACVRRGLRVLSAMGAGARADPTRIRVADLRESSNDPLSRAVRYRLKKDHGIEGGIPVVFSLEKPKAKLLPFQASKEEETPSDYQIVPGFRVRIIPVLGTIPAIFGQVMASYVITQLAKLDFQTEPIVNMDLDHYRILHHRLLEHEELIYGSAEQVLVDAEEVMYIVKELWRGRSARDQNLKDTGRKMWRSVNELMLVRWDKSKPAGVSNLILLKFNETPDNGKLTSNISGHAFLRGADAHESTTLDQIKEEEPEFYNMVSRVLKQAEAEFAL

SEQ ID NO: 40799 - DNA, 822 bp, Vibrio cholerae O1 biovar eltor str. N16961
  CDS (1)..(822): transl_table=11
gtggttatgcgtgaactcgatactcctgcctccgacagttacaaccaacgttttggtggtacgcgccgtttgtatggttatgacgaagtcgacattttacgtgccgcgcacgtgtgtgtgattgggattggtggtgtcggttcatgggcggtagaagctctggcgcgcactggtattggtgagttgacgttgattgatatggatgatgtgtgtgtcactaacatcaaccgtcaaatccatgccatgaccgggacgattggcaaaagcaaaattgaagtgatggcggagcgcgttaagctcatcaatccagagtgcaaagtcaatttggtggatgacttcatcacgccggataatcaacatctttatctcaataaatcctttgattatgtgttggatgcgattgacagcttgaaagccaaagcttctcttctggcttactgccgcagcaacaaaatcaaagtgattacagtcggaggtgcgggcggacaaaccgatccaacgcaaatcaccgtggccgatttgaccaagacgattcaagatccactggcgaaaaagctcaaagatcgcctgcgtcagcaccacaacttcccaaccaatccagcgcgtaaatttgggattgattgtgttttctcgaccgagcaactcaaatacccacaagccgatggttcggtatgcgcgaccaaatcaaccgcagaaggtccaaaacgtatggattgcgccagcggatttggcgctgcgacggtagtgacggcgacgtttggttttgtcgcggtggcgcgcatcgtcgataaattgattcaaaagcataaagtgaaggcgtga

SEQ ID NO: 40800 - protein, 273 aa, Vibrio cholerae O1 biovar eltor str. N16961
MVMRELDTPASDSYNQRFGGTRRLYGYDEVDILRAAHVCVIGIGGVGSWAVEALARTGIGELTLIDMDDVCVTNINRQIHAMTGTIGKSKIEVMAERVKLINPECKVNLVDDFITPDNQHLYLNKSFDYVLDAIDSLKAKASLLAYCRSNKIKVITVGGAGGQTDPTQITVADLTKTIQDPLAKKLKDRLRQHHNFPTNPARKFGIDCVFSTEQLKYPQADGSVCATKSTAEGPKRMDCASGFGAATVVTATFGFVAVARIVDKLIQKHKVKA

SEQ ID NO: 40801 - DNA, 780 bp, Bacillus halodurans C-125
  CDS (1)..(780): transl_table=11
gtggaaggagaagaaggaatgttgcaccaattttcaagaaatgaacttgccatcggacacgatggattagagcgcttaaagcaatcgaaggttgcggttttaggagttggcggagtgggctcgttttccgtagaggcattagcccgttccggtgtcggccgcatcgtcatcgttgataaagatgatgtggatattacaaatgtgaatcgtcaaattcacgcattgctatcgacggtcggaaggccaaaagtagacttgatgaaagagcgaatttccgacataaatccagagtgtgaagtcattgccttaaaaatgttttacacagaagagacatatgagcagtttttcagctacgagccagactacgtcattgacgccagtgacacgattacgtacaagattcatcttatgaaagaatgtctcaagcggaacattccgatcatctcgagtatgggtgttgctaataagatggatccgactcgtctgcgaattgcggatatctcgaaaacgagctatgatccgattgcaaaggtgattcgcacccgcttacgcaaagaggggattcataaagggatcgaagtcgtttattccgatgagcagccaattcgaatcagagaagacattcgcaaagaaattgtcccagaggctgccgaaagtggaaagatacgaaaggcgaaaatgccaccatcctctaatgcattcgttccgtcggtttctggattattcatggccggtcacgtcatcagcaaacttctcgatggcattgaaatccagcgttaa

SEQ ID NO: 40802 - protein, 259 aa, Bacillus halodurans C-125
MEGEEGMLHQFSRNELAIGHDGLERLKQSKVAVLGVGGVGSFSVEALARSGVGRIVIVDKDDVDITNVNRQIHALLSTVGRPKVDLMKERISDINPECEVIALKMFYTEETYEQFFSYEPDYVIDASDTITYKIHLMKECLKRNIPIISSMGVANKMDPTRLRIADISKTSYDPIAKVIRTRLRKEGIHKGIEVVYSDEQPIRIREDIRKEIVPEAAESGKIRKAKMPPSSNAFVPSVSGLFMAGHVISKLLDGIEIQR

SEQ ID NO: 40803 - DNA, 777 bp, Pasteurella multocida subsp. multocida str. Pm70
  CDS (1)..(777): transl_table=11
gtgggtattacaataatggagagagtggataattatgaacaacgttttggtgggatcgcacgtttatacagtactgaagggcttactcgtttaaaacagtctcatgtctgcgttatcggtattggtggcgtcggttcatggtgtgtggaggcattagcgcgctcaggtgtgggcaaattgacgttaattgatatggatgatatttgcgtgaccaacattaaccgccaaatccatgcgctttctggcaacattgggcaattaaagacagaagtgatgaaagcgcgggttgcgttaattaatcctgaatgtgaagtagcgattattgatgattttatttccagcgaaaacttagcggattatttatcgaaaggctatgattatgtcattgatgcgatcgatcatgtcaaaacgaaagccgcactcattgcttattgtaaacgtcataaaattaacatgattaccgttggtggagcaggaggtcaaaccgatccgactcagatccaaattaccgatttaagtaggacgattcaagatccgctcttagcaaaagtacgttccttattacgtaaggaataccattttagccaaaatccaaaacgaaaatttggtattgattgtgtgttttccacacaacccttaatttttcccaacgtggatggcaattgtgaagtatcagcaagtatgaactgtgccaatggctttggtgctgccactatggtgactgcaacttttggattctttgcggtttctcgtgttattaataaactgttacgttaa

SEQ ID NO: 40804 - protein, 258 aa, Pasteurella multocida subsp. multocida str. Pm70
MGITIMERVDNYEQRFGGIARLYSTEGLTRLKQSHVCVIGIGGVGSWCVEALARSGVGKLTLIDMDDICVTNINRQIHALSGNIGQLKTEVMKARVALINPECEVAIIDDFISSENLADYLSKGYDYVIDAIDHVKTKAALIAYCKRHKINMITVGGAGGQTDPTQIQITDLSRTIQDPLLAKVRSLLRKEYHFSQNPKRKFGIDCVFSTQPLIFPNVDGNCEVSASMNCANGFGAATMVTATFGFFAVSRVINKLLR

SEQ ID NO: 40805 - DNA, 813 bp, Pseudomonas aeruginosa PAO1
  CDS (1)..(813): transl_table=11
atgcaggtggatgaacagcgcttcggcggtatcggccggttgtacggtcgcgaggggctgcaacgcctggccgatagccacgtcgcggtggtcggcatcggcggggtcggttcctgggcggcggaagcgctggcccgcagcggcgtcggcgagatttccctgttcgacctcgacgatgtctgcgtgaccaacaccaaccgccaggtgcatgccatcgaaggctcggtgggcaaggccaaggtcgaggtgatggcggcgcgcatcctggccatcaacccggcctgccgggtccacgcggtggccgatttcgtcacccgcgagaccatggccgagtacatcgtcgacttcgactacctgatcgactgcatcgatagcgtggccgccaaggccgcgctgatcgcctggtgcaagcggcgcaagatcccggtgatcaccaccggcggcgccggtggccaggtcgacccgacgcagatccaggtcgccgacctgaacaagaccttcaacgacccgctggcggccaaggtgcgttccaccctgcgccgcgactacaacttctcgcgcacgccggggcgcacctacagcgtgccctgcgtgttctccagcgaacaactgcgctacccgaagccggacggcacggtgtgccagtcgaagagtttcgtcggcgaaggggtgaagctggactgcgccggcggcttcggcgcggtgatgatggtcaccgccaccttcggcatggtcgccgccgcccgcgccgtcgagcgcctggcggaaggccgcgcgctgcggccgtcgcggcgcacgccggggaacgcctga

SEQ ID NO: 40806 - protein, 270 aa, Pseudomonas aeruginosa PAO1
MQVDEQRFGGIGRLYGREGLQRLADSHVAVVGIGGVGSWAAEALARSGVGEISLFDLDDVCVTNTNRQVHAIEGSVGKAKVEVMAARILAINPACRVHAVADFVTRETMAEYIVDFDYLIDCIDSVAAKAALIAWCKRRKIPVITTGGAGGQVDPTQIQVADLNKTFNDPLAAKVRSTLRRDYNFSRTPGRTYSVPCVFSSEQLRYPKPDGTVCQSKSFVGEGVKLDCAGGFGAVMMVTATFGMVAAARAVERLAEGRALRPSRRTPGNA

SEQ ID NO: 40807 - DNA, 660 bp, Campylobacter jejuni subsp. jejuni NCTC 11168
  CDS (1)..(660): transl_table=11
atgatgaatgatagatttacacgtataaaatggctagttggagaagaaaaatttcaaaaaatttcacaaacaaaagttttggtttgcggacttggtggagtgggtggaatttgcgttgatgcgctttatcgtagtggttttaaaaaccttactttaatcgatgcggataaatttgaaatcactaatcaaaatcgccaaattcatagcgaaaatataggcgaagaaaaggctaaagtatttgaaagaatttataaggttaaaggtatagtcagtaaaatcgatgaaaattttttaaaaaattttgatttaagcgagtttgatcttatcatagatgccattgatgatattcctgcaaaagtagctttggctcatcttatagattttaaaaaacaaatttttatctcctcaacaggtggagctagaaagcttgatccaacacgcattaaaactacaagtatttttaaaactcacggcgatgctttagcgaaaaaatttcgttatgagcttagaaaatcaggctttaagggaaattttgatgtggtattttcagatgaggaagcgcattgtaaagatcttggatcttttatgggtgtgactgcatcttttggtttagccctagccagcttggcattaagaaaagttcttgctaagaaaagctga

SEQ ID NO: 40808 - protein, 219 aa, Campylobacter jejuni subsp. jejuni NCTC 11168
MMNDRFTRIKWLVGEEKFQKISQTKVLVCGLGGVGGICVDALYRSGFKNLTLIDADKFEITNQNRQIHSENIGEEKAKVFERIYKVKGIVSKIDENFLKNFDLSEFDLIIDAIDDIPAKVALAHLIDFKKQIFISSTGGARKLDPTRIKTTSIFKTHGDALAKKFRYELRKSGFKGNFDVVFSDEEAHCKDLGSFMGVTASFGLALASLALRKVLAKKS

SEQ ID NO: 40809 - DNA, 777 bp, Neisseria meningitidis Z2491
  CDS (1)..(777): transl_table=11
atgtccgacaacgctttgacctcttcgcgacgcttcggcggcatcgccagactctacggagactctgccttggcgcacttttcacaggcacacgtctgcgtagtcggcgtgggcggtgtcggctcgtgggcggtcgaggctttggcgcggacgggcatcggacgtttgactttgattgatttggacaacgttgccgaatcgaatgtcaaccgccagctgcacgccctgaccggagacttcggcaaagcaaaagttaccgccttgcgcgaacgcgtcgcccaaatcaacccagaatgccaagtgtttgaaattgaagatttcgttaccgaagacaatttgccggaatacttcggaaaaggttttgatttcgtcatcgacgcgatcgaccaagtgcgcgtcaaagcagcaatggcggcttattttgtggaacgcaaacaaccgtttgtcctcagcggcggcgcgggcggacaaaaaaatccggcgttaatccaaaccgccgatttgagccgcgtaacccacgacccgctgcttgccaacctgcgctacaccttgcggaaacgctacggattcagccgcgatacgaaagcaaatatgcgcgtgccttgcgtgtattcgaccgaaaatatcgtgccgccgcagtctagggaggcttgttcggcagatgccgctccgcaaggcttgtcgtgcgccggctacggtgcaagcatgctcgttaccgcttcgttcgggctatattgcgcacaggcggcggtggaacacatcgcagacaaaaaataa

SEQ ID NO: 40810 - protein, 258 aa, Neisseria meningitidis Z2491
MSDNALTSSRRFGGIARLYGDSALAHFSQAHVCVVGVGGVGSWAVEALARTGIGRLTLIDLDNVAESNVNRQLHALTGDFGKAKVTALRERVAQINPECQVFEIEDFVTEDNLPEYFGKGFDFVIDAIDQVRVKAAMAAYFVERKQPFVLSGGAGGQKNPALIQTADLSRVTHDPLLANLRYTLRKRYGFSRDTKANMRVPCVYSTENIVPPQSREACSADAAPQGLSCAGYGASMLVTASFGLYCAQAAVEHIADKK

SEQ ID NO: 40811 - DNA, 831 bp, Xylella fastidiosa 9a5c
  CDS (1)..(831): transl_table=11
gtggtagagagacaagacaaggaaatacatgacctgagggatgaacactggggcgaacgcttctccggtatcgatcggctatatggcctaggcacggttgcacggctgtcgacatgtcgtgtggcggtcatcggaataggtggagtcggttcgtggattgtcgaagcacttgcacgctcggctatagggtacatgagcttgattgacgcagacgatctctgtatctccaataccaatcgccagctacctgcactgataggtcaatacggacggaacaaagcgcaggcaatggttgaacgttgccgtgcaattaatcccaggatcaacgtgtcagcaacagagttatttttggcagggaacaacatggaagcactgcttggggaaaatttcgatttgattattgatgcttgcgacagctttcggatcaaagttgaaaccatcgtttcctgtcggcgccataaacgaccactgatcaccattggcgctgcagggggacgtactgaaccgactctagtgcgggtacgcgatatctctcgaacggaacacgatacgctgcttgctttgatccgtaagaaattgcgtagcgaattcaatttccccaagaatccgaaacgctatttcggtgtgcccgcagtgtattcattggagaatgtgaaatatccacaagctgacggtagcgtctgtggaatacgaccatcattaatcagcaacgcagcactgaatctagattgcagcacagggcttggcgcagcaactcacgtcactggtgcatttgcctttgctgcaactggcaaagcaattgagatgttactcacaccaaagaaaagataa

SEQ ID NO: 40812 - protein, 276 aa, Xylella fastidiosa 9a5c
MVERQDKEIHDLRDEHWGERFSGIDRLYGLGTVARLSTCRVAVIGIGGVGSWIVEALARSAIGYMSLIDADDLCISNTNRQLPALIGQYGRNKAQAMVERCRAINPRINVSATELFLAGNNMEALLGENFDLIIDACDSFRIKVETIVSCRRHKRPLITIGAAGGRTEPTLVRVRDISRTEHDTLLALIRKKLRSEFNFPKNPKRYFGVPAVYSLENVKYPQADGSVCGIRPSLISNAALNLDCSTGLGAATHVTGAFAFAATGKAIEMLLTPKKR

SEQ ID NO: 40813 - DNA, 756 bp, Clostridium acetobutylicum ATCC 824
  CDS (1)..(756): transl_table=11
atgcgtcaacattttctctcaagaactgaactattaataggaaaagaaagattagaaaaattaaagaatagtaaagtaatagttttcggcataggcggtgttggaagttatgctgtagaggcacttacaagatctggagttggacgaattgtattaatagacgacgataccgtatgccttacaaatataaatagacaaatccaagctacttttaaaacaatagcaaaacctaaggtagatgttatgaaagaaagaattttggatatcaatcccaattgtcaggtagaaactcacagaatttttgttactgaagataacataagcgatttaatagcaccagatacaaattatgttatagatgctattgacaccgtttcagctaagatatcacttatactttggtgtcaaaaaaataatataaatataataagttgcatgggcactggaaataaattagatccaacaaggtttgaaattacagacatatataaaacctcaatttgtcctcttgcaaaagttatgcgacatgagcttagaaaaagaggtgttaaatctcttaaggttctttattctaaagaaatgcctatgaaaccaaaatcagatgaggttataacctgtaaagaaggatgtgtgtgtgcaaacggttcaagaaaatgtaccgccaaaagacaaatacctgcaagtatatcctttgttcctcccgttgctggaatgattatcggaggagaagtcataaaagatataatggatagttaa

SEQ ID NO: 40814 - protein, 251 aa, Clostridium acetobutylicum ATCC 824
MRQHFLSRTELLIGKERLEKLKNSKVIVFGIGGVGSYAVEALTRSGVGRIVLIDDDTVCLTNINRQIQATFKTIAKPKVDVMKERILDINPNCQVETHRIFVTEDNISDLIAPDTNYVIDAIDTVSAKISLILWCQKNNINIISCMGTGNKLDPTRFEITDIYKTSICPLAKVMRHELRKRGVKSLKVLYSKEMPMKPKSDEVITCKEGCVCANGSRKCTAKRQIPASISFVPPVAGMIIGGEVIKDIMDS

SEQ ID NO: 40815 - DNA, 765 bp, Bacillus subtilis subsp. subtilis str. 168
  CDS (1)..(765): transl_table=11
ttgttacaccagttttcacgcaatgaattagctatcggaaaagaaggccttgaaacgctgaaaaacagcacagttgctgtgcttggagtcgggggagtcgggtcgttcgcggcggaacgtctcgcgcggtcaggcgtcggccgcattctgcttgtcgacaaagatgatgtcgacattacaaatgtaaatcgtcagcttcacgcgctgctttcaactgtcggacagccgaaagttgatttaatgaaggcgcggatcgcagacattaacccggagtgtgaagtgatcgcgttaaaaatgttctatacggaggaaacgtatgagcagttttttgactatggtcttgactatgtcattgatgcgtcagacaccatttgttataaaattcatttaatgaaagaatgtctaaaacgggatattccgctcatctccagcatgggtgctgcaaataaaacggatccgacacgcttccaaatcgctgatatctcaaaaacgcacactgatccaattgcgaaggtcgttcgtacgaaattacgcaaggagggtatcaaaaaaggcgttcaagtgattttctctgatgaaagcccgattgttattcgggaagatgtcagaaaagaagtggggaatgacgaagcgaaaatacgtaaagcaaaaatgccgccttcctctaatgcttttgtgccgtcagttgcaggtttgattatgggcggacatgttgtcatggatcttttgaaagacattgaaatcaaacgtgtgaaggataaataa

SEQ ID NO: 40816 - protein, 254 aa, Bacillus subtilis subsp. subtilis str. 168
MLHQFSRNELAIGKEGLETLKNSTVAVLGVGGVGSFAAERLARSGVGRILLVDKDDVDITNVNRQLHALLSTVGQPKVDLMKARIADINPECEVIALKMFYTEETYEQFFDYGLDYVIDASDTICYKIHLMKECLKRDIPLISSMGAANKTDPTRFQIADISKTHTDPIAKVVRTKLRKEGIKKGVQVIFSDESPIVIREDVRKEVGNDEAKIRKAKMPPSSNAFVPSVAGLIMGGHVVMDLLKDIEIKRVKDK

SEQ ID NO: 40817 - DNA, 903 bp, Ralstonia solanacearum GMI1000
  CDS (1)..(903): transl_table=11
atgagtcacgtagcaatcagcgcgcccgcgcatccgcccgccctggatgacgaatacgcccgccgcttcggcggtgtcgcacggctgtatggcccgcaagcgctggagcgcttcgctgcggcgcacatctgcgtgatcggcgtcggcggcgtcggctcgtgggtggccgaagcgctcgcgcggtgcggcatcggcaggctgacgctgatcgacctcgatcacatcgcggtctccaacaccaaccgccagatccacgcgctgggtgacgcctacggcaaggccaaggtcgacgcgatggccgagcgcatcgccgagatcaacccgcgcgccgagatcagccgcatcgacgatttcgtcaccgtggagaacgtcgatgcgctgctcggccatccgttcgactacgtggtcgatgccatcgacgcggtcaaggtcaagaccgccatcgtggccttctgccagcgcaccggcacgcgcgtggtgacttgcggcgcggccggcgggcaactggatccgacgcgcatccgcgtggccgatctcgcgcgcaccatccaggacccgctgcttgccaaggtgcgcggcaacctgcgccgccagcacggcttcccgcgcgatccgaaggcgcgcttcggcatcgatgcggtgtattcggacgagccgctgcgctatccggagccggagcagcaggcctgcgcggtggaggtgccggccgaatcgagccacgcgggcatcgatgacctggcggcggcgggggcgatcgaggtggtcaacgcaccgccggcgccgcagccctcgcgcgggccgcaggggctggcttgcgcgggcttcggttcgtccgtctgcgtgacggcggtgttcggcatggtggcggcgtcgacggccctgcgcgcgatcgcggccgtgtga

SEQ ID NO: 40818 - protein, 300 aa, Ralstonia solanacearum GMI1000
MSHVAISAPAHPPALDDEYARRFGGVARLYGPQALERFAAAHICVIGVGGVGSWVAEALARCGIGRLTLIDLDHIAVSNTNRQIHALGDAYGKAKVDAMAERIAEINPRAEISRIDDFVTVENVDALLGHPFDYVVDAIDAVKVKTAIVAFCQRTGTRVVTCGAAGGQLDPTRIRVADLARTIQDPLLAKVRGNLRRQHGFPRDPKARFGIDAVYSDEPLRYPEPEQQACAVEVPAESSHAGIDDLAAAGAIEVVNAPPAPQPSRGPQGLACAGFGSSVCVTAVFGMVAASTALRAIAAV

SEQ ID NO: 40819 - DNA, 831 bp, Xanthomonas axonopodis pv. citri str. 306
  CDS (1)..(831): transl_table=11
atgaaagcacaatggcgtgaacgctttgccggtatcgaccggctgtacggggtcggcacggtcgagcgcttgtcggcgtgccgcgtggcggtggtcggcatgggtggggtgggctcgtgggtggtcgaggcattggcacgcaccggggtggggcacatccgcctgatcgatgccgatgacgtgtgcgtgtccaacaccaaccggcagctgccggcgctggccgggcagtacggtcgcaacaaggcgcgggcgatggccgagcgctgcgtggcgatcaacccggacatcgaagccgacgcggtcgaggctttcctgacctcgggcaatatcgaaaccttgctgggtcaaggcttggacctggtgatcgatgcctgcgacagctttcgggtcaaggtggaaaccatcgcctggtgccgtcggcgcaagttgccgctgctgaccgtgggtgcggccggtgggcgcaccgaccccacgctggtgcgcgtgcgcgatgtctcgcgcaccgagcacgatgcgatgctggcgctcacccgcaagaagctgcgcagcgaattcaatttccccaagaacccgcagcgctacttcggcgtgcccgcggtgtattcgctggaaaacgtgaaatacccgcaggccgatggcagcgtctgcggcatccgcccacagctcgatgccgatgccacgctcaagctcgattgcggggcagggctcggtgcggccacgcatatcaccggcacctttgcattcgtggcggtgggcaaggcgctggacatgttgctcaagcccaaggctgcggtggcgatgccggcagccgaggcggttgcggcgtcgtga

SEQ ID NO: 40820 - protein, 276 aa, Xanthomonas axonopodis pv. citri str. 306
MKAQWRERFAGIDRLYGVGTVERLSACRVAVVGMGGVGSWVVEALARTGVGHIRLIDADDVCVSNTNRQLPALAGQYGRNKARAMAERCVAINPDIEADAVEAFLTSGNIETLLGQGLDLVIDACDSFRVKVETIAWCRRRKLPLLTVGAAGGRTDPTLVRVRDVSRTEHDAMLALTRKKLRSEFNFPKNPQRYFGVPAVYSLENVKYPQADGSVCGIRPQLDADATLKLDCGAGLGAATHITGTFAFVAVGKALDMLLKPKAAVAMPAAEAVAAS

SEQ ID NO: 40821 - DNA, 804 bp, Shewanella oneidensis MR-1
  CDS (1)..(804): transl_table=11
atgactgaagcctatcaaaatcgctttggtggcataggccgcttgtacgggcaaaaggcgctcgctaaatttgctgtctctcatgtcgtggtcattggcattggtggtgtggggacgtgggcggcagaagccttggctcgaagtggcattggtcaaatgactctcattgatttagatgatatctgtgtgaccaataccaatcgtcaaattcacgcgctgatctcaaccattggcgattccaaagtggctgtgatggctaagcggatccgcgagatcaatcctgattgccaagttaatgaagtcgaagattttattacggttgacaatcttggtgagtatttactcagcgctcaggccggcggtaatattgattatgttgttgattgcattgatgccgttaaacaaaaagcggcgcttattgcttggtgtaaacgtcaaaaaatcaaaattgtaacagtaggcggtgcgggtggtcaggtcgatcccacccagatacaactgactgatttagctaagacctatcaagatcccttactggcaaaagtgcgcaacattctgcgccgtgaatataatttctccaaaaatgttcagcgccgctttgccgtagatgcggtgttttccagtgaacagcttgtctatccacaagccgatggctcagtttgtagtagtaaagcctcggccgatggtactatgcggatggattgtgcctcgggttttggtgccgtcactatggtcactggcacgtttggatttgtggcggcgagccgtgttcttgcgcgcttggctcaattggcgaatgaatag

SEQ ID NO: 40822 - protein, 267 aa, Shewanella oneidensis MR-1
MTEAYQNRFGGIGRLYGQKALAKFAVSHVVVIGIGGVGTWAAEALARSGIGQMTLIDLDDICVTNTNRQIHALISTIGDSKVAVMAKRIREINPDCQVNEVEDFITVDNLGEYLLSAQAGGNIDYVVDCIDAVKQKAALIAWCKRQKIKIVTVGGAGGQVDPTQIQLTDLAKTYQDPLLAKVRNILRREYNFSKNVQRRFAVDAVFSSEQLVYPQADGSVCSSKASADGTMRMDCASGFGAVTMVTGTFGFVAASRVLARLAQLANE

SEQ ID NO: 40823 - DNA, 816 bp, Pseudomonas putida KT2440
  CDS (1)..(816): transl_table=11
atgaacatgagcacagaagatccacgctttgccggcgttgcccggctgtatggcgaccaggggctgcaacgtctgggccaggcccatgtggctgtggtcggtattggcggggtgggctcgtgggtggccgaagccctggcacgcagcggcgtgggcgagattaccctgttcgacctggacgatgtctgcgtcagtaacaccaaccgccaggcccatgcgctggaagggcaggtggggcggcccaaggtcgaggtcatggccgagcgcctgcgagcgatcaacccggcgtgcacggtgcatgcggtggccgacttcgtcacccgcgagaccatggccgagtacatcaccgagcacctcgactgcgtgatcgactgcatcgacagcgtcatggccaaggcggcgttgatcgcctggtgtcggcggcgcaagattgccattgtcactaccggtggcgcgggcgggcagatcgacccgacgcagatccagatcgccgacctgaacaagaccttcaacgacccgttggcttcacgggtgcgttccaccctgcgccgcgactacaacttctcgcggaatgtcagccgcaactatggcgtgccgtgcgtgttctccagtgaacagctgcgttaccccaagggggatggcagcgtctgcctgcagaaaagcttcgtgggtgagggcgtgcggctggactgctcgggtggctttggtgcggtgatgatggtgaccgcgacctttggcatggtagcggcgagcaaggcgatagaaaaactggtggctggagcgcgccggccgtcggaacgggtcaagcctgaataa

SEQ ID NO: 40824 - protein, 271 aa, Pseudomonas putida KT2440
MNMSTEDPRFAGVARLYGDQGLQRLGQAHVAVVGIGGVGSWVAEALARSGVGEITLFDLDDVCVSNTNRQAHALEGQVGRPKVEVMAERLRAINPACTVHAVADFVTRETMAEYITEHLDCVIDCIDSVMAKAALIAWCRRRKIAIVTTGGAGGQIDPTQIQIADLNKTFNDPLASRVRSTLRRDYNFSRNVSRNYGVPCVFSSEQLRYPKGDGSVCLQKSFVGEGVRLDCSGGFGAVMMVTATFGMVAASKAIEKLVAGARRPSERVKPE

SEQ ID NO: 40825 - DNA, 807 bp, Escherichia coli CFT073
  CDS (1)..(807): transl_table=11
atgtctgtggtaattagtgatgcatggcgtcagcgttttggtggcacagcgcgtctgtatggtgaaaaagcattgcaactgtttgctgacgcgcatatttgtgtggttggtatcggtggtgtcggttcctgggcggcggaagcgctagcgcgcacggggattggcgcaatcacgcttatcgatatggatgatgtgtgcgtcaccaataccaatcggcaaattcacgctctgcgcgataacgtcgggctggcaaaagcggaagtcatggcggagcgtattcgccagattaacccggagtgccgtgtaatggtggtggatgacttcgtgacgccggataacgtagcgcaatatatgaatgccggttattcgtacgtgattgatgctattgatagtgtacggcccaaagcggcgctgattgcttattgtcggcgcaataaaatcccgctggtcacgaccggtggcgctggtgggcagattgacccgacgcagattcaggttaccgatctggcgaaaacgattcaggacccgttggcggcgaagttgcgcgagcgcctgaaaagcgattttggcgtagtgaaaaacagtaaaggtaagctcggcgtggattgcgtgttctctaccgaagcgctggtgtacccgcagtcagacggcaccgtctgtgcgatgaaagccacggcggaagggccaaagcggatggattgtgcctcaggatttggcgcggcgacgatggtgaccgccacttttggctttgttgcggtttctcatgcgctgaagaagatgatggcgaaagcggcgcgtcaggggtaa

SEQ ID NO: 40826 - protein, 268 aa, Escherichia coli CFT073
MSVVISDAWRQRFGGTARLYGEKALQLFADAHICVVGIGGVGSWAAEALARTGIGAITLIDMDDVCVTNTNRQIHALRDNVGLAKAEVMAERIRQINPECRVMVVDDFVTPDNVAQYMNAGYSYVIDAIDSVRPKAALIAYCRRNKIPLVTTGGAGGQIDPTQIQVTDLAKTIQDPLAAKLRERLKSDFGVVKNSKGKLGVDCVFSTEALVYPQSDGTVCAMKATAEGPKRMDCASGFGAATMVTATFGFVAVSHALKKMMAKAARQG

SEQ ID NO: 40827 - DNA, 810 bp, Vibrio vulnificus CMCP6
  CDS (1)..(810): transl_table=11
atgcgcgaacttgatactcctgcttctgatagctacaaccaacgttttggtggtacgcgccgtctatacggcaacagcgaagtcgagattcttcgtgcagcccatgtctgtgtgattggtattggaggtgttggctcttgggcggtagaagcccttgcccgcacaggtatcggcgaactgacgctcatcgatatggatgacgtgtgtgtgaccaatattaaccgtcaaattcatgcgatgacgggaacagtcggccaaagcaagattgaagtgatggcagagcgcgtcaaactcattaatcctgagtgtaaagtgaatctgattgacgatttcatcacacctgacaatcaacacgaatacctcagcaaagagtttgattatgtactagatgctattgacagcgtcaaagcgaaagcttctttgctggcttattgtcgcagtaacaaaatcaaagtgattaccgttggtggtgcagggggccaagtggacccgacacaaatccaagtgacggatttgaccaaaacaatccaagatccactggcgaagaagatcaaggataccttgcgtcgccatcataactttccaaaaaatcccgcacgaaagtttggcattgactgtgtcttttccactgagcagctaaaatacccgcaagcggatggttccgtttgtaacgtaaaatcaacggcagaaggtccaaaacgcatggattgtgccagcggttttggtgccgcgacggtagtgaccgcgacctttggttttgtcgcggtggcgcgtatcgttgaaaagctgatccaaaagcataaaaactaa

SEQ ID NO: 40828 - protein, 269 aa, Vibrio vulnificus CMCP6
MRELDTPASDSYNQRFGGTRRLYGNSEVEILRAAHVCVIGIGGVGSWAVEALARTGIGELTLIDMDDVCVTNINRQIHAMTGTVGQSKIEVMAERVKLINPECKVNLIDDFITPDNQHEYLSKEFDYVLDAIDSVKAKASLLAYCRSNKIKVITVGGAGGQVDPTQIQVTDLTKTIQDPLAKKIKDTLRRHHNFPKNPARKFGIDCVFSTEQLKYPQADGSVCNVKSTAEGPKRMDCASGFGAATVVTATFGFVAVARIVEKLIQKHKN

SEQ ID NO: 40829 - DNA, 834 bp, Staphylococcus epidermidis ATCC 12228
  CDS (1)..(834): transl_table=11
atgtatataattataaagaagcatagatataatgaattggaatcaaaggagctaaagatgaaacatcaattttcaaggaatgaattagcaataggacaagaagggctgaacttactaaaaaataagactgttgcagttttaggtgttggtggcgtcgggtcatttgcagctgaggcattggctcggactaatatagggcacatcatacttatagataaagatgatgtcgatattacaaatgtgaacaggcaaattcatgcactgacttcaactattggtcaaagtaaagtcacgctaatggaagaaagaatcaaattaataaatcccgattgtaaagtaacttctttgcatatgttttataccgaggaaacatacaaagatatcttcaataattatgatattgattattttattgatgcaagcgatacaatcatttataaagttcatctcatgaaagagtgtttagaaagaggaattgagttaatttcaagtatgggtgcagcaaataagactgacccgacacgttttgaaattgcagatatttcaaaaacacatactgatcctatggctaaagtaattagaaatcgtttaaaacgccttggtattcgtaaaggtgttaaagtagtattttctgatgaaagtcctattgttattcgcgaggacgtaaaagaaacagtaggagataaaaatgcaatcaatagaaaagggcaaatgcctccatcttctaatgcatttgttccaagtgtagtaggccttatttgtgcaagctacgttgtcaacgatattttaaaggatatacctgtaaggcgaattaaagataaaggacaaaattaa

SEQ ID NO: 40830 - protein, 277 aa, Staphylococcus epidermidis ATCC 12228
MYIIIKKHRYNELESKELKMKHQFSRNELAIGQEGLNLLKNKTVAVLGVGGVGSFAAEALARTNIGHIILIDKDDVDITNVNRQIHALTSTIGQSKVTLMEERIKLINPDCKVTSLHMFYTEETYKDIFNNYDIDYFIDASDTIIYKVHLMKECLERGIELISSMGAANKTDPTRFEIADISKTHTDPMAKVIRNRLKRLGIRKGVKVVFSDESPIVIREDVKETVGDKNAINRKGQMPPSSNAFVPSVVGLICASYVVNDILKDIPVRRIKDKGQN

SEQ ID NO: 40831 - DNA, 831 bp, Xylella fastidiosa Temecula1
  CDS (1)..(831): transl_table=11
gtggtagagacacaagacaaggaaatacatgacatgaggaatgaacactggggcgaacgcttctccggtatcgatcggctatatggcctaggcacggttgcacggctgtcgacatgtcgtgtggcggtcatcggaataggtggagtcggttcgtggattgtcgaagcacttgcacgctcggctatagggtacatgagcttgattgacgcagacgatctctgtatctccaataccaatcgccagctacctgcactgataggtcaatacggaaggaacaaagcgcaggcaatggctgaacgttgccgtgcaattaatcccaggatcaacgtgtcagcaacagagttatttttggcaaggagcaacatggaagcactgcttggggaaaatttcgatttgattattgatgcttgcgacagctttcggatcaaagttgaaactatcgtttcctgtcggcgccataaacaacccctgatcaccgttggtgctgcagggggacgtactgaaccgactctagtgcgggtacgcgatatctctcgaacggaacacgatacgctgcttgctttgatccgtaagaaattgcgtagcgaattccattttcccaagaatccgaaacgctattttggtgtgcccgcagtgtattcattggagaatgtgaaatatccacaagctgacggtagcgtctgtggaatacgaccatcattaatcagcaacgcagcactgaatctagattgcagcacaggccttggcgcagcaactcacgtcactggtgcatttgcctttgctgcaactggcaaagcaattgagatgttactcacaccaaagaaaagataa

SEQ ID NO: 40832 - protein, 276 aa, Xylella fastidiosa Temecula1
MVETQDKEIHDMRNEHWGERFSGIDRLYGLGTVARLSTCRVAVIGIGGVGSWIVEALARSAIGYMSLIDADDLCISNTNRQLPALIGQYGRNKAQAMAERCRAINPRINVSATELFLARSNMEALLGENFDLIIDACDSFRIKVETIVSCRRHKQPLITVGAAGGRTEPTLVRVRDISRTEHDTLLALIRKKLRSEFHFPKNPKRYFGVPAVYSLENVKYPQADGSVCGIRPSLISNAALNLDCSTGLGAATHVTGAFAFAATGKAIEMLLTPKKR

SEQ ID NO: 40833 - DNA, 831 bp, Pseudomonas syringae pv. tomato str. DC3000
  CDS (1)..(831): transl_table=11
atgagcacagacgatccacgtttcgcaggcatcgcccgtttatacggcattgaggggctggcacgcctgcgcgcggctcatgtagcgatcgttggcatcggcggcgtgggctcgtgggcggcggaagccatggcgcgcagtggcgttggcgagatttcgctgttcgacatggacgacgtctgtgtcagcaacagcaaccgccagctacacgcgctggacacgaccgtggggcggcccaaggtcgaggtgatggccgagcgcatccgggcgatcaaccctgattgcgtcgtgcatgcggtgtctgatttcgtgacgcgcgacacgatggccgagtgcattaccccggacatggactttgtgatcgactgcatcgacagcgtcaatgccaaggctgcgctgatctcctggtgcaaacgacgcaagattcaaatggtcactaccggcgcggcgggcgggcagatcgacccgacgctgatccagatcgctgacctgaaccgcacgttcaatgacccgctggcttccaaggtgcgttccaccttgcgtcgcgattacggcttttcacgcaccccgaaccgccattacagcgtgccttgcgtgttttccaccgagcaactgcgctatcccaagcctgacggcagcatttgtctggaaaagaagttcattggtgatggcgtcaagctggactgtgccggtggctttggtgctgtgatgatggtgaccgccaccttcggcatgatcgccgccactcgcgccgtcgacaaactggttgccggcacacggcggccgtccgaacgtgcaaagccggcggctgtgacggccaatcaggcttga

SEQ ID NO: 40834 - protein, 276 aa, Pseudomonas syringae pv. tomato str. DC3000
MSTDDPRFAGIARLYGIEGLARLRAAHVAIVGIGGVGSWAAEAMARSGVGEISLFDMDDVCVSNSNRQLHALDTTVGRPKVEVMAERIRAINPDCVVHAVSDFVTRDTMAECITPDMDFVIDCIDSVNAKAALISWCKRRKIQMVTTGAAGGQIDPTLIQIADLNRTFNDPLASKVRSTLRRDYGFSRTPNRHYSVPCVFSTEQLRYPKPDGSICLEKKFIGDGVKLDCAGGFGAVMMVTATFGMIAATRAVDKLVAGTRRPSERAKPAAVTANQA

SEQ ID NO: 40835 - DNA, 810 bp, Vibrio parahaemolyticus RIMD 2210633
  CDS (1)..(810): transl_table=11
atgcgtgaactcgatacccctgcatctgacagctacaaccaacgctttggcggcacacgtcgtctttacggcaatagtgaagtggacattcttcgcgctgcacacgtttgtgtgattggtattggtggtgtaggttcatgggcggtggaagcgctggctcgtacggggatcggtgagctgactctgattgatatggacgatgtttgtgtcacgaacattaaccgccaaattcatgcgatgacgggtaccgttggtcaaagtaaaattgaagtgatggccgagcgcgtcaagttgatcaacccggagtgtaaagttaatctgattgatgatttcattacgccagacaatcaacatgagtacttaagcaaagagtttgattacgtgttggatgcgattgatagcgtaaaagcaaaagcgtctttgttggcgtattgccgcagcaacaagatcaaagtgatcaccacgggtggcgctggtggtcaggtcgatccaacgcagatcatggtcgctgatttaacgaaaacgattcaagatcctttagcgaagaaaatcaaagacactttgcgtcgtcatcataacttccctaagaatccggctcgtaagtttggtattgattgcgtgttttcaaccgagcagctgaagtatcctcaagcagacggttcagtgtgtggtgtgaagtcgacagcggaaggtccaaaacgcatggattgtgctagcggatttggtgcggcaactgttgtaaccgcgtcgtttggctttgttgcggtatcgcgaattgttgagaagctgattcaaaaacacaagaagtag

SEQ ID NO: 40836 - protein, 269 aa, Vibrio parahaemolyticus RIMD 2210633
MRELDTPASDSYNQRFGGTRRLYGNSEVDILRAAHVCVIGIGGVGSWAVEALARTGIGELTLIDMDDVCVTNINRQIHAMTGTVGQSKIEVMAERVKLINPECKVNLIDDFITPDNQHEYLSKEFDYVLDAIDSVKAKASLLAYCRSNKIKVITTGGAGGQVDPTQIMVADLTKTIQDPLAKKIKDTLRRHHNFPKNPARKFGIDCVFSTEQLKYPQADGSVCGVKSTAEGPKRMDCASGFGAATVVTASFGFVAVSRIVEKLIQKHKK

SEQ ID NO: 40837 - DNA, 807 bp, Salmonella enterica subsp. enterica serovar Typhi Ty2
  CDS (1)..(807): transl_table=11
atgtcagtggtgataagtgatgcctggcgccaacgctttggcggcaccgcgcgtctgtacggtgaaaaagcgctgcagcggtttgctgaggcgcatatctgcgtcgtgggaatcggcggggtaggatcatgggcggcagaggcgctggcgcgtacgggcatcggcgcgattacgctgattgatatggacgatgtctgcgtgaccaatacgaaccgtcagatccatgcgttgcgtgataacgttgggttggcgaaagcggaagtgatggccgaacggattcggcaaattaacccggagtgccgggtaacggttatcgatgatttcatcacgccggataatgtggcgggttatatggacgcgggttttacctatgtcattgacgccattgacagcgttcgtccaaaagccgcgctgattgcgtactgtcgccgatataaggttcctttagtaaccactggcggcgcgggcgggcagatcgatccgacgcaaatccaggtcgctgatttggcgaaaactatccaggatccgctggcggcaaaactgcgtgagagattgaaacataattttggcgtagtgaagaacagtaaaggtaagctgggcgtggactgcgttttttccaccgaagcgctggtttacccacaggcggacggttccgtatgcgcgatgaaagctaccgcagaagggccaaaacggatggattgcgcctctggcttcggcgcggcgacgatggtaacggcaacgttcggttttgtcgccgtttcccatgcgctgaagaagatcatggctaaagcggcgcgacaagaataa

SEQ ID NO: 40838 - protein, 268 aa, Salmonella enterica subsp. enterica serovar Typhi Ty2
MSVVISDAWRQRFGGTARLYGEKALQRFAEAHICVVGIGGVGSWAAEALARTGIGAITLIDMDDVCVTNTNRQIHALRDNVGLAKAEVMAERIRQINPECRVTVIDDFITPDNVAGYMDAGFTYVIDAIDSVRPKAALIAYCRRYKVPLVTTGGAGGQIDPTQIQVADLAKTIQDPLAAKLRERLKHNFGVVKNSKGKLGVDCVFSTEALVYPQADGSVCAMKATAEGPKRMDCASGFGAATMVTATFGFVAVSHALKKIMAKAARQE

SEQ ID NO: 40839 - DNA, 717 bp, Bacteroides thetaiotaomicron VPI-5482
  CDS (1)..(717): transl_table=11
atggaagaaaataactggcaacaacggacagaactcctgttgggagaagagaaaatgaagcgcatccgtgcttcgcatgtattggttgtcgggctgggaggcgtgggggcgtatgctgccgaaatgctttgccgggctggggtaggcaggatgacgattgtagacgcggataccgtgcagcctgccaatatgaaccgtcagcttcctgccatgcactccaccctggggatgccgaaagcggaagtgttggcggcacgctacaaagacatcaatccggatattgaactgaccgttttacccgtctatctgaaagacgagaacatccccgaactgttggactctgctaagtttgacttcatagtggatgccatcgatacgatcagccccaaatgctttctgatttatgaagcgatgaagcgtcatataaagattgtttccagcatgggcgcaggcgcgaagagcgatattacgcagatttgctttgccgatctttgggatacctatcactgcggactcagcaaagcggtgcggaagcgtttgcagaaaatgggagtaaagcgtaaacttcccgtcgtattcagtaccgaacaggcggacccgaaagcggtattgctcacggatgacgaacggaataagaaatcgacctgcggaacggtcagctatatgccggcagtcttcggctgctatctggcggaatatgtcattaaacgaatctaa

SEQ ID NO: 40840 - protein, 238 aa, Bacteroides thetaiotaomicron VPI-5482
MEENNWQQRTELLLGEEKMKRIRASHVLVVGLGGVGAYAAEMLCRAGVGRMTIVDADTVQPANMNRQLPAMHSTLGMPKAEVLAARYKDINPDIELTVLPVYLKDENIPELLDSAKFDFIVDAIDTISPKCFLIYEAMKRHIKIVSSMGAGAKSDITQICFADLWDTYHCGLSKAVRKRLQKMGVKRKLPVVFSTEQADPKAVLLTDDERNKKSTCGTVSYMPAVFGCYLAEYVIKRI

SEQ ID NO: 40841 - DNA, 765 bp, Haemophilus ducreyi 35000HP
  CDS (1)..(765): transl_table=11
atggaacgaatagataattatgaacggcggtttggtggcattgggcggttatatacggtagagggcttggctgtattgcgccgtgcacatatttgtgtaattggtattggtggcgtgggatcttggggcgtggaagcgttagcgcgttcgggcatcggtaacattacgatgatcgatatggacgatatttgtgtaaccaatatcaatcgtcaaattcatgctatgacgggtacagtggctcagctgaaaacagaggtaatgaaacaacgtgtgttgggcataaatccagaatgtgtggtagatattattgatgattttattacgccagaaaatatcccagattatttagatcgatcttatgattatgtgattgatgcgattgattcagtcaagactaaggcggcgttaattgcttattgtaagcggtataaaattaaattaattaccatcggtggtgcaggcgggcaaacagatcctagccaaattcaaatcgctgatttaagtaggacaattcaagatccattagcctcaaaagtgcgatcgttattacgtaagcaatatcattttagtcagaatccgagacgaaaatttggtattgattgtgtgttttctagtcaaccattaattttccctcaaatggaagagggctgccaaatgtctgcgagtatgaattgtgctaatggttttggtgccgtgacgatggttactgcgacgtttggtttttttgcggttagtcgagtgattgataaattattgcatcgataa

SEQ ID NO: 40842 - protein, 254 aa, Haemophilus ducreyi 35000HP
MERIDNYERRFGGIGRLYTVEGLAVLRRAHICVIGIGGVGSWGVEALARSGIGNITMIDMDDICVTNINRQIHAMTGTVAQLKTEVMKQRVLGINPECVVDIIDDFITPENIPDYLDRSYDYVIDAIDSVKTKAALIAYCKRYKIKLITIGGAGGQTDPSQIQIADLSRTIQDPLASKVRSLLRKQYHFSQNPRRKFGIDCVFSSQPLIFPQMEEGCQMSASMNCANGFGAVTMVTATFGFFAVSRVIDKLLHR

SEQ ID NO: 40843 - DNA, 864 bp, Bordetella pertussis Tohama I
  CDS (1)..(864): transl_table=11
atgaactctcagccttctgtgatcgcgccggcctgcgaggccgatgccgaacgccgcttcggcggcttggcccgtctgtatggcccggatgcgccggccgccctgcgcggggcccatgtcgcggtggcgggcctgggcggcgtcggctcctggaccgccgaagcgttggcgcgttgcggcgtgggcgccctgaccctgatcgacctggaccatatcgccgaatccaacgtcaaccgccagatccatgcgttgtcggacacgctggggcaggccaagatcgaggccatggcgcaacgcatcggccagatcaacccggcctgcgccgtgacccgtgtcgacgaattcgtcgcgcccgataacgtgatgcaagtgctgggcggtccctatgccgcgatcgtcgactgcaccgaccaggcggcggccaagatcgccatgatcctgcacgcgcgccagcgcggcgtgccgctgctgctgtgcggcggcgccggcggcaagaccgacccgctggcgctgcgcgccggcgacctgtccgaagccgtcaacgacgcgctgctggccaagctgcgcaacaagctgcggcgcgagcatggcttcccccgggcctcggacgccaacggcaaggtccgcaaacgggtgccgcgcatgggcgtgcgtgccttgtggttcgaccagcccgccatcctgcccgacgcctggacccgcgccgtcgagggcgaggacgatatgggcgcggccgggacccgcgcggccccccagggcctgtcgtgcgccggctacggctcggtcgtcaccgtgaccgccgccatgggcctggccgcggccaacgaagtgctgcgatgggtggtgggcaagccgggcgcttga

SEQ ID NO: 40844 - protein, 287 aa, Bordetella pertussis Tohama I
MNSQPSVIAPACEADAERRFGGLARLYGPDAPAALRGAHVAVAGLGGVGSWTAEALARCGVGALTLIDLDHIAESNVNRQIHALSDTLGQAKIEAMAQRIGQINPACAVTRVDEFVAPDNVMQVLGGPYAAIVDCTDQAAAKIAMILHARQRGVPLLLCGGAGGKTDPLALRAGDLSEAVNDALLAKLRNKLRREHGFPRASDANGKVRKRVPRMGVRALWFDQPAILPDAWTRAVEGEDDMGAAGTRAAPQGLSCAGYGSVVTVTAAMGLAAANEVLRWVVGKPGA

SEQ ID NO: 40845 - DNA, 873 bp, Bordetella parapertussis 12822
  CDS (1)..(873): transl_table=11
atggcgcccatgaactctcagccttctgtgatcgcgccggcctgcgaggccgatgccgaacgccgcttcggcggcttggcccgtctgtatggcccggatgcgccggccgccctgcgcggggcccatgtcgcggtggcgggcctgggcggcgtcggctcctggaccgccgaagcgttggcgcgttgcggcgtgggcgccctgaccctgatcgacctggaccacatcgccgaatccaacgtcaaccgccagatccatgcgttgtcggacacgctggggcaggccaagatcgaggccatggcgcaacgcatcggccagatcaacccggcctgcgccgtgacccgtgtcgacgaattcgtcgcgcccgataacgtgatgcaagtgctgggcggtccctatgccgcgatcgtcgactgcaccgaccaggcggcggccaagatcgccatgatcctgcacgcgcgccagcgcggcgtgccgctgctgctgtgcggcggcgccggcggcaagaccgacccgctggcgctgcgcgccggcgacctgtccgaagccgtcaacgacgcgctgctggccaagctgcgcaacaagctgcggcgcgagcatggcttcccccgggcctcggacgccaacggcaaggtccgcaaacgggtgccgcgcatgggcgtgcgtgccttgtggttcgaccagcccgccatcctgcccgacgcctggacccgcgccgtcgagggcgaggacgatatgggcgcggccgggacccgcgcggccccccagggcctgtcgtgcgccggctacggctcggtcgtcaccgtgaccgccgccatgggcctggccgcggccaacgaagtgctgggatgggtggtgggcaagccgggcgcttga

SEQ ID NO: 40846 - protein, 290 aa, Bordetella parapertussis 12822
MAPMNSQPSVIAPACEADAERRFGGLARLYGPDAPAALRGAHVAVAGLGGVGSWTAEALARCGVGALTLIDLDHIAESNVNRQIHALSDTLGQAKIEAMAQRIGQINPACAVTRVDEFVAPDNVMQVLGGPYAAIVDCTDQAAAKIAMILHARQRGVPLLLCGGAGGKTDPLALRAGDLSEAVNDALLAKLRNKLRREHGFPRASDANGKVRKRVPRMGVRALWFDQPAILPDAWTRAVEGEDDMGAAGTRAAPQGLSCAGYGSVVTVTAAMGLAAANEVLGWVVGKPGA

SEQ ID NO: 40847 - DNA, 873 bp, Bordetella bronchiseptica RB50
  CDS (1)..(873): transl_table=11
atggcgcccatgaactctcagccttctgtgatcgcgccggcctgcgaggccgatgccgaacgccgcttcggcggcttggcccgtctgtatggcccggatgcgccggccgccctgcgcggggcccatgtcgcggtggcgggcctgggcggcgtcggctcctggaccgccgaagcgttggcgcgttgcggcgtgggcgccctgaccctgatcgacctggaccacatcgccgaatccaacgtcaaccgccagatccatgcgttgtcggacacgctggggcaggccaagatcgaggccatggcgcaacgcatcggccagatcaacccggcctgcgccgtgacccgtgtcgacgaattcgtcgcgcccgataacgtgatgcaagtgctgggcggtccctatgccgcgatcgtcgactgcaccgaccaggcggcggccaagatcgccatgatcctgcacgcgcgccagcgcggcgtgccgctgctgctgtgcggcggcgccggcggcaagaccgacccgctggcgctgcgcgccggcgacctgtccgaagccgtcaacgacgcgctgctggccaagctgcgcaacaagctgcggcgcgagcatggcttcccccgggcctcggacgccaacggcaaggtccgcaaacgggtgccgcgcatgggcgtgcgtgccttgtggttcgaccagcccgccatcctgcccgacgcctggacccgcgccgtcgagggcgaggacgatatgggcgcggccgggacccgcgcggccccccagggcctgtcgtgcgccggctacggctcggtcgtcaccgtgaccgccgccatgggcctggccgcggccaacgaagtgctgcgatgggtggtgggcaagtcgggcgcttga

SEQ ID NO: 40848 - protein, 290 aa, Bordetella bronchiseptica RB50
MAPMNSQPSVIAPACEADAERRFGGLARLYGPDAPAALRGAHVAVAGLGGVGSWTAEALARCGVGALTLIDLDHIAESNVNRQIHALSDTLGQAKIEAMAQRIGQINPACAVTRVDEFVAPDNVMQVLGGPYAAIVDCTDQAAAKIAMILHARQRGVPLLLCGGAGGKTDPLALRAGDLSEAVNDALLAKLRNKLRREHGFPRASDANGKVRKRVPRMGVRALWFDQPAILPDAWTRAVEGEDDMGAAGTRAAPQGLSCAGYGSVVTVTAAMGLAAANEVLRWVVGKSGA

SEQ ID NO: 40849 - DNA, 777 bp, Chromobacterium violaceum ATCC 12472
  CDS (1)..(777): transl_table=11
atggaccactccgccgatctcgaccgccgcttcggcggcattgcccgcctgtacggcgacgacgcgctggcgggctttcgccgcgcccatgtctgcgtggtgggcgtcggcggcgtcggctcctgggcggtggaagcgctggcgcgcagcgcgatcggcaagctgacgctgatcgacctggacaacgtcgccgagtccaacaccaaccgccagctgccggcgctggacccgctgtacggcatggccaaggtgaccgcgctggccgagcgggtcaaggccatcaacccggcctgcgaggtgacggaaatagaagacttcgttaccgaggaaaacatggatgcgatgctgggccagggctacgactacatcgtcgactgcatcgacagcctgaaagtgaagacggcgatggccgcctggtgcgccaggaagcgccagcgcttcatcgtctccggcggcgccggcggccagatggacccgagccagatcaagctggccgacctgtccgaggtgacgcaggacccgctgctgtccaagctgcgttacaacctgcgccgccaccacggcttcgcccgcgacggcaagaagatgggcgtgccctgcgtctactccaccgaacagctggtctacccgcaggcccaggcctgcgacgccggagaggcgcgcgggcctcaaggtttatcctgcgccggcttcggcgcaggcatggtggtgacggccagcttcggcctgttcgccgcgtcgcgggtgctgacggatctggccaagactaagaagtaa

SEQ ID NO: 40850 - protein, 258 aa, Chromobacterium violaceum ATCC 12472
MDHSADLDRRFGGIARLYGDDALAGFRRAHVCVVGVGGVGSWAVEALARSAIGKLTLIDLDNVAESNTNRQLPALDPLYGMAKVTALAERVKAINPACEVTEIEDFVTEENMDAMLGQGYDYIVDCIDSLKVKTAMAAWCARKRQRFIVSGGAGGQMDPSQIKLADLSEVTQDPLLSKLRYNLRRHHGFARDGKKMGVPCVYSTEQLVYPQAQACDAGEARGPQGLSCAGFGAGMVVTASFGLFAASRVLTDLAKTKK

SEQ ID NO: 40851 - DNA, 750 bp, Porphyromonas gingivalis W83
  CDS (1)..(750): transl_table=11
atgaccgaagaaacggaaaagcccctcatggacggcagttgggatgagaggacggagctgctcataggcacggaagcagccgacaagctccggcactcgcatatactgatcgtcggcaccggcggagtaggcggctatgcagcagagatgctctgccgtgcaggagtgggcagactgactttggtggatgccgatgtagtgaatccgtccaatatcaacaggcagatcatagccctgcacagtaccgtcggccggtctaaagtagaggtgttggccgatcgtctgcaggatatcaatccacgggtaaaggtctatccggttgccgcttttctaaaagatgaggctatggaggagctgctggatgcagccaaatacgactttgtggtcgatgccatcgattcgctcagtccgaaagtattcctcatcgccctaagcaagcggcgaggcctgccggtaatcagttcgatgggagcaggagccaaacgcgatgcctcgcttatcgatgtggcggacatagcccgatcgtacaactgcacgttggcacgtgctgtccgtaagcgactccgcaagctgggaatatcacgcggcgtgccggtcgtattcagcagcgagttgccggacgaaagctctgtaatggagatcgaaggagaacgctgcaaacgctccacagccggtaccatatcctatatgccggctattttcggttgcaggatagccgcttatgtaatagaaaaactgaccgaacaatga

SEQ ID NO: 40852 - protein, 249 aa, Porphyromonas gingivalis W83
MTEETEKPLMDGSWDERTELLIGTEAADKLRHSHILIVGTGGVGGYAAEMLCRAGVGRLTLVDADVVNPSNINRQIIALHSTVGRSKVEVLADRLQDINPRVKVYPVAAFLKDEAMEELLDAAKYDFVVDAIDSLSPKVFLIALSKRRGLPVISSMGAGAKRDASLIDVADIARSYNCTLARAVRKRLRKLGISRGVPVVFSSELPDESSVMEIEGERCKRSTAGTISYMPAIFGCRIAAYVIEKLTEQ

SEQ ID NO: 40853 - DNA, 651 bp, Wolinella succinogenes DSM 1740
  CDS (1)..(651): transl_table=11
gtggatttagtggatcgattctcccgcactagagtgctctttggagagggctttgagaagatacaacgctccaaagtggtgatttttggcgtggggggcgtgggcagcttcgtgcttgattctctctaccgaacgggcgttggagagatcacgattattgactgtgatgagtttgatgtgaccaatcagaatcggcagatcggctctgaagcgctcggagagaagaaggtggaggctttagcgaggcgctatgagggggtcacgcctatcgttgcgaatgtggatgaggcttttttggagggctttagcttagaggagtttgatgtggtggtggatgcgattgatgatattcctgccaaggtggctctcgctaagagagcgcacaccaagctccttagctctacaggaagtgccaaaaagcttaatcctctccacattaaagtcgattcgatctggaagagctatggagataagtttgccagaaagtttagggaggcgctcaaaaaagagggctttgaggatgattttttggtggtttttagtcccgaaccgcctcagtgtaaaggactggggagttttagtgcggtcacgggctcttttgggttacaattagccagtgaagcgatacgcaaaatcttagtcaaggagtga

SEQ ID NO: 40854 - protein, 216 aa, Wolinella succinogenes DSM 1740
MDLVDRFSRTRVLFGEGFEKIQRSKVVIFGVGGVGSFVLDSLYRTGVGEITIIDCDEFDVTNQNRQIGSEALGEKKVEALARRYEGVTPIVANVDEAFLEGFSLEEFDVVVDAIDDIPAKVALAKRAHTKLLSSTGSAKKLNPLHIKVDSIWKSYGDKFARKFREALKKEGFEDDFLVVFSPEPPQCKGLGSFSAVTGSFGLQLASEAIRKILVKE

SEQ ID NO: 40855 - DNA, 813 bp, Photorhabdus luminescens subsp. laumondii TTO1
  CDS (1)..(813): transl_table=11
atgcaaacttctctttctgatgcatatatgcagcgctttgccgggactgcccgtttatatggacaaaaagcgctttctttgttttgccattctcatgtttgtgttgtgggtatcggtggtgttggctcttgggcggctgaggctctggctcgtacaggaatcggtgcgatcactctgattgatatggatgatgtttgtatcaccaatactaatcgccaattacatgctttaaaacagcatattgggcaaccaaaaactgaagtgattgccgagcgtattctggcaattaatccagagtgcaaagtgacttgtgttgatgattttctcacacccgataatgttgaagagatgatggcggctggattcagttatgtgattgatgctatcgatagtgtcaggccgaaagctgcgctgttggcttattgccgtcgccataaaattccgctggtgacaaccggtggagcaggagggcaacttgatcctacacagattcaggttgttgatttggcaaaaacggttcaggaccctttagcggctaaactgcgcgaaaggctgaaatctgattatcgtgttgtgaagaatggcaaaggtaaattaggcattgattgtgtgttttcaaccgagcaattagtttatccgcagagtgatggttctgtttgcgccgcgaaaagtaccgcagagggaactaagcgtatggattgcgcttctggttttggtgccgcaacgatggtcacggcgacatttggatttgttgcggtttcccatgctctgaaaaaaatgatagctaaagcgcaacgtcagggtgatctttaa

SEQ ID NO: 40856 - protein, 270 aa, Photorhabdus luminescens subsp. laumondii TTO1
MQTSLSDAYMQRFAGTARLYGQKALSLFCHSHVCVVGIGGVGSWAAEALARTGIGAITLIDMDDVCITNTNRQLHALKQHIGQPKTEVIAERILAINPECKVTCVDDFLTPDNVEEMMAAGFSYVIDAIDSVRPKAALLAYCRRHKIPLVTTGGAGGQLDPTQIQVVDLAKTVQDPLAAKLRERLKSDYRVVKNGKGKLGIDCVFSTEQLVYPQSDGSVCAAKSTAEGTKRMDCASGFGAATMVTATFGFVAVSHALKKMIAKAQRQGDL

SEQ ID NO: 40857 - DNA, 861 bp, Vibrio vulnificus YJ016
  CDS (1)..(861): transl_table=11
gtgcgtataaatcgcactctttgtttttctggcgactttggaatcatcactatgcgcgaacttgatactcctgcttctgatagctacaaccaacgttttggtggtacgcgccgtctatacggcaacagcgaagtcgagattcttcgtgcagcccatgtctgtgtgattggtattggaggtgttggctcttgggcggtagaagcccttgcccgcacaggtatcggcgaactgacgctcatcgatatggatgacgtgtgtgtgaccaatattaaccgtcaaattcatgcgatgacgggaacagtcggccaaagcaagattgaagtgatggcagagcgcgtcaaactcattaatcctgagtgtaaagtgaatctgattgacgatttcatcacacctgacaatcaacacgaatacctcagcaaagagtttgattatgtactagatgctattgacagcgtcaaagcgaaagcttctttactggcttactgtcgcagtaacaaaatcaaagtgatcaccgtcggtggtgctggggggcaagtggacccgacacaaatccaagtggcggatttgaccaaaaccatccaagatccactggcgaagaagatcaaggataccttgcgtcgccatcataactttccaaaaaatcccgcacgaaagtttggtattgactgtgtcttttccactgagcagctaaaatacccgcaagcggatggttccgtttgtaacgtaaaatcaacggcagaaggtccaaaacgcatggattgtgccagcggttttggtgccgcgacggtagtgaccgcgacctttggttttgtcgcggtggcgcgtatcgttgaaaagctgatccaaaagcataaaaactaa

SEQ ID NO: 40858 - protein, 286 aa, Vibrio vulnificus YJ016
MRINRTLCFSGDFGIITMRELDTPASDSYNQRFGGTRRLYGNSEVEILRAAHVCVIGIGGVGSWAVEALARTGIGELTLIDMDDVCVTNINRQIHAMTGTVGQSKIEVMAERVKLINPECKVNLIDDFITPDNQHEYLSKEFDYVLDAIDSVKAKASLLAYCRSNKIKVITVGGAGGQVDPTQIQVADLTKTIQDPLAKKIKDTLRRHHNFPKNPARKFGIDCVFSTEQLKYPQADGSVCNVKSTAEGPKRMDCASGFGAATVVTATFGFVAVARIVEKLIQKHKN

SEQ ID NO: 40859 - DNA, 831 bp, Bdellovibrio bacteriovorus HD100
  CDS (1)..(831): transl_table=11
ttgcctcaacctcaagaaactgagtacgttttgcaccgccgtttcgatcgtatggggcgcctggttggagacgaggtgatgaaacgccttttcaacactcacgtgatggtgattggtttgggcggcgtgggctcttgggctgcggaatccctggctcgttcgggcgtcggcaagctgacgatcatcgatttcgatgaaatctgcatcaccaacgccaaccgccagttgcatgctttgcaaggcctggtgggtaaaaagaaggccgaagtgatgggcgagcgtctgcgcaaaatcaacccgcagaacaccgtcactgtgattccggaattctacaacgctgaaaactcggaaatgatgttgtcccataagccggactatattgtggatgccatcgacaacctgacggcaaaaacccacttgctggcgacctgccgcgagcgtggtatcaaagtcatcacttccggtggttctgcggcgaagatggatccacttcgcatcaagaaggcggacttggctgatacgtatgttgatcccatggccgctcaagtacgaaaaatgctgcgccagaaatatgatttcccggaaaagaatttcggcattccttgcatcttctcggatgaaactccgattcagccggtggagctgaaatacgacaacggtcagggtttcaaatgcgtttgcccgaaaggtcaaaacgatctgcacagctgtgacagccgtaacgtgatctggggaactgcgagctatgtgacgggggcttttggtttggccatggcttctcatatcgtgaatgaaatccatgctcaagtttgggcggaggcaaaagcatga

SEQ ID NO: 40860 - protein, 276 aa, Bdellovibrio bacteriovorus HD100
MPQPQETEYVLHRRFDRMGRLVGDEVMKRLFNTHVMVIGLGGVGSWAAESLARSGVGKLTIIDFDEICITNANRQLHALQGLVGKKKAEVMGERLRKINPQNTVTVIPEFYNAENSEMMLSHKPDYIVDAIDNLTAKTHLLATCRERGIKVITSGGSAAKMDPLRIKKADLADTYVDPMAAQVRKMLRQKYDFPEKNFGIPCIFSDETPIQPVELKYDNGQGFKCVCPKGQNDLHSCDSRNVIWGTASYVTGAFGLAMASHIVNEIHAQVWAEAKA

SEQ ID NO: 40861 - DNA, 1575 bp, Magnaporthe grisea 70-15
  CDS (1)..(1575)
atggcttcctcatttattacccgcgcaacctcggattcgcggttccagtttgctgctacggcattgctgtctggagctgtcgctgcgggcgcaatccttagctatcaacgcgtagccaaggaggagcgcctgtccaaactcaaaagctcgattcctgcgcccgatgaagatggcgacatgtcgagaagtcagcagcttaccgacttcggcgcaacactgcccacgaacccagacaaggaagacctacggaatgcggcattagcgcgtcgggccatggcgggagactacgacgaggagctgatactggagcaactggcgcgcaacgccgtcttcctcggcgacgagggcatgaccaagctgcgccgctcgtttgtcatagtggtcggctgcggaggcgtgggatcgcactgcgcaacctccctggcgcgctccggcgtcggccgcatccgcctcatcgactttgacaacgtctccctctcgtcgctgaaccgacacgccgtggcgacgctggccgacgtcggcacgcaaaagacggcctgcctcaagaggcgcctcgtggccatcgcaccctggatccgcttcgacctgtgcaccgaaaagttcgattccgaggccgaggagaggctgctggggccgtgggcggaggacggcgccaagcccgactttgtggtggacgccatcgataacatcgagaccaaggtcgagctgctgcgctactgccacgagcacaagatccccgtcatctcgtcgatgggtgccgcgtgcaagggcgatccgacccgcgtcatggtgggagacgtcggcgttagcaccgacgaccccctctcgcgcgccaccagacgcaggctcaagctgctgggcatcacgagcggcatccccgtcgtgttctcgacggagcagaggggcgagggcaaggcggagctgctgccgctgtccgaggaggagttccaaaaggggtcggtgggcgatctcggcgtgctgccggactttagggtgcgcatcctgccggtgctgggcaccatgccggccgtctttggctacactgctgcgaaccacgtcattctcagcataacaggatacccgacagactacgcaccaggcaagtcccgcgacaagctttacgaccaggcgttggcatccctccaaggaaccgaggccaaggtggttcgtagtttcaacggcggcaacgcggatatcgtcgtcggtctacggacgccgctgagccccggtgacatcgccttcatgatcgaagaggtcttccgcgggaggagcgccatcacgggcatcgcgacgcgtctggtcctcgtgcggtggaggaggccggcgaccgaccccttgatggtgattgagggcgcacccgacgacgacggcccacaaaagtcggcaccggcgccacaaaagtcgacgcgcctccggctgagcgacctcgtgtgcatgaccaaggacgaggccatggtgcacctgagggaggttctcctcgccggcaagcagcccgaggaaatgtacgatgccgagacggtggagcgcgtcaacatgaggctgagcgaagcggccggctacgaaaagttcagatag

SEQ ID NO: 40862 - protein, 524 aa, Magnaporthe grisea 70-15
MASSFITRATSDSRFQFAATALLSGAVAAGAILSYQRVAKEERLSKLKSSIPAPDEDGDMSRSQQLTDFGATLPTNPDKEDLRNAALARRAMAGDYDEELILEQLARNAVFLGDEGMTKLRRSFVIVVGCGGVGSHCATSLARSGVGRIRLIDFDNVSLSSLNRHAVATLADVGTQKTACLKRRLVAIAPWIRFDLCTEKFDSEAEERLLGPWAEDGAKPDFVVDAIDNIETKVELLRYCHEHKIPVISSMGAACKGDPTRVMVGDVGVSTDDPLSRATRRRLKLLGITSGIPVVFSTEQRGEGKAELLPLSEEEFQKGSVGDLGVLPDFRVRILPVLGTMPAVFGYTAANHVILSITGYPTDYAPGKSRDKLYDQALASLQGTEAKVVRSFNGGNADIVVGLRTPLSPGDIAFMIEEVFRGRSAITGIATRLVLVRWRRPATDPLMVIEGAPDDDGPQKSAPAPQKSTRLRLSDLVCMTKDEAMVHLREVLLAGKQPEEMYDAETVERVNMRLSEAAGYEKFR

SEQ ID NO: 40863 - DNA, 1341 bp, Kluyveromyces lactis NRRL Y-1140
  CDS (1)..(1341)
atgggtaacgataattggagagttattgctagcactgcggctattacttttgccggtgtgaagtttatcgatttggctatcaagtcttggaataaacgcactgcagcatcttactcgggttcagacaatgaaaaagatgtgaaactagccaagcggctaagggagactagagaatacgataatttgctttacagggagcaacttgctcgtaattatgctttcttaggcgaagaaggtatggaaaaattgaaggaacagtattttattgtcgttggtgctggtggtgtcggttcatgggtcgttaccatgttggtgagatctggtgcctgccgtattaaaattatcgattttgaccaagtttctctatcctctttgaatagacacagttgtgctgacttgtacgatgttggtttatcgaaagtgaacgttttaagagatcatttacaaaagatcgccccatggtgtaacatcgaagtctgtaatgagctttggaacaaagaaaatgccgatcgtttgatttttggtgatggaacgcccacttttgtcattgattgtattgataaccttgatactaaggttgatctattggaatatacatacaagaaaaacattccagtcatagcatccatgggagccgcaactaaaagtgatccaactagaattaatgttggagatttgactatgacagaagaagatccactagcacgtactgttagaagaagactaaaacaaagaggtatcaccaagggcattcctgctgtctttagtgcagagaaaccagatccaaaaaaggcaaaattattaccgttgccagaagaagaattccagaagggtaatgtggatcaactaagtgcattaaaggatttccgtgtcagaattctacccgtcttgggaaccatgccaggtgtttttgggttgactattgctacttgggtcttatgtaagattagcggttacccaatggaaccaatagaaggtaagaacagaatcaaattgtacgatggcatttatcaatccttagctggtcaaatgacgcgtattggtcaaaaagaccaaagaattccaattgcactaagtgacattggatacattgtggaggaagtgtggagaggtaaatcaccaatcagtaactattctactaggttaactttatccaaatgggatccaacaaagccagtgagcattcaaaacgtcatactgctaaccaaagatgagcaaagggagcatgaagctagaatcttgaacggtaccgagacattttctgatgtatactctgaagaagctttagcaatgattaataaaaggttccaagaagagttgtactattctcagttcaggtga

SEQ ID NO: 40864 - protein, 446 aa, Kluyveromyces lactis NRRL Y-1140
MGNDNWRVIASTAAITFAGVKFIDLAIKSWNKRTAASYSGSDNEKDVKLAKRLRETREYDNLLYREQLARNYAFLGEEGMEKLKEQYFIVVGAGGVGSWVVTMLVRSGACRIKIIDFDQVSLSSLNRHSCADLYDVGLSKVNVLRDHLQKIAPWCNIEVCNELWNKENADRLIFGDGTPTFVIDCIDNLDTKVDLLEYTYKKNIPVIASMGAATKSDPTRINVGDLTMTEEDPLARTVRRRLKQRGITKGIPAVFSAEKPDPKKAKLLPLPEEEFQKGNVDQLSALKDFRVRILPVLGTMPGVFGLTIATWVLCKISGYPMEPIEGKNRIKLYDGIYQSLAGQMTRIGQKDQRIPIALSDIGYIVEEVWRGKSPISNYSTRLTLSKWDPTKPVSIQNVILLTKDEQREHEARILNGTETFSDVYSEEALAMINKRFQEELYYSQFR

SEQ ID NO: 40865 - DNA, 1548 bp, Aspergillus nidulans FGSC A4
  CDS (1)..(1548)
atggcatcctggatccaacgacagaacaactcacaccaggtccagctcgctgcaactgcagtgctgtccggagctgctgttgcaggcgcgatactcggttttcaaaaataccggagacgagaagctgtgaagcggttaaaggcttctataccaacaatcgatgagaagcaccgcgcagagagcctgaatgaatttggcgccgcagtcccgggaccatactggagcaaagaggatgaacgtggtgcagctcttgcgcggagggcgcaagagggggactacgatgaggagcttatcctcgagcagctcgcccgaaaccgcgtctttctaaaggatgagggtctcgcaaaactccgcgacgcgttcataattgttgttgggtgtggaggcgtcggctcgcatgctgttgcttcgctggctcgatcgggcgtatccaaaatccgtttgattgatttcgatcaagtcacgctctcttctttgaatcggcacgcccttgccacattagcggatgttggaacacccaaggtacattgcattcgcaggagactgcagcagatcgtcccgtgggtgaagttcgactgccgaaacgagctctttggcgcatctgctgccgatgacttgctggcaccatggactctggacgatgccgacaaaggacagaagcccgtctatgtgcttgattgcattgacaacatccaatctaaggttgagctgctgcactactgtcactcgcattccatcccggtgatatcctctatgggtgctggatgtaaatcagatcccacgcgcgtcatgatcacggatatgtcagtcagctcagacgaccgactttcacgcagcaccaggaggaggcttaaactgctgggagtaactactggtatcccagtggtgttttccacggaaaagcccggccccggcaaggcgacactattgccgctggcagaagaggagttcgccaagggcgaggtaggcgagttatcagtactgccggatttccgttctcgaatcctccccgtacttggaaccatgcctgccgtctttggatacactcttgcaaatcacgtcatttgcgagatctctgaatacccaacagactatagcatgggtggtaagggcaaagacaagctctacgacaccgtccacgcacagctactggtgacccttgaacgactcgctcgagcggaaagtgaatcaggcacccagcctattggactgcgtctcccgatgagcagagacgatgtcatctatctcgttgacgagatttggcggggcaagagtgtcgttactggacttcctagtcggctagcacttaccctatggaaccgaccatccaatgggtttaagccggatccccaatgggagaaagaagggcaaatcttgattccattcaagcctgaggatttagtgcttatgaccaaggaggaagccacccgccatgagaaggaagttcttatgggtggaaagaaggtcgaagacctgtacagcgaggagattatccagaaggtgaatcagcgccagaaggagatggcatactatgagcaatttcgatga

SEQ ID NO: 40866 - protein, 515 aa, Aspergillus nidulans FGSC A4
MASWIQRQNNSHQVQLAATAVLSGAAVAGAILGFQKYRRREAVKRLKASIPTIDEKHRAESLNEFGAAVPGPYWSKEDERGAALARRAQEGDYDEELILEQLARNRVFLKDEGLAKLRDAFIIVVGCGGVGSHAVASLARSGVSKIRLIDFDQVTLSSLNRHALATLADVGTPKVHCIRRRLQQIVPWVKFDCRNELFGASAADDLLAPWTLDDADKGQKPVYVLDCIDNIQSKVELLHYCHSHSIPVISSMGAGCKSDPTRVMITDMSVSSDDRLSRSTRRRLKLLGVTTGIPVVFSTEKPGPGKATLLPLAEEEFAKGEVGELSVLPDFRSRILPVLGTMPAVFGYTLANHVICEISEYPTDYSMGGKGKDKLYDTVHAQLLVTLERLARAESESGTQPIGLRLPMSRDDVIYLVDEIWRGKSVVTGLPSRLALTLWNRPSNGFKPDPQWEKEGQILIPFKPEDLVLMTKEEATRHEKEVLMGGKKVEDLYSEEIIQKVNQRQKEMAYYEQFR

SEQ ID NO: 40867 - DNA, 774 bp, Acinetobacter sp. ADP1
  CDS (1)..(774): transl_table=11
atgacgaccaatctccagaccgatgaatatgaccgccgttttgcgggtgttgccaaaatttatggtgatgatgcatttaatcactatgaaaaaagtcatgtgatggtgattggaattggtggtgtcggaagctgggcagtagaggctttagcacgtacagcgattggtgaaattacactggttgatatggatgtgctggctgcatcgaatatcaatcgacaattgcctgcactctcatctaccttgggacaagaaaaagccgacatcatggcagagcgttgtcgccagattaatccgcacgttaaaattaatatcgtggatgattttttatcggctgataatgttgcagatattctcgcatcacaacctgatgtcgtgcttgactgcattgatgatgtgaaagcaaaactggcattaatgctgtattgtcgttttaacaaaattccgttgattgtgtcaggtggggcaggtggaaaactagatccactcaagattcgagtggcagatttatccaagacagaacaagatccaatgctggcaaaattgcgtagtcaattgcgagcaaaaggcatttgtaaaaaacccaaagagaaatttgggataacctgtgtttattcgattgataatccattttcaggtacagaagtctgtgcggcggctggactacgttgtggcggatatggttctgctgttgtcgtcacatctacctttggcatgattgcagcggctgaagtattaaagaagttagatatgaaaaaaacgaagcctgaataa

SEQ ID NO: 40868 - protein, 257 aa, Acinetobacter sp. ADP1
MTTNLQTDEYDRRFAGVAKIYGDDAFNHYEKSHVMVIGIGGVGSWAVEALARTAIGEITLVDMDVLAASNINRQLPALSSTLGQEKADIMAERCRQINPHVKINIVDDFLSADNVADILASQPDVVLDCIDDVKAKLALMLYCRFNKIPLIVSGGAGGKLDPLKIRVADLSKTEQDPMLAKLRSQLRAKGICKKPKEKFGITCVYSIDNPFSGTEVCAAAGLRCGGYGSAVVVTSTFGMIAAAEVLKKLDMKKTKPE

SEQ ID NO: 40869 - DNA, 819 bp, Erwinia carotovora subsp. atroseptica SCRI1043
  CDS (1)..(819): transl_table=11
atgaatacgcaattatccgaagcctatttgcaacgcttcggcggcaccgcgcggttatatggtcaacaggcgctggcgctattctctcaagcccacgtttgtgtgattggcattggtggcgtcggttcctgggcggctgaggcgctggcgcgtaccggcatcggcgcgattacgctgatcgatatggatgatgtgtgcgtcagtaataccaaccgccagattcatgcattgcgtcaacataccggacagtcgaaaacggaagtaatggcggaacgtattctggcgatcaacccagaatgcaacgtcacctgcgtggatgatttcatcagcgcggaaaacgtggccgagtttctcgaccagaattttagctatgtgattgatgccatcgacagcgtgcgcccgaaggctgcgctgctgtcatactgccgccgctataagatccccgtggtgacaactggcggcgcgggtgggcaaatcgatccgacccggattgaggtcgtcgatttagccaaaaccattcaagatccgttggccgctaagctgcgtgaacgactgaagcacgattttaacgtggtgaaaaacagcaaagggaaactgggcattgactgtgtattttccagcgaaccgctggtttatccgcagcctgacggttctgtctgtgcgtctcgcagtacggctgatggggtgatgcgtatggattgtgcgtcaggctttggcgcggcgacgatggtcaccgcaacctttgggtttgttgcggtatctcatgcactgaagaaaatgatcgcgaaaatggaaagagcgtctgcgacgcagagatag

SEQ ID NO: 40870 - protein, 272 aa, Erwinia carotovora subsp. atroseptica SCRI1043
MNTQLSEAYLQRFGGTARLYGQQALALFSQAHVCVIGIGGVGSWAAEALARTGIGAITLIDMDDVCVSNTNRQIHALRQHTGQSKTEVMAERILAINPECNVTCVDDFISAENVAEFLDQNFSYVIDAIDSVRPKAALLSYCRRYKIPVVTTGGAGGQIDPTRIEVVDLAKTIQDPLAAKLRERLKHDFNVVKNSKGKLGIDCVFSSEPLVYPQPDGSVCASRSTADGVMRMDCASGFGAATMVTATFGFVAVSHALKKMIAKMERASATQR

SEQ ID NO: 40871 - DNA, 765 bp, Desulfotalea psychrophila LSv54
  CDS (1)..(765): transl_table=11
gtgaacaaacctggaaaaatggatcgattttcacgattaaaggcactaataggcgaaaaaagagtggaaagactggcagcacgtagcgtcaccatcgtcggcatcggtgccgttggcggtcatgccatggagggacttgcccgctcaggcattggccatttacgcctggttgactttgaccggattgaccccagtaacatcaatcgacagctgcttgcccttgactccacggtgggaagattgaaggtagaacttgcccaagagcgcatctaccagatcaacccccagtgtaaggttgaaatactgccgctctttgccaatcaggagagcatagataagattcttgaccccaaaccggatcttctcatcgatgccatcgacgccctcaacccaaagacatgtctacttgaggcagcatttcggcacaagatccccactatctcgtccatgggggccgccctgcgcacagatccaacaaaaataacctacggagacattttcgacacccgcggttgccctctggccaaacagctacgcaaacgtctgcgcaaccggggtataggggagggcatcttctgcgtatactcccacgaggcggtgaacttcaactacggtaacgaaggcgcagacgagcccaacgacaagagtttggggcgttcacgtaatatccttggttctactccaacaattccggcaattttcggactaacaattgcgaatcaagcaatttttgcccttgctgaaaaagagatctccttttcctag

SEQ ID NO: 40872 - protein, 254 aa, Desulfotalea psychrophila LSv54
MNKPGKMDRFSRLKALIGEKRVERLAARSVTIVGIGAVGGHAMEGLARSGIGHLRLVDFDRIDPSNINRQLLALDSTVGRLKVELAQERIYQINPQCKVEILPLFANQESIDKILDPKPDLLIDAIDALNPKTCLLEAAFRHKIPTISSMGAALRTDPTKITYGDIFDTRGCPLAKQLRKRLRNRGIGEGIFCVYSHEAVNFNYGNEGADEPNDKSLGRSRNILGSTPTIPAIFGLTIANQAIFALAEKEISFS

SEQ ID NO: 40873 - DNA, 828 bp, Yersinia pseudotuberculosis IP 32953
  CDS (1)..(828): transl_table=11
atgagcacagcctattccgaagcttaccaacagcggtttggtggtattgcacgcctctatggccaacaggcattggcgcttttttcacaggcgcatgtttgtgtcatcggtattggcggcgtaggctcatgggcggcggaagcattggcgcgtactggtatcggtgcgattacactaattgatatggatgatgtttgtgtcacgaatactaaccgtcaaatccatgctctgcgccacaacatcgggcaggctaaaacagaagtcatggccgagcgtattctggccatcaatcctgaatgtcatgtgacttgtattgatgattttattactgcggataatgtcgctgagcttttaaataagaatttcagctatgttattgatgcaattgatagtgtgcgcccaaaagctgcgctgttgtcttactgccgtcgctataaaatcccagtggtgactaccggtggagcgggtgggcaaattgatccaacccgtattgccgtggttgatctggctaaaaccatccaagatcctttagctgcaaaactgcgcgaaagactgaaaagtgattttaacgtggtgaaaaacagcaaaggtaagctaggtattgactgtgttttctccagtgagcctttggtctatccacaagccgatggctctgtgtgtgcatcccgcagcactgccgaaggacctaaaaaaatggattgcacctctggattcggctcggcaacgatggttactgccacgtttggctttgttgctgtgtctcatgtattgaagaagatgatggctaaagcggcccgtcagcacgagtcagccgccactgcgtcataa

SEQ ID NO: 40874 - protein, 275 aa, Yersinia pseudotuberculosis IP 32953
MSTAYSEAYQQRFGGIARLYGQQALALFSQAHVCVIGIGGVGSWAAEALARTGIGAITLIDMDDVCVTNTNRQIHALRHNIGQAKTEVMAERILAINPECHVTCIDDFITADNVAELLNKNFSYVIDAIDSVRPKAALLSYCRRYKIPVVTTGGAGGQIDPTRIAVVDLAKTIQDPLAAKLRERLKSDFNVVKNSKGKLGIDCVFSSEPLVYPQADGSVCASRSTAEGPKKMDCTSGFGSATMVTATFGFVAVSHVLKKMMAKAARQHESAATAS

SEQ ID NO: 40875 - DNA, 765 bp, Bacillus licheniformis ATCC 14580
  CDS (1)..(765): transl_table=11
ttgttacatcagttttcacgcaacgaattagcgattggaaaagaaggtttaaatattttaaaaaacagcacggtcgccgttttgggcgtcggcggggtcggttctttcgccgcggaagcgctcgcccgttcaggtgtcggcagaatcgtgatggtcgataaagacgatgttgacatcacgaatgtcaaccgtcagctgcctgctttactttcaacggtcggacagccgaaagttgacttaatgaaagcgagaatcgccgatattaatccggaatgcgacgtcatcgctttaaaaatgttctataccgaagagacgtatgaacagttttttgcatatgaaccggattatgtaatcgacgcttcagacacgattcattataaaatccacttaatgaaagagtgcctgaagcgcggcatcaacatcatctcaagcatgggagcggccaataaaacagatccgacaaggtttcaagtggccgatatttcaaaaacccacaccgatccgattgcaaaagtcatccggacgaggcttcgcaaggaaggcattacgaaaggcattaaagtcgtcttttctgacgaaagtccgatcgtgatccgtgaagacgtacgccaagtcgtcggaaatgatgaagcgaaaatccgcaaagcgcagatgccgccgtcttcaaatgcttttgttccgtcagtcgcaggcttgattatgggcggccatgtgatcatggagcttttgaaagatattccgatcaaaagggtgaaagataagtaa

SEQ ID NO: 40876 - protein, 254 aa, Bacillus licheniformis ATCC 14580
MLHQFSRNELAIGKEGLNILKNSTVAVLGVGGVGSFAAEALARSGVGRIVMVDKDDVDITNVNRQLPALLSTVGQPKVDLMKARIADINPECDVIALKMFYTEETYEQFFAYEPDYVIDASDTIHYKIHLMKECLKRGINIISSMGAANKTDPTRFQVADISKTHTDPIAKVIRTRLRKEGITKGIKVVFSDESPIVIREDVRQVVGNDEAKIRKAQMPPSSNAFVPSVAGLIMGGHVIMELLKDIPIKRVKDK

SEQ ID NO: 40877 - DNA, 768 bp, Mannheimia succiniciproducens MBEL55E
  CDS (1)..(768): transl_table=11
atggaaagagtggataattacgaacagcgtttcggcggtatcggacgtttatacaccccacagggattggaacgcttacgtcaagcgcatgtttgcgtgattggtattggcggtgtcggctcttggtgtgtagaagcgttggcgcgttcgggggtcggcaagttgactttaatcgatatggacgatatttgcgttaccaatattaatcgccaaattcatgcactcaccggcaatatcggtaaattaaaaaccgaagtgatgaaagagcgggtggagttgatcaaccctgaatgcaaagttgaaatcattgatgattttatttctcccgaaaatttagcggaatatctacacagcgattatgattatgtgatcgatgccattgatagcgtaaaaaccaaagcggcgttaatcgcttattgtaagcgtaataaaataaaagtgattatggttggcggtgccggcggtcaaacggatccgactcaaattcaaattgccgatttaagtaaaaccgtacaggatcctttagcctcaaaagtgcggtcgcttttacgtaaaaattatcatttcagccaaaatccgaagcgtaaattcggtgtggattgcgtattttccacgcagccgttgatttttccgcaaatgagcgaaggttgtgggatttccgcttcaatgaattgtgagaacggctttggtgcggcgaccatgattacggcaactttcggtttttttgcggtttctcgagttgtcgacaagttacttactaaacaataa

SEQ ID NO: 40878 - protein, 255 aa, Mannheimia succiniciproducens MBEL55E
MERVDNYEQRFGGIGRLYTPQGLERLRQAHVCVIGIGGVGSWCVEALARSGVGKLTLIDMDDICVTNINRQIHALTGNIGKLKTEVMKERVELINPECKVEIIDDFISPENLAEYLHSDYDYVIDAIDSVKTKAALIAYCKRNKIKVIMVGGAGGQTDPTQIQIADLSKTVQDPLASKVRSLLRKNYHFSQNPKRKFGVDCVFSTQPLIFPQMSEGCGISASMNCENGFGAATMITATFGFFAVSRVVDKLLTKQ

SEQ ID NO: 40879 - DNA, 867 bp, Burkholderia pseudomallei K96243
  CDS (1)..(867): transl_table=11
atgtctcgtaccgacgccattgcgacgcctcacgatgttactccgcagccatccggcgagcttgacgcggatcgcgcccggcgcttcggcggcgtcgcccggctctacggcgccgatgcgctcgccgcgttcgagcgcgcgcgcgtcgcggtgatcggcatcggcggcgtcggctcgtgggcggccgaggcgctcgcgcgcagcgccgtgggggaactgaccctgatcgatctcgacaacgtcgccgaaagcaacacgaaccggcagatccatgcgctcgacggcaattacggcaagccgaaggtcgacgcgatggccgagcggatcgcgctcatcgatccggcgtgccgcgtcgtgaagatcgaggatttcgtcgagccggacaatctcgacgcactgctcggcggcggcttcgactacatcgtcgacgcgatcgacagcgtgcgcacgaaggtcgcgctgatcgcgtggtgcgtcgcgcgcgcgcagccgctcgtgacggtcggcggcgcgggcggccagctcgatccgacccgcatccgcattgacgatctcgcgcagacgatccaggacccgctgctgtcgaaggtgcgcgcgcaactgcgcaagcagcacggtttcccgcgcgggccgaaagcccggttcaaggtgagcgccgtctattcggacgagccgctgatctatccggaggcggccgtgtgcgacgtcgacgatgtcgcgatgcacaccgcaaccgacgcgcaggcgccggggccgaccgggctcaattgcgcgggcttcggctcgagcgtgtgcgtgaccgcgagcttcgggttcgcggcggccgcgcatgcgctgcgtgcgctcgccgcgcgggcggggcgctaa

SEQ ID NO: 40880 - protein, 288 aa, Burkholderia pseudomallei K96243
MSRTDAIATPHDVTPQPSGELDADRARRFGGVARLYGADALAAFERARVAVIGIGGVGSWAAEALARSAVGELTLIDLDNVAESNTNRQIHALDGNYGKPKVDAMAERIALIDPACRVVKIEDFVEPDNLDALLGGGFDYIVDAIDSVRTKVALIAWCVARAQPLVTVGGAGGQLDPTRIRIDDLAQTIQDPLLSKVRAQLRKQHGFPRGPKARFKVSAVYSDEPLIYPEAAVCDVDDVAMHTATDAQAPGPTGLNCAGFGSSVCVTASFGFAAAAHALRALAARAGR

SEQ ID NO: 40881 - DNA, 822 bp, Azoarcus sp. EbN1
  CDS (1)..(822): transl_table=11
atgtcggcaccgatcacttccacctttccggacgtcgaccgggaacgacgcttcggcggcatcgcccgcctttatggcaacgatgcgctgccgcgactcgatctcgcgcgcgtctgcgtcgtgggtatcggcggagttggttcctgggcggccgaggcgctcgcacgcagcggcgtcggccacctcacgctcatcgacctggaccacgtcgccgaatcgaacatcaaccggcagagccacgcgctcgacgccaccctggggcaggcgaaggtgctcgcgatggccgagcggctgcgggcgatcaatccgctcgtgaacgtcgcgatcgtcgaggacttcatcggcgaagacaacgcggcggcgctgctgcgcgatttcgacgtcgtcatcgacgcgatcgacaacgtgcgcgccaaggtcgcgatcgtgctggcgtgccgcgcgcgccgcattccgctgatcgtcgccggcggcgcgggcggcaagaccgatccttcgaggatccgcgtcgacgacctgtcgcgcaccgagcaggacccgctgctggcaaaagtgcgcaagcggctgcgcagcgagcacggctttccgcgcaacccgaaacggccgttcggcatcgaggcggtgtattcgagcgaagcgctgcgcctcgacggagcggcgtgcgacctgcctcacgggccgcaggggctcgcctgtgccggctatggttcgagcatgatgatgacggccagcgtcggcttgttcgccgcggcacgcgcgctcgaacggctgctggcgcgccgggccggcgacgtccccgacgcgccggaggaccaggcatga

SEQ ID NO: 40882 - protein, 273 aa, Azoarcus sp. EbN1
MSAPITSTFPDVDRERRFGGIARLYGNDALPRLDLARVCVVGIGGVGSWAAEALARSGVGHLTLIDLDHVAESNINRQSHALDATLGQAKVLAMAERLRAINPLVNVAIVEDFIGEDNAAALLRDFDVVIDAIDNVRAKVAIVLACRARRIPLIVAGGAGGKTDPSRIRVDDLSRTEQDPLLAKVRKRLRSEHGFPRNPKRPFGIEAVYSSEALRLDGAACDLPHGPQGLACAGYGSSMMMTASVGLFAAARALERLLARRAGDVPDAPEDQA

SEQ ID NO: 40883 - DNA, 768 bp, Bacillus clausii KSM-K16
  CDS (1)..(768): transl_table=11
atgttgcaccagttttcaagaaatgagttagcaatcggccatgatgggctggagcgcctaaaaggcagtacagttgctgtgttaggggtaggaggagtcggatccttttcggcagaagcgctagcccgttctggcgtcggtaaaattgtgctcgttgataaagacgatgtcgatattacgaatgtaaatcgccagatccatgcattgctctcaacagttggcaagccaaaagttgatttgatggctgcgcggataagtgacatcaacccaaattgtgaagtaattacaagaaaaatgttttataccgaggaaacgtatgaatcgtttttttcacataaacttgacttcgtcattgatgccagcgacaccatttcttataaaatccatttgattaaacaatgtaagctgcgggggattccgattatatccagcatgggagtcgccaataaaatggatccaactcgtttaaggattgcggatatttccgaaacaagctatgaccccattgcaaaagtaattcgtacgaggttacgaaaagaggggattcataaaggcgtcaatgttgttttttcagatgagaaaccgatccaaattagggaagacatccgtaaggaaattgtacctgaaacggctgaacaaggaaacatccgcaaagcgaaactaccgccgtcttcaaatgcattcgtgccgtctgtatcaggcttgatcatggcaggacatgtcatcactcgtttactagaaggcatagaaattaaccgacgttcttaa

SEQ ID NO: 40884 - protein, 255 aa, Bacillus clausii KSM-K16
MLHQFSRNELAIGHDGLERLKGSTVAVLGVGGVGSFSAEALARSGVGKIVLVDKDDVDITNVNRQIHALLSTVGKPKVDLMAARISDINPNCEVITRKMFYTEETYESFFSHKLDFVIDASDTISYKIHLIKQCKLRGIPIISSMGVANKMDPTRLRIADISETSYDPIAKVIRTRLRKEGIHKGVNVVFSDEKPIQIREDIRKEIVPETAEQGNIRKAKLPPSSNAFVPSVSGLIMAGHVITRLLEGIEINRRS

SEQ ID NO: 40885 - DNA, 651 bp, Campylobacter jejuni RM1221
  CDS (1)..(651): transl_table=11
atgaatgatagatttacacgtataaaatggctagttggagaagaaaaatttcaaaaaatttcacaaacaaaagttttggtttgcggacttggtggagtgggtggaatttgcgttgatgcgctttatcgtagcggttttcaaaatcttactttaatcgatgcggataaatttgaaatcaccaatcaaaaccgccaaattcatagtgaaaatttaggcgaagaaaaagctaaggtttttgctagaatttacaatgctaagggtatagtaagtaaaatagacaatgaatttttagcaaattttgatttaagtgaatttgatttaatcatcgatgcaattgatgatatccctgcaaaagtagcacttgccaatttgatcgattttaagcgtcaaatttttatctcttctacaggtggggctagaaagcttgatcctacgcgtataaaaactacaagtatatttaaaacccacggagatgctttagcaaaaaaatttcgttacgagcttagaaaatcaggttttaaaggaaattttgatgtggttttttcagatgaggaagcgcattgtaaagatcttggatctttcatgggtgtgactgcatcttttggtttagctttagcaagtttagcattaagaaaagttcttgctagataa

SEQ ID NO: 40886 - protein, 216 aa, Campylobacter jejuni RM1221
MNDRFTRIKWLVGEEKFQKISQTKVLVCGLGGVGGICVDALYRSGFQNLTLIDADKFEITNQNRQIHSENLGEEKAKVFARIYNAKGIVSKIDNEFLANFDLSEFDLIIDAIDDIPAKVALANLIDFKRQIFISSTGGARKLDPTRIKTTSIFKTHGDALAKKFRYELRKSGFKGNFDVVFSDEEAHCKDLGSFMGVTASFGLALASLALRKVLAR

SEQ ID NO: 40887 - DNA, 777 bp, Staphylococcus epidermidis RP62A
  CDS (1)..(777): transl_table=11
atgaaacatcaattttcaaggaatgaattagcaataggacaagaagggctgaacttactaaaaaataagactgttgcagttttaggtgttggtggcgtcgggtcatttgcagctgaggcattggctcggactaatatagggcacatcatacttatagataaagatgatgtcgatattacaaatgtgaacaggcaaattcatgcactgacttcaactattggtcaaagtaaagtcacgctaatggaagaaagaatcaaattaataaatcccgattgtaaagtaacttctttgcatatgttttataccgaggaaacatacaaagatatcttcaataattatgatattgattattttattgatgcaagcgatacaatcatttataaagttcatctcatgaaagagtgtttagaaagaggaattgagttaatttcaagtatgggtgcagcaaataagactgacccgacacgttttgaaattgcagatatttcaaaaacacatactgatcctatggctaaagtaattagaaatcgtttaaaacgccttggtattcgtaaaggtgttaaagtagtattttctgatgaaagtcctattgttattcgcgaggacgtaaaagaaacagtaggagataaaaatgcaatcaatagaaaagggcaaatgcctccatcttctaatgcatttgttccaagtgtagtaggccttatttgtgcaagctacgttgtcaacgatattttaaaagatatacctgtaaggcgaattaaagataaaggacaaaattaa

SEQ ID NO: 40888 - protein, 258 aa, Staphylococcus epidermidis RP62A
MKHQFSRNELAIGQEGLNLLKNKTVAVLGVGGVGSFAAEALARTNIGHIILIDKDDVDITNVNRQIHALTSTIGQSKVTLMEERIKLINPDCKVTSLHMFYTEETYKDIFNNYDIDYFIDASDTIIYKVHLMKECLERGIELISSMGAANKTDPTRFEIADISKTHTDPMAKVIRNRLKRLGIRKGVKVVFSDESPIVIREDVKETVGDKNAINRKGQMPPSSNAFVPSVVGLICASYVVNDILKDIPVRRIKDKGQN

SEQ ID NO: 40889 - DNA, 777 bp, Neisseria gonorrhoeae FA 1090
  CDS (1)..(777): transl_table=11
atgtccgacaacgctttgacctcttcgcgacgcttcggcggcatcgccagactctacggagactctgccttgacgcacttttcacaggcacacgtctgcgtggtcggcgtgggcggggtcggctcgtgggcggtcgaggctttggcgcgcacgggcatcgggcgtttgactttgattgatttggacaacgttgccgaatcgaatgccaaccgccagctgcacgccctgaccggcgacttcggcaaagcaaaagttaccgccttgcgcgaacgtattacacaaatcaatccgcaatgcgaagtatttgaaattgaagatttcgttaccgaagacaatttgccggaatacttcggaaaaggttttgatttcgtcatcgacgcgatcgaccaagtgcgcgtcaaagcggcaatggcggcttattttgtggaacgcaaacaaccgtttgtcctcagcggcggcgcgggcggacagaaaaatcccgccctgattcaaaccgccgatttaagccgcgtaacccacgacccgctgcttgccaacctgcgctacaccttgcggaaacgctacggcttcagccgcgatactaaggaaaaaatgcgcgtgccgtgcgtgtattcgaccgaaaatatcatgccgccgcaatcgggcgcagcgtgttctgccgatgccgcgccgcagggcttgtcatgcgccggctatggcgcaagtatgctcgttaccgcttcgttcggactgtattgcgcacaggcggcggtggaacacatcgcgggcaaaaaataa

SEQ ID NO: 40890 - protein, 258 aa, Neisseria gonorrhoeae FA 1090
MSDNALTSSRRFGGIARLYGDSALTHFSQAHVCVVGVGGVGSWAVEALARTGIGRLTLIDLDNVAESNANRQLHALTGDFGKAKVTALRERITQINPQCEVFEIEDFVTEDNLPEYFGKGFDFVIDAIDQVRVKAAMAAYFVERKQPFVLSGGAGGQKNPALIQTADLSRVTHDPLLANLRYTLRKRYGFSRDTKEKMRVPCVYSTENIMPPQSGAACSADAAPQGLSCAGYGASMLVTASFGLYCAQAAVEHIAGKK

SEQ ID NO: 40891 - DNA, 711 bp, Bacteroides fragilis NCTC 9343
  CDS (1)..(711): transl_table=11
atggagaactggcaacagagaacagaactccttttaggagcggagaagatggaacgcttgcggaaatcgcatgtgttggttgtcggattaggaggagtaggtgcttatgcagccgaaatgatttgtcgtgcaggcgtagggcgaatgacaatagtagatgctgatattgtacagcccactaatattaaccgccagttgccggctactcatgccactttgggtatggaaaaagcgaaggtgttggaagcacgtttcagagatattaatccggaaatagagttgactgtattgcctgtttatctgaaagacgataacatacccgaactgctggatgctgcacgttatgattttatagtcgatgccattgacaccataagtccaaagtgttatctgatttatcatgctcttcagcgacgcattaaaataatatcgagtatgggtgcaggagcaaagagtgatattacacaagtgcgttttgccgacctttgggatacttatcattgtggtcttagcaaggccgtccggaagcgtttgcaaaaaatgggggtaaagcgtaagcttcccgtggtgttcagtacggaacaggcggattcgaaagcagtattgctgactgatgatgagaggaacaagaaatccacttgcggaactgtgagctatatgccggcggtgtttggctgttatttggcagagtacgttatcaaaagattgtaa

SEQ ID NO: 40892 - protein, 236 aa, Bacteroides fragilis NCTC 9343
MENWQQRTELLLGAEKMERLRKSHVLVVGLGGVGAYAAEMICRAGVGRMTIVDADIVQPTNINRQLPATHATLGMEKAKVLEARFRDINPEIELTVLPVYLKDDNIPELLDAARYDFIVDAIDTISPKCYLIYHALQRRIKIISSMGAGAKSDITQVRFADLWDTYHCGLSKAVRKRLQKMGVKRKLPVVFSTEQADSKAVLLTDDERNKKSTCGTVSYMPAVFGCYLAEYVIKRL

SEQ ID NO: 40893 - DNA, 831 bp, Pseudomonas syringae pv. syringae B728a
  CDS (1)..(831): transl_table=11
atgagcgcagaagatccgcggttcgctggtatcgcccgtctatatggcatcgaagggctggcacgcctgcgcgcggcccatgtggcggtggtgggtatcggcggggtgggctcctgggcggcggaagccatggcgcgcagtggtgtgggcgagatttcgctgttcgacatggacgatgtctgtgtcagtaacagcaaccgtcagttgcatgcgctcagcagtacggttggccagtcgaaagtcgaggtgatggctgagcgtatccgtgcgatcaaccccgattgcatcgtgcacgcggtggctgatttcgtcacccgcgacaccatggccgagtgcatcaccccggacatggacttcgtcatcgactgtatcgacagcgtcaacgccaaggctgcgctgatttcctggtgcaaacgacgcaagattcagatggtcaccaccggcggggcgggcgggcagatcgatccgaccctgattcagatcgccgacctgaaccgcaccttcaatgacccgctggcctccaaggtgcgttcgaccctgcgtcgggattatggcttttcacgcacgcctaaccgtcactacagcgtgccttgcgtgttttccactgaacaactgcgctaccccaagccggatggcagtatttgtctggaaaagaaattcgtcggcgagggcgtaaagctcgattgcgccggtggtttcggtgcagtgatgatggtgactgcgacctttggcatggttgccgctacccgtgcggtagacaagctggtggcgggcacgcgacggccttcggagcggatcaagccagcgcttgtaacacccgatcaggcttga

SEQ ID NO: 40894 - protein, 276 aa, Pseudomonas syringae pv. syringae B728a
MSAEDPRFAGIARLYGIEGLARLRAAHVAVVGIGGVGSWAAEAMARSGVGEISLFDMDDVCVSNSNRQLHALSSTVGQSKVEVMAERIRAINPDCIVHAVADFVTRDTMAECITPDMDFVIDCIDSVNAKAALISWCKRRKIQMVTTGGAGGQIDPTLIQIADLNRTFNDPLASKVRSTLRRDYGFSRTPNRHYSVPCVFSTEQLRYPKPDGSICLEKKFVGEGVKLDCAGGFGAVMMVTATFGMVAATRAVDKLVAGTRRPSERIKPALVTPDQA

SEQ ID NO: 40895 - DNA, 771 bp, Haemophilus influenzae 86-028NP
  CDS (1)..(771): transl_table=11
atggctagaatagataattacgaacaacgctttggtggcattgggcgactttatacgcctgatggcttagcgcgcttacgccaagcgcatatttgcgtaataggcattggtggcgtgggttcttgggtcgtggaggccttagcacgttcaggtatttgcgaactcacattaattgatatggatgatatttgcgtcacaaatatcaatcgccaacttcctgcgatgagcggcacaatcggcaaattaaaaactgaagtcatgtcagagcgagtaaaattaattaacccagaatgtaccgtcaatattattgatgattttatctcgccagagaatcaatcggattatctcaaccgaggctatgactacgtcattgatgccattgacaatgtgaaaactaaagcgtcgctgattgcttattgtaaacgtaacaaaattaatgtgattactattggcggtgctggcggtcaaactgatccaacccaaattcaaattgccgatctcagtaaaactattcaggatccgctgctcgccaaagtgcggtcagttttacgcaaggattacaattttagccaaaatccaaagcgcaaatttagtatcgatgcggtattttcaacacaacctttaatattcccacaaatgactgaaggctgttctacttctgccacaatgaattgcgcaaacggatttggtgcagccacgatgattacggcaacctttggtttttttgccgtttctcgtgtaatagataaattactaaagaaaaaatcttaa

SEQ ID NO: 40896 - protein, 256 aa, Haemophilus influenzae 86-028NP
MARIDNYEQRFGGIGRLYTPDGLARLRQAHICVIGIGGVGSWVVEALARSGICELTLIDMDDICVTNINRQLPAMSGTIGKLKTEVMSERVKLINPECTVNIIDDFISPENQSDYLNRGYDYVIDAIDNVKTKASLIAYCKRNKINVITIGGAGGQTDPTQIQIADLSKTIQDPLLAKVRSVLRKDYNFSQNPKRKFSIDAVFSTQPLIFPQMTEGCSTSATMNCANGFGAATMITATFGFFAVSRVIDKLLKKKS

SEQ ID NO: 40897 - DNA, 816 bp, Pseudomonas fluorescens Pf-5
  CDS (1)..(816): transl_table=11
atgagtacagaagatccacggtttgccggcgtcgcccgtttgtatggcattgaaggcctggagcggctgcgggcggcccatgtggcgatcgtcggagtcggcggggtcggttcctgggcggcggaagccatcgcccgttgcggggtgggcgagatctcgctgttcgacctcgatgacgtctgcgtcagcaacagcaaccgccagttgcacgcgctggacagcactgtgggcaagcccaaggtcgaggtcatggccgaacgcctgcgcggcatcaatccggactgcaaggtgcacgcggtggcggacttcgtcacccgcgagaccatggccgagtacatcaccccagacatcgattgcgtgatcgactgcatcgacagcgtcaatgccaaggcggcgctgattgcctggtgcaagcgacgcaagatccagatcatcaccaccggcggcgcgggggggcagatcgacccgacgctgatccaggtctgcgacctgaaccgtaccttcaatgacccgttggcctccaaggtgcgttccaccctgcgccgcgactacggtttctcgcgcaccgtaacccggcactacagcgtgccttgcgtgttttccaccgaacagctgcgttatccgaagccggacggcagcatctgcctgcagaagagttttgtcggcgatggcgtcaagctcgactgtgccggcggctttggcgcggtgatgatggtgaccgcgaccttcggcatggtggcggcgaccaaggcggtggacaagattgtcgccggcgtgcgccgcccgtcggaacgcagcaaacccgccgctccgtag

SEQ ID NO: 40898 - protein, 271 aa, Pseudomonas fluorescens Pf-5
MSTEDPRFAGVARLYGIEGLERLRAAHVAIVGVGGVGSWAAEAIARCGVGEISLFDLDDVCVSNSNRQLHALDSTVGKPKVEVMAERLRGINPDCKVHAVADFVTRETMAEYITPDIDCVIDCIDSVNAKAALIAWCKRRKIQIITTGGAGGQIDPTLIQVCDLNRTFNDPLASKVRSTLRRDYGFSRTVTRHYSVPCVFSTEQLRYPKPDGSICLQKSFVGDGVKLDCAGGFGAVMMVTATFGMVAATKAVDKIVAGVRRPSERSKPAAP

SEQ ID NO: 40899 - DNA, 891 bp, Psychrobacter arcticus 273-4
  CDS (1)..(891): transl_table=11
atgaatgaagatacacaggggcagtcaagcatcacccagccagagcctgttgaagagcagatatcggtacctgaagtattgacaacatccgatagggatgccgagcagtatgagcgccgttttaaagggactcagacactgtatggtacttctgcagtagatacatttgctactgcacatgtctacgtcattggtatcggcggtgtgggctcttgggcagcagaagctttagcacgcacagcagtcggtaatatcacgttaattgatttggatatattagtggcatccaatgtcaatcggcagttgcccgctttagatagcacctttgggcaaagtaaaattgaggcgatggcagcacgtatccgtgagataaatccaaaagtaactctgcatttgattgatgactttttgaccactgaaaacgtagcgaccttgctacccagtcgtgaagaagcaaaaatggcggctcaaaccactcctattgtgattttagattgtgtcgatgatatggatgccaagcttgctattgccttgcattgccgctttaacaaactaaaattggtctgcgctggcggagcaggtggtaaaatagatcccagtcagattagaatcggcgatttacgtgacacctatcaagatccgttattggccaaattacgtaacaaactgcgtcatgaaaaaggcatcaatagtgccttaaaagagaaatttggtatcaagtgtgtctattcgacagaaccaccgcgtgtagacaaaagctgtcaagtaggtggtttacactgtggtggttatggttcggcggtagtcgtcacatcagtggttgccatgctgatggtgagtgaggcattacaattattgctcaagcaggcggctgttaaaccaagcctctga

SEQ ID NO: 40900 - protein, 296 aa, Psychrobacter arcticus 273-4
MNEDTQGQSSITQPEPVEEQISVPEVLTTSDRDAEQYERRFKGTQTLYGTSAVDTFATAHVYVIGIGGVGSWAAEALARTAVGNITLIDLDILVASNVNRQLPALDSTFGQSKIEAMAARIREINPKVTLHLIDDFLTTENVATLLPSREEAKMAAQTTPIVILDCVDDMDAKLAIALHCRFNKLKLVCAGGAGGKIDPSQIRIGDLRDTYQDPLLAKLRNKLRHEKGINSALKEKFGIKCVYSTEPPRVDKSCQVGGLHCGGYGSAVVVTSVVAMLMVSEALQLLLKQAAVKPSL

SEQ ID NO: 40901 - DNA, 819 bp, Colwellia psychrerythraea 34H
  CDS (1)..(819): transl_table=11
atgtctgactattctttacgttttggtggcattagccgtttatatggcgaacatggcgcgaatgttttacaacaagcaaatttttgtgttattggcattggtggtgttggatcttgggtagctgaagccctagcccgcaatggtattggaaaaataaccttaatagatttagatgatatatgcaccacgaatattaatcgtcagatccatgcattaactgacactgttggacaaagtaaagttgatgttatggctgagcgcatcaaacaaatcaaccctgagtgccaagttaatatcattgaagactttgtaacggtagaaaatctctctagtttaattaccaaagattttgattatgtcattgatgccattgattctgtagacattaaaacacgccttattgcttattgcagaggtagtaaattaccgattatcaccattggtggtgccggtggacaggtggatccaagcaaaattgaaatcacagacttgagcaagacttatcaagacccgttacttgctaaagtaaaaaatcagctacgtcgagagtttaactttccgcgtgctgatcttaaaacagcaggtaaacgaaagttctcaatcgatgccgtatattcaacagaacaattacgctaccctgctgatggtaaacaaggtgaagtttgcttggctaaacctgataagagtaatggcgagcaaggtgctacgcgtttagattgccaaagtggttttggtgcaacaacccatgtcacagccacctttgctttttttgccgtgggtagagccattgacaaactattaataaaacatcaaaaataa

SEQ ID NO: 40902 - protein, 272 aa, Colwellia psychrerythraea 34H
MSDYSLRFGGISRLYGEHGANVLQQANFCVIGIGGVGSWVAEALARNGIGKITLIDLDDICTTNINRQIHALTDTVGQSKVDVMAERIKQINPECQVNIIEDFVTVENLSSLITKDFDYVIDAIDSVDIKTRLIAYCRGSKLPIITIGGAGGQVDPSKIEITDLSKTYQDPLLAKVKNQLRREFNFPRADLKTAGKRKFSIDAVYSTEQLRYPADGKQGEVCLAKPDKSNGEQGATRLDCQSGFGATTHVTATFAFFAVGRAIDKLLIKHQK

SEQ ID NO: 40903 - DNA, 837 bp, Pseudomonas syringae pv. phaseolicola 1448A
  CDS (1)..(837): transl_table=11
ttgatcatgagcgcagaagatccacgtttcgctggcatcgcccgtttgtacggcattgaaggcctggcgcgcctgcgcgcggctcatgtggcagtggtcggtatcggcggcgtgggctcgtgggcggcggaagccatggcacgcagtggtgtgggcgagatttcgctgtttgacatggacgacgtctgtgtcagcaacagcaaccgccaattgcatgcactgggcagcacagtcggtcggccgaaggttgaagtgatggccgagcggattcgcgcgatcaatcctgattgcatcgtgcatgcggtttctgatttcgtgacccgcgacacgatggctgagtgcatcaccccggacatggatttcgtgatcgactgtatcgacagcgtcaacgccaaggcagcactgatttcgtggtgtaagcggcgcaagatccagatggtcaccaccggtggtgccggtgggcagattgatccgaccctgattcagatcgccgacttgaaccgcacgttcaacgacccgctggcctccaaggtacgttccaccttgcgtcgcgactatggcttttcacgcacgcccaaccgccactacagcgtgccttgcgtgttctccagcgaacagctgcgctatcccaagcctgatggcagtatttgcctggaaaagaagttcgtcggtgagggtgtaaagctcgactgtgcaggcggcttcggcgcggtgatgatggtcactgccacgttcggcatggtcgccgccacgcgtgcagtggacaagctggttgcaggtgcgcgacggccttcggagcgggtcaagccagcggttgcaacgcccgatcaggcttga

SEQ ID NO: 40904 - protein, 278 aa, Pseudomonas syringae pv. phaseolicola 1448A
MIMSAEDPRFAGIARLYGIEGLARLRAAHVAVVGIGGVGSWAAEAMARSGVGEISLFDMDDVCVSNSNRQLHALGSTVGRPKVEVMAERIRAINPDCIVHAVSDFVTRDTMAECITPDMDFVIDCIDSVNAKAALISWCKRRKIQMVTTGGAGGQIDPTLIQIADLNRTFNDPLASKVRSTLRRDYGFSRTPNRHYSVPCVFSSEQLRYPKPDGSICLEKKFVGEGVKLDCAGGFGAVMMVTATFGMVAATRAVDKLVAGARRPSERVKPAVATPDQA

SEQ ID NO: 40905 - DNA, 768 bp, Dechloromonas aromatica RCB
  CDS (1)..(768): transl_table=11
atgagcttcgatcgcgaacgtcgtttcggaggcatcacgcgcctctatggtgtcgagggtgcagaacgcatccagcaggccaatgtatgcatcgtcggcatcggcggcgtcggctcctggattgtcgaggccctggcacgaaccggcgtcaaccggatgaccctcgttgacctggacatggtggccgaatccaacaccaatcggcaaatccacgcgctaggcgatatttacggcaaagcaaaagtggaggctatggccgaacgggtacgcgccatcaacccggattgcgccgtaacctgtatcgaggattttgttacgcctgaaaacgttgggcagattttcgagcaacaattttcggtaatcatcgatgccatcgaccaagtccgcgccaaggcggcaatgattgcgttctgccggcgccaaaagatcccaatcatcattgccggagcagcgggagggcaaatcgatccaacgcaagttcgcgtggccgatctcagccagacagtgcaggacccactcctagccaaggttcgctcattacttcgccgagagtatggctttccaaaagacaccaagaagaaattcggcgtctcagcaattttttcgaccgaacacttgcgctatccggacaaaaataataactcctgcgaagcagaccgcggcccaacaggcctaaattgcgcgggcttcggatcttcagtctgtgtgacatccgtattcggcatggcagctgcggctcaagccatcaatctaatcaccaccccctga

SEQ ID NO: 40906 - protein, 255 aa, Dechloromonas aromatica RCB
MSFDRERRFGGITRLYGVEGAERIQQANVCIVGIGGVGSWIVEALARTGVNRMTLVDLDMVAESNTNRQIHALGDIYGKAKVEAMAERVRAINPDCAVTCIEDFVTPENVGQIFEQQFSVIIDAIDQVRAKAAMIAFCRRQKIPIIIAGAAGGQIDPTQVRVADLSQTVQDPLLAKVRSLLRREYGFPKDTKKKFGVSAIFSTEHLRYPDKNNNSCEADRGPTGLNCAGFGSSVCVTSVFGMAAAAQAINLITTP

SEQ ID NO: 40907 - DNA, 888 bp, Ralstonia eutropha JMP134
  CDS (1)..(888): transl_table=11
atgaacgacgctgcctccccattgcccgaactgccgcctcatctggcggatctgcccgaaccgctgacccacgaaagcccggccgatgacgactatcaccgccgtttcggcggtgtcgcccggctctacggcaacgccgggctcgcgcgccttgaggcggccagcatttgcgtggtgggcatcggcggcgtcgggagctggacggcagaggcgctggcgcgcaatgccgtcggccgcatcacgctgatagacctcgaccatatcgcgctgtccaacaccaaccggcagatccatgcacttggcgatgcctacggccgcgccaaggtagaggccatggccgagcgcatcatggcgatcaacccgcgctgtcgcgtcacgcaggtcgatgacttcgtcaccacggacaacgtggcccaactgctcggcgccggccacgattacgtgatcgacgccattgatgcggtgcgcgtcaagaccgccatgctgggctgggcgcgcggccacggcatgccgatcatcacctgcggcggcgccggcgggcagttcgacccgacgcgcgtgcgcatcgacgatctgtcccgtaccatccaggatccgttgctgtccaaggttcgcgcgagcctgcgcaaggactggggcttttcgcgtgatccgaagaagaggttcggcatcgcggcggtctattcggacgagccgctgcagtatcccgaacccgaacagcaggcctgcgagatcgacgaagcgccgccggccgcggcggtggcgcctgcgtcggggccgcaagggctggcctgcgccggcttcggatcctcggtggcggtgacagcggtgttcgggttcgtcgcggcttccgccgtgatcggcgcgatcgccagaggcaagccctaa

SEQ ID NO: 40908 - protein, 295 aa, Ralstonia eutropha JMP134
MNDAASPLPELPPHLADLPEPLTHESPADDDYHRRFGGVARLYGNAGLARLEAASICVVGIGGVGSWTAEALARNAVGRITLIDLDHIALSNTNRQIHALGDAYGRAKVEAMAERIMAINPRCRVTQVDDFVTTDNVAQLLGAGHDYVIDAIDAVRVKTAMLGWARGHGMPIITCGGAGGQFDPTRVRIDDLSRTIQDPLLSKVRASLRKDWGFSRDPKKRFGIAAVYSDEPLQYPEPEQQACEIDEAPPAAAVAPASGPQGLACAGFGSSVAVTAVFGFVAASAVIGAIARGKP

SEQ ID NO: 40909 - DNA, 804 bp, Thiobacillus denitrificans ATCC 25259
  CDS (1)..(804): transl_table=11
atggacgcgccccagttcgaacgcacccggatattgctcgatccagccgagcaggctcggctcgcgcgcgcacacgtcctcgtcgcggggctcggcggcgtcggctcgtattgcgcggaggcgcttgcccgcgccggggtggggcggctgaccctcgtcgaccacgacgtcgtcgccgcgtcgaatatcaaccgccagcttcccgcgctgctgtcgacggtcgggcaggccaaggtcgacgtcatggccgcgcgcatccgcgacatcaatccggcgtgcgaagtcgtcgtcgtgcgcgaattcctgatccccgagaccgtcgccgagcgcgtcccggccgacgtcgacttcgtcgtcgactgcatcgactcgctcaactgcaaggtcgcgctcgtcgcgagcagcgtcgaacgcgggctcaacgtcgcttcgagcatgggcgcggggaacaagctcgacccgagccgcatccggctggctgacatttcgaaaaccagcatgtgcgcgctcgccgcggtcatgcgcaagcggttgcgcaaacgcggcatcgcgaaaggcgtgctgaccattttttcggacgaacccgggcgcgcgccgctgccgccgcagccggtcgaggggcgcggtcgcgcgcgcgcggtcaacggcacgatcagctacatgccgcccttgttcggcctcatgctggcgggggcagtcgttcggaagatgatcgctggcgggtcggcagccacggaagccccggcggtcgccccgccgccgcaaaacccgggcgaaaaaaacgccggcgcggccggcgtctga

SEQ ID NO: 40910 - protein, 267 aa, Thiobacillus denitrificans ATCC 25259
MDAPQFERTRILLDPAEQARLARAHVLVAGLGGVGSYCAEALARAGVGRLTLVDHDVVAASNINRQLPALLSTVGQAKVDVMAARIRDINPACEVVVVREFLIPETVAERVPADVDFVVDCIDSLNCKVALVASSVERGLNVASSMGAGNKLDPSRIRLADISKTSMCALAAVMRKRLRKRGIAKGVLTIFSDEPGRAPLPPQPVEGRGRARAVNGTISYMPPLFGLMLAGAVVRKMIAGGSAATEAPAVAPPPQNPGEKNAGAAGV

SEQ ID NO: 40911 - DNA, 813 bp, Pseudomonas fluorescens PfO-1
  CDS (1)..(813): transl_table=11
atgagtacagaagatccgcggtttgcaggcatcgcccgtttgtatggcatcgagggcctcgagcgcctgcgtgcagcccacgtggcgattgtcggcgttggcggcgtcggttcctgggcggcggaagcgatggcccgttgtggggtgggcgagatttcgctgttcgacctcgacgacgtctgcgtcagcaacgccaaccgccagttgcacgcgctcgacagcacggtcggcaaacccaaggtcgaggtgatggccgagcgtctgcgcgggatcaacccggactgcacggtgcacgccgtggcggacttcgtcacccgcgacaccatggccgaatacatcacgccgaacatcgactgcgtgatcgactgcatcgacgcggtcaacgcaaaagccgcgctgatcgcctggtgcaaacggcgcaagatccagatcatcaccactggcggcgccggcgggcagatcgatccgacgctgattcaggtctgcgacctcaaccgtacgttcaatgatcctctggcctcgaaagtgcgctccacgctgcgtcgtgactatggtttctcgcgcactgtgactcgccattacagcgtgccgtgcgtgttctccaccgaacagctgcgctatccgaaaccggacggcagcatctgcctgcagaagagttttgtcggcgacggcgtgaagctggactgcgccggcgggtttggcgcggtgatgatggtgacggcgacgttcggcatggtcgcggcgaccaaggctgtagacaagattgtggcgggtgttcggcgcccggcggatcgggtcaagcctcaggcctga

SEQ ID NO: 40912 - protein, 270 aa, Pseudomonas fluorescens PfO-1
MSTEDPRFAGIARLYGIEGLERLRAAHVAIVGVGGVGSWAAEAMARCGVGEISLFDLDDVCVSNANRQLHALDSTVGKPKVEVMAERLRGINPDCTVHAVADFVTRDTMAEYITPNIDCVIDCIDAVNAKAALIAWCKRRKIQIITTGGAGGQIDPTLIQVCDLNRTFNDPLASKVRSTLRRDYGFSRTVTRHYSVPCVFSTEQLRYPKPDGSICLQKSFVGDGVKLDCAGGFGAVMMVTATFGMVAATKAVDKIVAGVRRPADRVKPQA

SEQ ID NO: 40913 - DNA, 729 bp, Carboxydothermus hydrogenoformans Z-2901
  CDS (1)..(729): transl_table=11
atgcaccggttttcccgaacggaaattttaataggtagcgaagggcttaaagttttacatagaagccgggtgatggtttttgggctgggaggggttggttctccagccgttgaggctttagcccgaacaggagtaggttccctggttttggtggatttcgaccgtgtaagccttaccaatatcaaccgtcagcttccagcgctggagtcaacggtggggctcttaaaggcggaggttttggctaaaagaatccgggagattaatcctgaagcggaggttataaccgtaacggaaaagttaacaccggaaaataccgagagatttttcaggtacaaccctgactatgtggtggatgctatcgatacgttaaaaaataaaattgcgttaattacctacatgtatcgaaaatatataccttttatttcggtcatgggagccggtaatcggctagaccctacaagatttaaagttgccgatatttccaggacccatacctgtcctctaacaaggcgggttcgacaggcccttaaaaaagaagggatttatcaaggggtaaaagttgtattttcggaagaaccgccggtgctggaaagaggtaccagtgatgagccgttgccggcagagaaaaagcaccttccgggaagcgttatgtttgtaacggctaccgccgggttaattgctgccggggaggcggtaagagaccttttgctaaggcataagattttgtaa

SEQ ID NO: 40914 - protein, 242 aa, Carboxydothermus hydrogenoformans Z-2901
MHRFSRTEILIGSEGLKVLHRSRVMVFGLGGVGSPAVEALARTGVGSLVLVDFDRVSLTNINRQLPALESTVGLLKAEVLAKRIREINPEAEVITVTEKLTPENTERFFRYNPDYVVDAIDTLKNKIALITYMYRKYIPFISVMGAGNRLDPTRFKVADISRTHTCPLTRRVRQALKKEGIYQGVKVVFSEEPPVLERGTSDEPLPAEKKHLPGSVMFVTATAGLIAAGEAVRDLLLRHKIL

SEQ ID NO: 40915 - DNA, 858 bp, Burkholderia sp. 383
  CDS (1)..(858): transl_table=11
atgtccgtcgccgacgctgccccgcccagttcttctgatcttaccccgaccccggaaatccagcttgacgtggatcgagcgcggcgtttcggcggcgtcgcgcgcctgtacggcgcgccggccgctgccgcgttcgagcgcgcgcacgtcgcggtgatcgggatcggcggcgtcgggtcgtgggtggccgaggcgctcgcgcgcaacgcagtcggcacgctgacgctgatcgatctcgacaacgtcgccgaaagcaatacgaaccggcagatccatgcgctcgacggcaatttcggcaagccgaaggtcgacgcgatggccgagcggatcgcgctgatcgatcccgcgtgccgcgtgaaccggatcgaggatttcgtcgagcccgacaacttcgatgcgctgctcggcggcggtttcgactatgtgatcgacgcgatcgacagcgtgcgcacgaaggttgcgctgatcgcgtggtgcgtcgcgaaacgccagccgctcgtcgtggtcggcggcgcgggcgggcaactcgacccgacgcgcatccggatcgacgatctcgcgctgacgatccaggatccgctgctgtcgaaggtgcgcgcgcagttgcgcaagcagcacggctttccgcgcgggccgaaagcgcggttcaaggtcagcgccgtgtattcggacgagccgctgatctatccggaagcggccgcgtgcgacctcgaggacggcgccgagccgtccgcggccgcgcacgtcgcggggctcaactgtgcgggattcggttcgagcgtgtgcgtgaccgcgagtttcggcttcgcggccgccgcgcatgcgctgcgcgcgatcgcggcgcaagccgccggctga

SEQ ID NO: 40916 - protein, 285 aa, Burkholderia sp. 383
MSVADAAPPSSSDLTPTPEIQLDVDRARRFGGVARLYGAPAAAAFERAHVAVIGIGGVGSWVAEALARNAVGTLTLIDLDNVAESNTNRQIHALDGNFGKPKVDAMAERIALIDPACRVNRIEDFVEPDNFDALLGGGFDYVIDAIDSVRTKVALIAWCVAKRQPLVVVGGAGGQLDPTRIRIDDLALTIQDPLLSKVRAQLRKQHGFPRGPKARFKVSAVYSDEPLIYPEAAACDLEDGAEPSAAAHVAGLNCAGFGSSVCVTASFGFAAAAHALRAIAAQAAG

SEQ ID NO: 40917 - DNA, 768 bp, Geobacter metallireducens GS-15
  CDS (1)..(768): transl_table=11
atgtcaccacttcaccgcttttcccgcaccgagatcctcatcggccccgagaagctccagcggctccgcgagtcgaccgtggccatcttcggcctgggaggggtcgggagctttgctgccgaggccctctgtcgggccggggtcggtcggctcgtcctcgtggatttcgacgacatctgcctcaccaacgtaaaccgtcagctccacgccatggacggcacggtggggaaggccaaggtgcaggtcatggccgagcggctccgcctcatcaaccccgatgcggacatcgtcccccacaaggatttctacgaagccggcaacagcgacttcctcctctcggggggatacaactacgtggtggacgccatcgatcacatcacgagcaagctccacctgatccgcagctgccgggagcgggaactgcggatcatctccagcatgggggccgccaacaagctggaccccacgaagatccgcgtggccgacatctccaagacaagcgtctgcggcctggccagggtggtccgcaagcagttgcgcaggcaagggatcaagagcggcgtcaccgtggtctactccaccgaggagccccgggaacaggccattgccgatgccggctgccgctccaactgcatctgccccaacaaggaggaacagcgcttttcctgtgagcaccgccggaacatcctcgggagcatctccttcatcccgagcattttcgggctcaccatggcgggggtcgtggtgaacgatctggcgaaggattga

SEQ ID NO: 40918 - protein, 255 aa, Geobacter metallireducens GS-15
MSPLHRFSRTEILIGPEKLQRLRESTVAIFGLGGVGSFAAEALCRAGVGRLVLVDFDDICLTNVNRQLHAMDGTVGKAKVQVMAERLRLINPDADIVPHKDFYEAGNSDFLLSGGYNYVVDAIDHITSKLHLIRSCRERELRIISSMGAANKLDPTKIRVADISKTSVCGLARVVRKQLRRQGIKSGVTVVYSTEEPREQAIADAGCRSNCICPNKEEQRFSCEHRRNILGSISFIPSIFGLTMAGVVVNDLAKD

SEQ ID NO: 40919 - DNA, 867 bp, Burkholderia thailandensis E264
  CDS (1)..(867): transl_table=11
atgtctcgcaccgacgccattgcgacgcttcacgatgttactccgcagccatccggcgagcttgacgcggatcgcgcccggcgcttcggcggcgtcgcccggctgtacggcgccaacgcgctcgccgcgttcgagcgcgcgcgcgtcgccgtgatcggcatcggcggcgtcggctcgtgggcggctgaggcgctcgcgcgcagcgccgtcggggaactgaccctgatcgatctcgacaacgtcgccgaaagcaacacgaaccggcagatccacgcgctcgacggcaactacggcaaaccgaaggtcgacgcgatggccgagcggatcgcgctcatcgattcggcgtgccgcgtcgtgaagatcgaggatttcgtcgagccggacaatctcgatacgctgctcggcggcggcttcgactacatcgtcgacgcgatcgacagcgtgcgcacgaaagtcgcgctgatcgcgtggtgcgtcgcgcgcggccagccgctcgtgacggtcggcggcgcgggcggccaactcgatccgacccgcatccggatcgacgatctcgcgcagacgatccaggacccgctgctgtcgaaggtgcgcgcgcagttacgcaagcagcacggctttgcgcgcgggccgaaagcgaaattcaaggtgagcgccgtgtattcggacgagccgctgatctatccggaggcggccgtgtgcgacgtcgacgaggtcgcgatgcacgcggcaaccgacgcgcaggcgccggggcccaccgggctcaattgcgcaggcttcggctcgagcgtgtgcgtgaccgcgagcttcggattcgcggcggccgcgcatgcgctgcgcgcgctcgccgcgcgggcgcagcggtaa

SEQ ID NO: 40920 - protein, 288 aa, Burkholderia thailandensis E264
MSRTDAIATLHDVTPQPSGELDADRARRFGGVARLYGANALAAFERARVAVIGIGGVGSWAAEALARSAVGELTLIDLDNVAESNTNRQIHALDGNYGKPKVDAMAERIALIDSACRVVKIEDFVEPDNLDTLLGGGFDYIVDAIDSVRTKVALIAWCVARGQPLVTVGGAGGQLDPTRIRIDDLAQTIQDPLLSKVRAQLRKQHGFARGPKAKFKVSAVYSDEPLIYPEAAVCDVDEVAMHAATDAQAPGPTGLNCAGFGSSVCVTASFGFAAAAHALRALAARAQR

SEQ ID NO: 40921 - DNA, 783 bp, Desulfitobacterium hafniense Y51
  CDS (1)..(783): transl_table=11
atgaggaggatactcatgcagcataaattctcaagaactgagcttcttatcggcaaatccgccttggcgaagctcagccaaagcacagtcatcatcttcggcataggcggcgtaggctcttataccgcagaagccttagcacgggccggcgtggggcatttaatcctcgtggactacgacgagatttgcctgaccaatatcaaccgtcagcttcatgctctccattccaccatcggtaaagcaaaggttgatgtcatgaaaaaccgcatcttggatattaaccccaaagcgaaggtggatgccgttaaagaattcttctccgctgagaatgcggaaagcttcctgggccaaaagccggattatgtggtggacgccatcgataccgtctccggtaaagttgccctggctaaggaatgcagccagcgcaatattcccttgattgccagcatgggagccggcaatcgcctttctgccgaaaattaccgcattacagatttatccaaaaccagcggtgatcctttggccaaggccgtgcggaaattactgcgcaaagaagggattaccaagggaatcaaagtcgtctattctcccgatctcccccttactcctctggatacggaagccgactgccgctccaactgcatttgcccggggggcgatgcccattgtgcccttaaacggcagattcccggcagcatttcctttgttcctcctgtatcaggacttctcatggccgggcaggttgtcaatgacctaattgccgattgtccccgtgaggcctga

SEQ ID NO: 40922 - protein, 260 aa, Desulfitobacterium hafniense Y51
MRRILMQHKFSRTELLIGKSALAKLSQSTVIIFGIGGVGSYTAEALARAGVGHLILVDYDEICLTNINRQLHALHSTIGKAKVDVMKNRILDINPKAKVDAVKEFFSAENAESFLGQKPDYVVDAIDTVSGKVALAKECSQRNIPLIASMGAGNRLSAENYRITDLSKTSGDPLAKAVRKLLRKEGITKGIKVVYSPDLPLTPLDTEADCRSNCICPGGDAHCALKRQIPGSISFVPPVSGLLMAGQVVNDLIADCPREA

SEQ ID NO: 40923 - DNA, 813 bp, Saccharophagus degradans 2-40
  CDS (1)..(813): transl_table=11
atgacagataccactgcaccactttccgaaaattacctctaccgctttggcggcatagcgcgcctatacggccgcgatggcctagaagcgctgcaccgcgcgcactttgtggtagtggggttagggggcgttggcacgtgggtagcagaagccctagcgcgcacgggtgtaggtgagcttacccttatagaattggatgaaatttgtgtaaccaacaccaaccgccaaatacacgcgttggccagtaatgttggccgcagtaaaaacaccgctcttgcagagcgcttactcgatataaacccagaactaaaaattcactctgtacacgactttcttacccagaaaaacttgcccgaccttattggtaagcaacaccacgtggtaatagacgctgtagactcatcctcagtaaaagcggcactagtggcttactgtagtcgcaataaaattcgcttaattatgtctggctcgtcgggagggaaacgcgacccattaaaaataaccatctcagatttgggccaaactatttgcgaccccatgttggcaaaggtacgcaatattctctaccgccactacaagttcactaaaagcagtaatcgccagtttagggtagatgccgtttattcgaccgaacaaatggtataccccaaaccagacggcagtgtttgccaagaaaaaaaggggctgcaagatggggttaaactcgattgcgctggcggctttggctcggccaccatgcttaccggtagtttcggttttgccgcggccaacaaagccatagagcgctatttagcaagcgcgctaaccaaataa

SEQ ID NO: 40924 - protein, 270 aa, Saccharophagus degradans 2-40
MTDTTAPLSENYLYRFGGIARLYGRDGLEALHRAHFVVVGLGGVGTWVAEALARTGVGELTLIELDEICVTNTNRQIHALASNVGRSKNTALAERLLDINPELKIHSVHDFLTQKNLPDLIGKQHHVVIDAVDSSSVKAALVAYCSRNKIRLIMSGSSGGKRDPLKITISDLGQTICDPMLAKVRNILYRHYKFTKSSNRQFRVDAVYSTEQMVYPKPDGSVCQEKKGLQDGVKLDCAGGFGSATMLTGSFGFAAANKAIERYLASALTK

SEQ ID NO: 40925 - DNA, 804 bp, Methylobacillus flagellatus KT
  CDS (1)..(804): transl_table=11
atggacaatagcatagagatggattgggagcgcaggttcggcggtgtgcgcaggctgtatggcgagttggcgctacataggtttcgtcatgcacatgtagccgtgatcggcatgggcggcgtgggttcatgggcggtggaggccttggcgcgtagcgcgataggcaagttgacgctggttgatctcgacaatatcgccgaatccaatgtcaatcgccagttgcacgctgtcgaaggggctttcggccttgccaaggtcacggccatggcgcagcgcgtgcgagagatcaatcccttggctgaggtgcgggaggttgaggatttcattgcatcggataaccttgatgtattactggacagcagtgttgacgcggtgctggacgcgatagacgatgcgcgggccaaggtagccttggccgcatggtgccgcaagctcgggattccgctggtgatggcaggcggagcgggggggcgcgtcgacccgacacgcatccgggtggccgacttggcagacgtgcatggcgacaggttgctggcaaaagtgcgcaatcagttgcggcgcgaccacggcttcccgaaaggattggacggaaacaagccaggcagtaaaaagaaattaccaacattcggtatcgcctgtgtttattctgacgaacctgtacagcagccggaaacaagttgcaacgtagaggccggcagcatcacgggtttgaattgcgcaggctatggctcatcggttgccgtgactgcctcatgcggcatgattgccgcggcggcagtgctcaagcgtttggcggtggggtga

SEQ ID NO: 40926 - protein, 267 aa, Methylobacillus flagellatus KT
MDNSIEMDWERRFGGVRRLYGELALHRFRHAHVAVIGMGGVGSWAVEALARSAIGKLTLVDLDNIAESNVNRQLHAVEGAFGLAKVTAMAQRVREINPLAEVREVEDFIASDNLDVLLDSSVDAVLDAIDDARAKVALAAWCRKLGIPLVMAGGAGGRVDPTRIRVADLADVHGDRLLAKVRNQLRRDHGFPKGLDGNKPGSKKKLPTFGIACVYSDEPVQQPETSCNVEAGSITGLNCAGYGSSVAVTASCGMIAAAAVLKRLAVG

SEQ ID NO: 40927 - DNA, 858 bp, Burkholderia xenovorans LB400
  CDS (1)..(858): transl_table=11
atgtccagcaccaccgcgccatccgatcttactaccagcctcgacgggagtgaaaccgccgaccgcgcgcggcgcttcggcggcattgcccgcttgtacggcgcaccggcgctcgctgcgttcgaaggcgcgcacgtggcggtcatcggcattggcggggtcgggtcgtgggtggccgaggcgctcgcgcgcagcgcgctcggcacgctgacgctgatcgatctcgacaacgtcgccgaaagcaacactaaccggcagatccatgcgctcgacggcaactacgggaaaccgaaggtcgaagcgatggcggagcgcattgcggcgatcaatccgttttgcgacgtgcgcctgatcgaagacttcgtcgagccggacaatttcgaggctacgctcggcggcggcttcgattacgtggtcgatgcgatcgacagcgtgcgcaccaagaccgcgctgatcgcatggtgtgtggaaaagaaacagccgttgatcacggtcggcggcgcgggcggccagctcgacccgacgcgcattcgcatcgacgatctcgcgctgaccattcaggacccgctgttgtcgaaggtgcgcggccaactgcgcaaacagcacggctttccgcgcgggccgaaggcgaagttcaaggtgagcgcggtgtattccgacgagccgctgatctacccggaagccgccgtctgcgatatagacatggaagccgagcacgtgagcacgtcgccgggtcacacgggaccggtcggtctgaactgtgcgggctttgggtcgagcgtgtgcgtgacggcgagcttcggttttgccgcggccgcgcatgtgctgcgggcgttggcgaagcaggccacggcttga

SEQ ID NO: 40928 - protein, 285 aa, Burkholderia xenovorans LB400
MSSTTAPSDLTTSLDGSETADRARRFGGIARLYGAPALAAFEGAHVAVIGIGGVGSWVAEALARSALGTLTLIDLDNVAESNTNRQIHALDGNYGKPKVEAMAERIAAINPFCDVRLIEDFVEPDNFEATLGGGFDYVVDAIDSVRTKTALIAWCVEKKQPLITVGGAGGQLDPTRIRIDDLALTIQDPLLSKVRGQLRKQHGFPRGPKAKFKVSAVYSDEPLIYPEAAVCDIDMEAEHVSTSPGHTGPVGLNCAGFGSSVCVTASFGFAAAAHVLRALAKQATA

SEQ ID NO: 40929 - DNA, 909 bp, Ralstonia metallidurans CH34
  CDS (1)..(909): transl_table=11
atgccggcacggttcgtcggcagccggtgccggcagacacagcaacaagaacgcatgacccttacccccacgcctctcgcggcgcaggacttgcctgcgccgttgtctcacgaaagccccgaggacgatgattatcatcgccgctttggcggcgtcgcgcgcctgtatggcgccgaaggcctggcgcggctcgaaacggccaacgtctgcgtgatcggcatcggcggggtgggaagctgggcagcggaggcattggcccgaaacgccgtgggccgcctgacgctgatcgacctggaccatatcgcggcatcgaataccaaccgacagatccatgcactgggcgacgcctatggccgttccaaggtggacgcgatggccgaacgtatcgtggcgatcaatccgcgctgccgcgtgacggccgtggacgacttcgtgaccgaggacaacgtgcaggccctgttgtcggggtttgactacgtgatcgacgctattgacgccgtgaaggtcaagaccgcgatcctcgggtgggcgcgccgtgaggacgctcgcgtgatcacgtgtggcggggcgggcggccagctcgacccgacgcgcgtgcgcatcgaggacctggcccgtacgatccaggacccgctgctggccaaggttcgtggcaacctgcggcgccagtggggctttccgcgtgatccaaagaagaagttcggcatccaggcggtctactcggacgaaccgctgcgctaccccgaacccgaacagcaggcgtgcgagatcgacgaggtgccgcccgcgccacgccagggcccgcaggggctggcctgcgcgggttttggctcctcggtggcagtgactgccgtgttcggctttgtggccgcttcggctgtgatcggggcaattgcctcaggcggctaa

SEQ ID NO: 40930 - protein, 302 aa, Ralstonia metallidurans CH34
MPARFVGSRCRQTQQQERMTLTPTPLAAQDLPAPLSHESPEDDDYHRRFGGVARLYGAEGLARLETANVCVIGIGGVGSWAAEALARNAVGRLTLIDLDHIAASNTNRQIHALGDAYGRSKVDAMAERIVAINPRCRVTAVDDFVTEDNVQALLSGFDYVIDAIDAVKVKTAILGWARREDARVITCGGAGGQLDPTRVRIEDLARTIQDPLLAKVRGNLRRQWGFPRDPKKKFGIQAVYSDEPLRYPEPEQQACEIDEVPPAPRQGPQGLACAGFGSSVAVTAVFGFVAASAVIGAIASGG

SEQ ID NO: 40931 - DNA, 867 bp, Myxococcus xanthus DK 1622
  CDS (1)..(867): transl_table=11
atgaatccgcagccgctccccgcccctgcccctgagactccgcccaccgccccggactcgctcgcccgtcccttcaagctctcccggcgcttcgaccggaccggccgcctgctgggcgactccgcgatggagcggctggccaacgcgcgcgtggtggtgttcggcctgggcggcgtgggcagcttcgcggcggagggcctggtgcgcagcggcattggccacctgacgctggtggaccatgacgacgtgtgcgtcaccaacaccaaccgccagctccacgcgacggtgaaggccgtgggcaagcccaaggcggagctgatggcgcagcgctgccaggaaatcaatccggcggcgaaggtggaggcggtgcgcgagttctaccgcgcggacgtggccgagcagatgctccagccgggccagtacgacttcgtcgtggacgccatcgacaacgtgaaggcgaagctgcacctgctgcaccgctgcgtgacgctgggcgtgccggtggtcagctccatgggcgccgcgggccggttggaccccaccgccatccgcgtggaggacctgtccgagacgcacatggaccccttcgccaaggacatccgcaagctgctcaagcgcaagtacgcggtggagacggacaagcacacgggaatcaccgccgtgtactccatcgaagcgcggcggctgccggtgacgctccagtacgacgacgccaccgacggcttcctgtgcgtgtgcccgcaggacaacgagttccacacctgcgaccaccgcacgcagattgacggcagcgtggccttcgtcacgtcctgcttcgggatgaacgcggcgggcgtggtggtgcggcggctcgcgtcggcgcgctag

SEQ ID NO: 40932 - protein, 288 aa, Myxococcus xanthus DK 1622
MNPQPLPAPAPETPPTAPDSLARPFKLSRRFDRTGRLLGDSAMERLANARVVVFGLGGVGSFAAEGLVRSGIGHLTLVDHDDVCVTNTNRQLHATVKAVGKPKAELMAQRCQEINPAAKVEAVREFYRADVAEQMLQPGQYDFVVDAIDNVKAKLHLLHRCVTLGVPVVSSMGAAGRLDPTAIRVEDLSETHMDPFAKDIRKLLKRKYAVETDKHTGITAVYSIEARRLPVTLQYDDATDGFLCVCPQDNEFHTCDHRTQIDGSVAFVTSCFGMNAAGVVVRRLASAR

SEQ ID NO: 40933 - DNA, 768 bp, Haemophilus somnus 129PT
  CDS (1)..(768): transl_table=11
atgacagaacgtattgataattatgaacaacgctttggtggaattggacgactatatggaatagacgttttggaacgcttaaagcaaacacatatttgtgtgattggcattggtggggtaggttcatgggttgtcgaagcaattgcacgttgcggtattgggcaaattaccatgattgatatggatgacatctgtgtaactaatattaaccgacaattacccgctctaacaggcaatatcggtaagttaaaaacagaagtgatgaaagaacgtgtgcaattaattaatccggattgccacgtgaatattattgatgattttttacttgctgaaaatttagctgaatatattcatacaggctacgattatgtgattgatgctattgacaatgtcagagtaaaagcagcactaattgctcactgtaaacgcaataaaattcagattatcacaattggtggtgcaggaggacaaaccgatccaagtcaaattcgagtagcagatcttagtcgctctattcaagaccccttactggcaaaagtgcggtcggttttacgtaaagaatatcattttccacaaaatcctaaacgtaagtttgcagtcgattgtgttttttccactcagcctttaatttttccaaaaatggctgataattgtactatttcagctaccatgaattgtgccaatggctttggtgcagcaacaatgataacagcgacttttggcttttttgcagtagcaaaaataataaataaattagccaaaggctaa

SEQ ID NO: 40934 - protein, 255 aa, Haemophilus somnus 129PT
MTERIDNYEQRFGGIGRLYGIDVLERLKQTHICVIGIGGVGSWVVEAIARCGIGQITMIDMDDICVTNINRQLPALTGNIGKLKTEVMKERVQLINPDCHVNIIDDFLLAENLAEYIHTGYDYVIDAIDNVRVKAALIAHCKRNKIQIITIGGAGGQTDPSQIRVADLSRSIQDPLLAKVRSVLRKEYHFPQNPKRKFAVDCVFSTQPLIFPKMADNCTISATMNCANGFGAATMITATFGFFAVAKIINKLAKG

SEQ ID NO: 40935 - DNA, 819 bp, Shewanella sp. MR-4
  CDS (1)..(819): transl_table=11
atgactgaagcctatcagaatcgctttggtggcattggccgcttgtacgggcaaaaggcgctcgctaaatttgccgcctcccatgtagtggtgattggcattggcggcgtgggcacatgggcggcggaggcgttggcacgcagtggtattggccaaatcactctgattgatttggatgatatctgcgtgactaatactaaccgtcaaattcatgctctgacatcgacgatcggtgagtctaaagtggctgtgatggcgcagcggatccgctcgatcaatcccgattgccaagtcaatgaagtggaagactttattactgtcgataaccttggtgagtatttgctcgggtcaaaagcgggtggcaatatcgattatgtggttgattgtattgatgcggttaagcaaaaggcggcactgattgcttggtgtaaacgtcaaaaaatcaagatagtgacagttggcggcgcgggcggccaaacggatcctacccaaattcaattaaccgatctggcgaaaacttatcaagatcctttactggccaaagtgcgtaatattttgcgccgtgaatataacttctctaaaaatgtgcagcgccgttttgctgttgatgcggtgttttccagcgagcagttagtttatccccaagccgatggttccgtgtgcagcagcaaggcgacggccgatggctctatgcgtatggattgtgcctctggttttggtgccgtcactatggtgactgggacttttggatttgtggcggcgagtcgcgtacttgctaggctcgcccaacttgcaaatgaaccagccgcaagtgaataa

SEQ ID NO: 40936 - protein, 272 aa, Shewanella sp. MR-4
MTEAYQNRFGGIGRLYGQKALAKFAASHVVVIGIGGVGTWAAEALARSGIGQITLIDLDDICVTNTNRQIHALTSTIGESKVAVMAQRIRSINPDCQVNEVEDFITVDNLGEYLLGSKAGGNIDYVVDCIDAVKQKAALIAWCKRQKIKIVTVGGAGGQTDPTQIQLTDLAKTYQDPLLAKVRNILRREYNFSKNVQRRFAVDAVFSSEQLVYPQADGSVCSSKATADGSMRMDCASGFGAVTMVTGTFGFVAASRVLARLAQLANEPAASE

SEQ ID NO: 40937 - DNA, 819 bp, Shewanella sp. MR-7
  CDS (1)..(819): transl_table=11
atgactgaagcctatcagaatcgctttggtggcattggccgcttgtacgggcaaaaggcactcgctcaatttgccgcttcccatgtggtggtgattggcattggtggcgttggcacatgggcggcggaggcgttggcacgcagtggtattggccaaatcactctgattgatttggatgatatctgcgtgactaatactaaccgtcaaattcatgctctgacatcgacgatcggtgagtctaaagtggctgtgatggcgcagcggatccgctcgatcaatcccgattgccaagtcaatgaagtggaagactttattactgtcgataaccttggtgagtatttgctcgggtcaaaagcgggtggcaatatcggttatgtggttgattgtattgacgccgttaagcaaaaggcagcactgattgcttggtgtaaacgtcaaaaaatcaagatagtgacagttggtggtgcgggcgggcaaacggatcctacgcaaattcaattaaccgatctggcgaaaacttatcaagatcctttactggccaaagtgcgtaatattttgcgccgtgaatataacttctctaaaaatgtgcagcgccgttttgctgttgatgcggtgttttccagcgagcagttagtttatccccaagccgatggttccgtgtgcagcagcaaggcgacggccgatggctctatgcgtatggattgtgcctctggctttggtgccgtcactatggtgactgggacttttggatttgtggcggcgagccgggtacttgctaggctcgcccaacttgcaaatgaaccaggggcgagcgaataa

SEQ ID NO: 40938 - protein, 272 aa, Shewanella sp. MR-7
MTEAYQNRFGGIGRLYGQKALAQFAASHVVVIGIGGVGTWAAEALARSGIGQITLIDLDDICVTNTNRQIHALTSTIGESKVAVMAQRIRSINPDCQVNEVEDFITVDNLGEYLLGSKAGGNIGYVVDCIDAVKQKAALIAWCKRQKIKIVTVGGAGGQTDPTQIQLTDLAKTYQDPLLAKVRNILRREYNFSKNVQRRFAVDAVFSSEQLVYPQADGSVCSSKATADGSMRMDCASGFGAVTMVTGTFGFVAASRVLARLAQLANEPGASE

SEQ ID NO: 40939 - DNA, 813 bp, Pseudomonas aeruginosa UCBPP-PA14
  CDS (1)..(813): transl_table=11
atgcaggtggatgaacagcgcttcggcggtatcggccggttgtacggtcgcgaggggctgcaacgcctggccgatagccacgtcgcggtggtcggcatcggcggggtcggttcctgggcggcggaagcgctggcccgcagcggcgtcggcgagatttccctgttcgacctcgatgatgtctgcgtgaccaacaccaaccgccaggtgcatgccatcgaaggctcggtgggcaaggccaaggtcgaggtgatggcggcgcgcatccgggccatcaacccggcctgccgggtccacgcggtggccgatttcgtcacccgcgagaccatggccgagtacatcgtcgacttcgactacctgatcgactgcatcgacagcgtggccgccaaggccgcgctgatcgcctggtgcaagcggcgcaagatcccggtgatcaccaccggcggcgccggtggccaggtcgacccgacgcagatccaggtcgccgacctgaacaagaccttcaacgacccgctggcggccaaggtgcgttccaccctgcgccgcgactacaacttctcgcgcacgccggggcgcacctacagcgtgccctgcgtgttctccagcgagcagctgcgctacccgaagccggacggcacggtgtgccagtcgaagagtttcgtcggcgaaggggtgaagctggactgcgccggcggcttcggcgcggtgatgatggtcaccgccaccttcggcatggtcgccgccgcccgcgccgtcgagcgcctggcggaaggccgcgcgctgcggccgtcgcggcgcacgccggggaacgcctga

SEQ ID NO: 40940 - protein, 270 aa, Pseudomonas aeruginosa UCBPP-PA14
MQVDEQRFGGIGRLYGREGLQRLADSHVAVVGIGGVGSWAAEALARSGVGEISLFDLDDVCVTNTNRQVHAIEGSVGKAKVEVMAARIRAINPACRVHAVADFVTRETMAEYIVDFDYLIDCIDSVAAKAALIAWCKRRKIPVITTGGAGGQVDPTQIQVADLNKTFNDPLAAKVRSTLRRDYNFSRTPGRTYSVPCVFSSEQLRYPKPDGTVCQSKSFVGEGVKLDCAGGFGAVMMVTATFGMVAAARAVERLAEGRALRPSRRTPGNA

SEQ ID NO: 40941 - DNA, 834 bp, Shewanella sp. ANA-3
  CDS (1)..(834): transl_table=11
atgactgaagcctatcagaatcgctttagtggcattggccgcttgtacgggcaaaaggcgctcgctaaatttgccgcctcccatgtggtggtgattggcattggcggcgttggcacatgggcggctgaggcgttggcgcgcagtggtattggccaaatcaccttgattgatttggatgatatctgtgtaacgaacaccaaccgtcaaattcatgctctgtcatcgacaattggtgagtctaaagtggctgtgatggcgcagcggatccgttcgatcaaccccgattgtcaagtcaatgaagtggaagactttattacagtcgataaccttggtgagtatttgcttggggccaaggcgggtggcaatattgattatgtagtggattgtattgatgcggttaagcaaaaggcggcgctgattgcttggtgtaaacgtcaaaaaattaagatagtgaccgttggcggcgcgggcggccaaaccgatccaacacagatccagcttaccgatctggctaaaacctaccaagatcctttattggccaaagtgcgtaatattttgcgccgcgaatataacttttccaaaaatgtgcagcgccgttttgccgtcgatgcagtgttttccagtgagcaattagtttatccccaagccgatggttctgtgtgtagtagcaaagcgacggccgatggttctatgcgcatggattgtgcttctggctttggcgccgtcactatggtgactgggacttttggttttgtggcggctagccgggtacttgctaggctcgcccaaattgcaaatgaacccgttgcaaatgaaccagctgcgagtgaataa

SEQ ID NO: 40942 - protein, 277 aa, Shewanella sp. ANA-3
MTEAYQNRFSGIGRLYGQKALAKFAASHVVVIGIGGVGTWAAEALARSGIGQITLIDLDDICVTNTNRQIHALSSTIGESKVAVMAQRIRSINPDCQVNEVEDFITVDNLGEYLLGAKAGGNIDYVVDCIDAVKQKAALIAWCKRQKIKIVTVGGAGGQTDPTQIQLTDLAKTYQDPLLAKVRNILRREYNFSKNVQRRFAVDAVFSSEQLVYPQADGSVCSSKATADGSMRMDCASGFGAVTMVTGTFGFVAASRVLARLAQIANEPVANEPAASE

SEQ ID NO: 40943 - DNA, 837 bp, Azoarcus sp. BH72
  CDS (1)..(837): transl_table=11
atgtccgattcccctgctgaactccttgccccgctcgacgaggctgtcgccgccgaggccgacggcggtcgccgtttcggcggcatcgcgcgtttgtacgacgatgctgcccttcatcgcctgaatctggcccacgtctgtgtggtcggaatcggcggcgtcggttcgtgggcggcggaagcgctggcgcgcagcggcgtgggccgtctgacgctgatcgatctcgaccacgtggccgaatccaacatcaaccgccaggcgcacgcgctcgatgccaccctggggcaggccaaggtccaggcaatggccgaacgcatccgcggcatcaatccgcgcgcccgcgtcgataccgtggaggattttgtcgagccggacaacgtggccgcgctgctgcgcgagttcaacctcgtcatcgacgccatcgacaacgtccgcgccaaggttgcgatggcggtccattgccggcgcgcccggttgccgctgctgatggcgggcggcgccggcggcaagcgcgacccgggccgcatccgtgtcgccgacctcgtcgccaccgagcaggaccccctgctggccaaggtgcgcgccacgctgcggcgcgaccacgcttttccgcgcgcggcgggcaagaagttcggcatcgaagtggtgtactccagcgagccgctacgctacccggcggcaagctgcgagaccggccgcgggccgcaggggctcgcctgcgcgggctttggttccagcatggcggtgacggcgagcgtcgggctgtttctcgccgcccgcgcaatcgaccggctggtggcgaagccggtcgcggccgaagcgggagcaaacgcatga

SEQ ID NO: 40944 - protein, 278 aa, Azoarcus sp. BH72
MSDSPAELLAPLDEAVAAEADGGRRFGGIARLYDDAALHRLNLAHVCVVGIGGVGSWAAEALARSGVGRLTLIDLDHVAESNINRQAHALDATLGQAKVQAMAERIRGINPRARVDTVEDFVEPDNVAALLREFNLVIDAIDNVRAKVAMAVHCRRARLPLLMAGGAGGKRDPGRIRVADLVATEQDPLLAKVRATLRRDHAFPRAAGKKFGIEVVYSSEPLRYPAASCETGRGPQGLACAGFGSSMAVTASVGLFLAARAIDRLVAKPVAAEAGANA

SEQ ID NO: 40945 - DNA, 777 bp, Neisseria meningitidis FAM18
  CDS (1)..(777): transl_table=11
atgtccgacaacgctttgacctcttcgcgacgcttcggcggcatcgccagactctacggagactctgccttggcgcacttttcacaggcacacgtctgcgtagtcggcgtgggcggtgtcggctcgtgggcggtcgaggctttggcgcggacgggcatcggacgtttgactttgattgatttggacaacgttgccgaatcgaatgtcaaccgccagctgcacgccctgaccggcgacttcggcaaagcaaaagttaccgccttgcgcgaacgcgtcgcccaaatcaacccaggatgccaagtgtttgaaattgaagatttcgttaccgaagacaatttgccggaatacttcggaaaaggttttgatttcgtcatcgacgcgatcgaccaagtgcgcgtcaaagcagcaatggcggcttattttgtggaacgcaaacaaccgtttgtcctcagcggcggcgcgggcggacaaaaaaatccggcgttaatccaaaccgccgatttgagccgcgtaacccacgacccgctgcttgccaacctgcgctacaccttgcggaaacgctacggattcagccgcgatacgaaagcaaatatgcgcgtgccttgcgtgtattcgaccgaaaatatcgtgccgccgcagtctagggaggcttgttcggcagatgccgctccgcaaggcttgtcgtgcgccggctacggtgcaagcatgctcgttaccgcttcgttcgggctatattgcgcacaggcggcggtggaacacatcgcagacaaaaaataa

SEQ ID NO: 40946 - protein, 258 aa, Neisseria meningitidis FAM18
MSDNALTSSRRFGGIARLYGDSALAHFSQAHVCVVGVGGVGSWAVEALARTGIGRLTLIDLDNVAESNVNRQLHALTGDFGKAKVTALRERVAQINPGCQVFEIEDFVTEDNLPEYFGKGFDFVIDAIDQVRVKAAMAAYFVERKQPFVLSGGAGGQKNPALIQTADLSRVTHDPLLANLRYTLRKRYGFSRDTKANMRVPCVYSTENIVPPQSREACSADAAPQGLSCAGYGASMLVTASFGLYCAQAAVEHIADKK

SEQ ID NO: 40947 - DNA, 783 bp, Acidovorax sp. JS42
  CDS (1)..(783): transl_table=11
gtgatcacatccgttgacgacacgccagacttggagcggcgcttcgcagggctggaacgcctgttcgggcaggagggcgccgcacgcattcggtgcgcgcatgttgctgtggtcggaattggcggcgtgggttcttggacagcagaagcactcgcgcgcagcggcgtcggagcgctcacgctgattgacctggaccatgtggccgagtcgaacgtcaatcggcaaattcacgctctgaccacgaccataggccaagccaaggtacgcgccatggccgagcgcattgccctgatcaatccggcatgtcgggtgaactgcgttgaagagttcgtggatgcacagaactggcccactctgttgccatcttcggtggatgcactggtggatgcatgcgaccaagtaaacgccaaggccgtaatggcagcttgggccgtctccacgcggctgcctttcgtcacggtaggtgctgccgggggcaagcgtcacgcatataaagtcgaggtagaagatctggcgtttaccacgcacgacccgctgctggcccagctgcgctatcgcttgcgcaggaaccacggcgcggcccgagaaggccgcaaaatcggcgtcacctgcgtctatagcaaggaagcggtatcaaagccacacgcgtcttgcggcgtcggtgaaggcgacggatccctgaattgccatggttatggctcatcggtcgccgtcacggccacatttggtcagtgtgcagcgggatggattctcgacaagttggcggaaaggtcgaagacctga

SEQ ID NO: 40948 - protein, 260 aa, Acidovorax sp. JS42
MITSVDDTPDLERRFAGLERLFGQEGAARIRCAHVAVVGIGGVGSWTAEALARSGVGALTLIDLDHVAESNVNRQIHALTTTIGQAKVRAMAERIALINPACRVNCVEEFVDAQNWPTLLPSSVDALVDACDQVNAKAVMAAWAVSTRLPFVTVGAAGGKRHAYKVEVEDLAFTTHDPLLAQLRYRLRRNHGAAREGRKIGVTCVYSKEAVSKPHASCGVGEGDGSLNCHGYGSSVAVTATFGQCAAGWILDKLAERSKT

SEQ ID NO: 40949 - DNA, 768 bp, Haemophilus somnus 2336
  CDS (1)..(768): transl_table=11
atgacagaacgtattgataattatgaacaacgctttggtggaattggacgactatatggaatagacgttttggaacgcttaaagcaaacacatatttgtgtgattggcattggtggggtaggttcatgggttgtcgaagcaattgcacgttgcggtattgggcaaattaccatgattgatatggatgacatctgtgtaactaatattaaccgacaattacccgctctaacaggtaatatcggcaagttaaaaacagaagtgatgaaagaacgtgtgcaattaattaatccggattgccacgtgaatattattgatgattttttatcagttgaaaatttagctgaatatattcatacaggctacgattatgtgattgatgctattgacaatgtcagagtaaaagcagcactaattgctcactgtaaacgcaataaaattccgattatcacaattggtggtgcaggaggacaaaccgatccaagtcaaattcgagtagcagatcttagtcgctctattcaagaccccttactggcaaaagtgcggtcggttttacgtaaagaatatcattttccgcaaaatcctaaacgtaagtttgtagtcgattgtgtcttttccactcagcctttaatttttccaaaaatggctgataattgtactacttcagctaccatgaattgtgccaatggctttggtgcagcaacaatgataacagcgacttttggcttttttgcagtagcaaaaataataaataaattagccaaaggctaa

SEQ ID NO: 40950 - protein, 255 aa, Haemophilus somnus 2336
MTERIDNYEQRFGGIGRLYGIDVLERLKQTHICVIGIGGVGSWVVEAIARCGIGQITMIDMDDICVTNINRQLPALTGNIGKLKTEVMKERVQLINPDCHVNIIDDFLSVENLAEYIHTGYDYVIDAIDNVRVKAALIAHCKRNKIPIITIGGAGGQTDPSQIRVADLSRSIQDPLLAKVRSVLRKEYHFPQNPKRKFVVDCVFSTQPLIFPKMADNCTTSATMNCANGFGAATMITATFGFFAVAKIINKLAKG

SEQ ID NO: 40951 - DNA, 771 bp, Haemophilus influenzae R2846
  CDS (1)..(771): transl_table=11
atggctagaatagataattacgaacaacgctttggtggcattgggcgactttatacgcctgatggcttagcacgcttacgccaagcgcatatttgcgtgattggcattggcggtgtcggctcttgggttgttgaagccttagcacgatctggcattggcgaactcacattaattgatatggatgatatttgcgtcacaaatatcaatcgccaacttcctgcgatgagcggcacaatcggcaaattaaaaactgaagtcatgtcagagcgagtaaaattaattaactcagaatgtaccgtgaatattattgatgattttatctcgccagagaatcaatcggattatctcaaccgagactatgactatgtgattgatgccattgacaatgtgaaaactaaagcgtcgctgattgcttattgtaaacgtaacaaaattaatgtgattactattggtggtgctggcggtcaaactgatccaacccaaattcaaattgccgatctcagtaaaaccattcaagatccgctgctcgccaaagtgcggtcagttttacgcaaggattacaattttagccaaaatccaaaacgcaaatttagtatcgatgcgatattttcaacacaacctttaatattcccacaaatgacagaagactgttctatttcagccacaatgaattgcgcaaatgggtttggcgcagccacaatgattacggcaacctttggtttttttgccgtttctcgtgtaatagataaattactaaagaaaaaatcttaa

SEQ ID NO: 40952 - protein, 256 aa, Haemophilus influenzae R2846
MARIDNYEQRFGGIGRLYTPDGLARLRQAHICVIGIGGVGSWVVEALARSGIGELTLIDMDDICVTNINRQLPAMSGTIGKLKTEVMSERVKLINSECTVNIIDDFISPENQSDYLNRDYDYVIDAIDNVKTKASLIAYCKRNKINVITIGGAGGQTDPTQIQIADLSKTIQDPLLAKVRSVLRKDYNFSQNPKRKFSIDAIFSTQPLIFPQMTEDCSISATMNCANGFGAATMITATFGFFAVSRVIDKLLKKKS

SEQ ID NO: 40953 - DNA, 765 bp, Actinobacillus pleuropneumoniae serovar 1 str. 4074
  CDS (1)..(765): transl_table=11
atggcgagagtggataattatgaacaacgttttggcggaatcgggcgactttatacgccggaaggtttagcaaaattacgtcagtcacatatttgtgtgattgggattggcggtgtcggttcgtgggcggtggaagcgctggctcgttcggggatcggtaaaattactatgattgatatggacgatatttgcgtaactaatatcaaccgccaaattcatgcgatgaccggtacgattgctcaattaaaaaccgaagcgatgaaagaacgtattgaacggattaatcctgaatgtgtgatagaaattattgatgattttattacacctgagaatatccccgaatatctgaatcgtggttatgattatgtgattgatgcgattgattcggtcaaaactaaagcggctctgattgcctattgcaaacgtaacaaaattaaaatggttactaccggcggtgcgggcggtcagaccgatccgacccaaattcaaattaccgatttaagtaaaacgattcaagatccgttggcgtctaaagtgcgctcgttattgcgtaaggaatataactttagtcaaaatccaaagcgtaagtttggtattgattgtgttttctcaacgcaaccgctcatctttccgaaaatgggcgagggctgtgaggtatcggcaacgatgaattgcgcaaacggtttcggtgcggtaacgatggtaaccgcaactttcagcttttttgcggtaagtagagtgattgacaagttattgaaatcgtaa

SEQ ID NO: 40954 - protein, 254 aa, Actinobacillus pleuropneumoniae serovar 1 str. 4074
MARVDNYEQRFGGIGRLYTPEGLAKLRQSHICVIGIGGVGSWAVEALARSGIGKITMIDMDDICVTNINRQIHAMTGTIAQLKTEAMKERIERINPECVIEIIDDFITPENIPEYLNRGYDYVIDAIDSVKTKAALIAYCKRNKIKMVTTGGAGGQTDPTQIQITDLSKTIQDPLASKVRSLLRKEYNFSQNPKRKFGIDCVFSTQPLIFPKMGEGCEVSATMNCANGFGAVTMVTATFSFFAVSRVIDKLLKS

SEQ ID NO: 40955 - DNA, 831 bp, Xylella fastidiosa Dixon
  CDS (1)..(831): transl_table=11
gtggtagagacacaagacaaggaaatacatgacctgagggatgaacactggggcgaacgcttctccggtatcgatcggctatatggcctaggcacggttgcacggctgtcgacatgtcgtgtggcggtcatcggaataggtggagtcggttcgtggattgtcgaagcacttgcacgctcggctatagggtacatgagcttgattgacgcagacgatctctgtatctccaataccaatcgccagctacctgcactgataggtcaatacggaaggaacaaagcgcaggccatggctgaacgttgccgtgcaattaatcccaggatcaacgtgtcagcaacagagttatttttggcaaggagcaacatggaaacactgcttggggaaaatttcgatttgattattgatgcttgcgacagctttcggatcaaagttgaaactatcgtttcctgtcggctccataaacgaccactgatcaccattggcgctgcagggggacgtactgaaccgactctagtgcgggtacgcgatatctctcgaacggaacacgatacgctgcttgctttgatccgtaagaaattgcgtagcgaattcaatttccccaagaatccgaaacgctatttcggtgtgcccgcagtgtattcattggagaatgtgaaatatccacaagctgacggtagcgtctgtggaatacgaccatcattaatcagcaacgcagcactgaatctagattgcagcacaggccttggcgcagcaactcacgtcactggtgcatttgcctttgctgcaactggcaaagcaattgagatgttactcacaccaaagaaaagataa

SEQ ID NO: 40956 - protein, 276 aa, Xylella fastidiosa Dixon
MVETQDKEIHDLRDEHWGERFSGIDRLYGLGTVARLSTCRVAVIGIGGVGSWIVEALARSAIGYMSLIDADDLCISNTNRQLPALIGQYGRNKAQAMAERCRAINPRINVSATELFLARSNMETLLGENFDLIIDACDSFRIKVETIVSCRLHKRPLITIGAAGGRTEPTLVRVRDISRTEHDTLLALIRKKLRSEFNFPKNPKRYFGVPAVYSLENVKYPQADGSVCGIRPSLISNAALNLDCSTGLGAATHVTGAFAFAATGKAIEMLLTPKKR

SEQ ID NO: 40957 - DNA, 801 bp, Pseudoalteromonas tunicata D2
  CDS (1)..(801): transl_table=11
atgaataacatgacccctgaatatgataaccgttttggcggtgttcgccgcgtctacggaactgagcaattaacttggttatctcaagcacatttttgcgtgataggcattggtggtgtaggtagttgggtagcagaagcatttgcccgaagcggtgttggtcaaattactttgattgatctcgatgatatttgcaccacaaatattaacagacaaatccatgcattaacctcaaccattggcagtgaaaagatagttgccatgaaagagaggattttagcgataaatcctgattgccaagtgcatttaatagatgattttttaacgctcgataatattacaacgcacttggttgagtttgattatgtagttgattgtattgatcaagtaccagtaaaagcggcacttattgcacactgtaaacggcaaaaaatacccgtgtttaccactggcggcgcaggtgggcaaagcgatccgagtcaaattcaatacggtgatgtggcaaaaaccactcaagacccattattagcaaaagtgcgttatttattacgtaaaaagtataattttagcgataacccaaaacgtaaatttggtgttgactgtgttttttcgaccgaacaattaacctatccaatggctgatggcagtgtatgccaagctaaacagcaagccgatggctcattaagcatggattgtgcaaatggctttggatccttaactatggtaactgggacttttggcttttttgcagcgtcaaaagcgataaaaaaatacctagaaaaacaacaacgaaataaataa

SEQ ID NO: 40958 - protein, 266 aa, Pseudoalteromonas tunicata D2
MNNMTPEYDNRFGGVRRVYGTEQLTWLSQAHFCVIGIGGVGSWVAEAFARSGVGQITLIDLDDICTTNINRQIHALTSTIGSEKIVAMKERILAINPDCQVHLIDDFLTLDNITTHLVEFDYVVDCIDQVPVKAALIAHCKRQKIPVFTTGGAGGQSDPSQIQYGDVAKTTQDPLLAKVRYLLRKKYNFSDNPKRKFGVDCVFSTEQLTYPMADGSVCQAKQQADGSLSMDCANGFGSLTMVTGTFGFFAASKAIKKYLEKQQRNK

SEQ ID NO: 40959 - DNA, 810 bp, Photobacterium sp. SKA34
  CDS (1)..(810): transl_table=11
atgcgtgaacttgataccccagcatccgacagttataaccaacgttttggcggcacacgtcgtttatacggtaatagtgaagtagacattcttcgtgctgcacatgtgtgtgtgattggtattggtggtgttggttcatgggcagcagaagcgttggcacgttcaggtattggtgagcttaccctgattgatatggatgatgtgtgtgtgactaatattaatcgtcaaattcatgccatgacagggacggtaggtaaaagcaaaattgaagtgatggctgagcgtattcatttaatcaatcctgagtgtaaagtgaatctgattgatgatttcattacgcctgaaaatcaagctgaatacttatcaaaagattttgattacgtgctcgatgcgatagatagtatgaagccaaaagcggcactgttgtcatactgtaaaagtaataaaattaaggtgatcaccacaggtggtgctggcggtcaaatggatccaacgcaaattcagatcgctgatttgacaaagacaattcaagatccattggcgaagaagttacgtgataccttgcgtcgtcatcataacttccctaaaaacccaaaacgtaagtttggtattgattgcgtattttcaactgagcaactgaagtacccacaagccgacggctctgtttgtgtagtaaaagcgacagctgaaggacctaagcgtatggattgcgcgagtggttttggcgcggcaactgttgtgactgcaacgtttggttttgtcgcggtatcacaaatattgcgtaagcttatcgagaaacataaacagtaa

SEQ ID NO: 40960 - protein, 269 aa, Photobacterium sp. SKA34
MRELDTPASDSYNQRFGGTRRLYGNSEVDILRAAHVCVIGIGGVGSWAAEALARSGIGELTLIDMDDVCVTNINRQIHAMTGTVGKSKIEVMAERIHLINPECKVNLIDDFITPENQAEYLSKDFDYVLDAIDSMKPKAALLSYCKSNKIKVITTGGAGGQMDPTQIQIADLTKTIQDPLAKKLRDTLRRHHNFPKNPKRKFGIDCVFSTEQLKYPQADGSVCVVKATAEGPKRMDCASGFGAATVVTATFGFVAVSQILRKLIEKHKQ

SEQ ID NO: 40961 - DNA, 780 bp, Oceanobacter sp. RED65
  CDS (1)..(780): transl_table=11
gtgagttatcaggatcgtttttcaggcattgcgcgcctatatggcgtgaacgcagtcagtgtattcaagcaatcgcgtatcgccgttattggcattggcggtgtgggatcgtgggtggctgaggcacttgcacgttcgggttttgagcatattaaattaatcgatcttgacgacatctgcgtgaccaataccaatcgccagatacacacgttgacgtccactgtgggacaattgaaggtggatgcgatggcagaacgtttgcgaggcattaatcccgatatacacgtagaagcggtcatgagttttttgacacaaaacaaccataacgaactgctgtctggtgttgactttgttgtagatgccattgattcagttaaggtaaaagcgtctttaatcgcatattgtaagcgtaacaagatgcctatcgtgaccacaggagcagcgggtggtcagcttgacccgacccagatttcggtagccgacatcaacaagacctataatgatcctctagccaaaaaagtacgcagcttattacgtcgagaatatggtttttctcgtaatcaaaaacgcacttacggcattccgtgtgtatattcgactgagcaacttaaatatccgcaacctgatggaagtgtttgccagcaaaagagcttcgacgacggtgctgtgaggcttgattgttccggtggttttggtgcttctactatggttacagctacttttggctttgttgcggcagcggaagtggcaaagcgtttagcgaaaaaagcagaagcataa

SEQ ID NO: 40962 - protein, 259 aa, Oceanobacter sp. RED65
MSYQDRFSGIARLYGVNAVSVFKQSRIAVIGIGGVGSWVAEALARSGFEHIKLIDLDDICVTNTNRQIHTLTSTVGQLKVDAMAERLRGINPDIHVEAVMSFLTQNNHNELLSGVDFVVDAIDSVKVKASLIAYCKRNKMPIVTTGAAGGQLDPTQISVADINKTYNDPLAKKVRSLLRREYGFSRNQKRTYGIPCVYSTEQLKYPQPDGSVCQQKSFDDGAVRLDCSGGFGASTMVTATFGFVAAAEVAKRLAKKAEA

SEQ ID NO: 40963 - DNA, 768 bp, Desulfitobacterium hafniense DCB-2
  CDS (1)..(768): transl_table=11
atgcagcataaattctcaagaactgagcttcttatcggcaaatccgccttggcgaagctcagccaaagcacagtcatcatcttcggcataggcggcgtaggctcttataccgcagaagccttagcacgggccggcgtggggcatttaatcctcgtggactacgacgagatttgcctgaccaatatcaaccgtcagcttcatgctctccattccaccatcggtaaagcaaaggttgatgtcatgaaaaaccgcatcttggatattaaccccaaagcaaaggtggatgccgttaaagaattcttctccgctgagaatgcggaaagcttcctgggccaaaagccggattatgtggtggacgccatcgataccgtctccagtaaagttgccttggctaaggaatgcagccagcgcaatattcccttgattgccagcatgggcgccggcaatcgcctttctgccgaaaattaccgcattacagatttatccaagaccagcggtgatcctttggccaaggccgtgcggaaattactgcgcaaagaagggattaccaagggaatcaaagtcgtctattctcccgatctcccccttactcctctggatacggaagccgactgccgctccaactgcatttgcccggggggcgatgcccattgtgcccttaaacggcagattcccggcagcatttcctttgttcctcctgtatcaggacttctcatggccgggcaggtcgtgaatgacctaattgccgattgtccccgggaggcctga

SEQ ID NO: 40964 - protein, 255 aa, Desulfitobacterium hafniense DCB-2
MQHKFSRTELLIGKSALAKLSQSTVIIFGIGGVGSYTAEALARAGVGHLILVDYDEICLTNINRQLHALHSTIGKAKVDVMKNRILDINPKAKVDAVKEFFSAENAESFLGQKPDYVVDAIDTVSSKVALAKECSQRNIPLIASMGAGNRLSAENYRITDLSKTSGDPLAKAVRKLLRKEGITKGIKVVYSPDLPLTPLDTEADCRSNCICPGGDAHCALKRQIPGSISFVPPVSGLLMAGQVVNDLIADCPREA

SEQ ID NO: 40965 - DNA, 810 bp, Vibrio sp. Ex25
  CDS (1)..(810): transl_table=11
atgcgtgaactcgataccccagcatctgacagctataatcaacgctttggcggcactcgtcgtctttatggcaacagcgaagtggacattcttcgcgctgcacacgtttgtgtgattggtattggtggcgtaggttcatgggcggtggaagcgctggctcgtacggggatcggtgagctaactctgattgatatggacgatgtttgtgtcacgaacattaaccgccaaattcatgcgatgacgggcaccgttggccaaagcaagattgaagtgatggccgagcgtgtcaaattgatcaacccagagtgtaaagtcaatctgattgatgatttcatcacgccagacaatcaacatgagtacttaagcaaagagtttgattacgtgttggatgccattgacagcgtaaaagcgaaggcgtctttgttggcgtattgccgcagcaacaagatcaaagtgatcactacggggggcgctggtggtcaggttgacccaacgcagatcatggtcgctgatttaacgaaaacgatccaagatcctctagcgaagaaaatcaaagacaccctgcgtcgtcatcataacttccctaagaacccggctcgtaagtttggtattgattgcgtgttttcaaccgagcaactgaagtaccctcaagcagacggttcagtgtgtggtgtgaagtcgacagcggaaggcccaaaacgtatggattgcgctagcggttttggtgcggcgactgtcgtaactgcaacgtttggctttgtcgcggtatcgcgaatcgttgagaagttgatttcaaaatataagaagtaa

SEQ ID NO: 40966 - protein, 269 aa, Vibrio sp. Ex25
MRELDTPASDSYNQRFGGTRRLYGNSEVDILRAAHVCVIGIGGVGSWAVEALARTGIGELTLIDMDDVCVTNINRQIHAMTGTVGQSKIEVMAERVKLINPECKVNLIDDFITPDNQHEYLSKEFDYVLDAIDSVKAKASLLAYCRSNKIKVITTGGAGGQVDPTQIMVADLTKTIQDPLAKKIKDTLRRHHNFPKNPARKFGIDCVFSTEQLKYPQADGSVCGVKSTAEGPKRMDCASGFGAATVVTATFGFVAVSRIVEKLISKYKK

SEQ ID NO: 40967 - DNA, 798 bp, Alteromonadales bacterium TW-7
  CDS (1)..(798): transl_table=11
atgagtgaaaaaataactgacatccgctttggtggcattaaacgtttatatggtcatcagcaatttgattggcttcaagaggctcacttttgtgttgttggcattggtggagtggggagttgggcagctgaggcgcttgcgcgcaccggtttaggtagaataacgctcatagatcttgatgatatttgtgcgaccaatgtaaaccgtcaaatccatgccttatctggaacgattggtcatgctaaagtcgacgcaatgaaagcgcgttgtgaacttataaatccagaatgcaacattgatgtcattgatgactttataacacttgaaaatattaaagagcacattcacggctttgactatgtaatcgattgcattgatgcagtcaaagaaaaagcagcactcattgcccattgcaagcgaaataaaatgcctattattaccactggtggtgctggtggtcaaaccgatcctagtcaaattacattcggtgatgtagctaaaacaacgcaagatcctttacttgcaaaggtgcgctacatattacgtaaacagtataactttagtaataaccctaaacgaaaatttaatgttgattgcgtttactcaacagagcaattagtttatccagggagtgatggtagtgtttgccatgcaaagcaaagtgcagatggcagcatgaatatggattgcaataacggttttggctctgtaacgatgattacaggaagtttcggcttttttgtagcagccaaagctattcgcaaatacctagataaaaagcagcgtttgcaggtttag

SEQ ID NO: 40968 - protein, 265 aa, Alteromonadales bacterium TW-7
MSEKITDIRFGGIKRLYGHQQFDWLQEAHFCVVGIGGVGSWAAEALARTGLGRITLIDLDDICATNVNRQIHALSGTIGHAKVDAMKARCELINPECNIDVIDDFITLENIKEHIHGFDYVIDCIDAVKEKAALIAHCKRNKMPIITTGGAGGQTDPSQITFGDVAKTTQDPLLAKVRYILRKQYNFSNNPKRKFNVDCVYSTEQLVYPGSDGSVCHAKQSADGSMNMDCNNGFGSVTMITGSFGFFVAAKAIRKYLDKKQRLQV

SEQ ID NO: 40969 - DNA, 810 bp, Pseudomonas putida GB-1
  CDS (1)..(810): transl_table=11
atgagcacagaagatccacgcttcgccggcgttgcccggctgtacggcgaccaggggctgcaacgcctgggccaggcccatgtggcggtggtcggtattggcggagtgggctcctgggtggccgaagcgttggcccgcagtggcgtgggcgaaatcaccctgttcgacctggacgatgtctgcgtcagcaacaccaaccgccaggcccatgccctggaaggccaggtggggcggcccaaggttgaggtcatggccgaacgcctgcgagcgatcaacccggcgtgcaaggtgcatgcggtggctgacttcgtcacccgcgagaccatggtcgagtacatccatgagcagctggattgcgtgatcgactgcatcgacagcgtgatggccaaggcggcgctgatcgcctggtgccggcggcgcaagatcgcgattgtcaccaccggtggtgcgggtgggcaaatcgacccgacgcagatccagatcgccgacctgaacaagaccttcaacgacccgctcgcttcgcgggtgcgctcaaccctgcgccgcgactacaacttctcgcgcaatgtcagccgcaactatggcgtaccgtgcgtgttctccagcgaacagctgcgttaccccaagggcgatggcagcgtttgcctgcagaaaagcttcgtgggtgagggcgtaaggctggactgcgcgggtggctttggcgcggtgatgatggtgaccgcgacctttggcatggtggcagccagcaaggcgatcgagaagctggtggccggtgcgcggcgcccttcggagcgtatcaaacctgagtaa

SEQ ID NO: 40970 - protein, 269 aa, Pseudomonas putida GB-1
MSTEDPRFAGVARLYGDQGLQRLGQAHVAVVGIGGVGSWVAEALARSGVGEITLFDLDDVCVSNTNRQAHALEGQVGRPKVEVMAERLRAINPACKVHAVADFVTRETMVEYIHEQLDCVIDCIDSVMAKAALIAWCRRRKIAIVTTGGAGGQIDPTQIQIADLNKTFNDPLASRVRSTLRRDYNFSRNVSRNYGVPCVFSSEQLRYPKGDGSVCLQKSFVGEGVRLDCAGGFGAVMMVTATFGMVAASKAIEKLVAGARRPSERIKPE

SEQ ID NO: 40971 - DNA, 1539 bp, Aspergillus niger
  CDS (1)..(1539)
atggcgtcctggatccaacgccagggtggatcccatcagacacaacttgcagctacagccgtgatttcgggagctgcggtcgcaggtgcgatctttggctaccaggcattcagacggaaggaagcagtacagcgcctcaaggcgtccataccggatgttaacaaccaacaccatgcggagaagctcacagaatacggtgtcgcggctgcaacgcagctgagcaaggaagatgaaaggagtgcgcttcttgctcggagggcgcaggaaggagactatgacgatgagctcatcctcgaacaactcgccagaaaccgtgtctttctatctgatgagggtctcgcgagactccgctcgtcatacataatcgtggtcggatgcggaggagtcgggtcgcatgccgttgcatcccttgcccgctcgggtgtttccaagatccgcttgatcgattttgatcaggttacgctttcctcattgaaccgacacgctcttgcgacgctggccgacgtcggaacgccgaaggtacattgcattcgcaagagactggagcagatcacaccatgggtgaaattcgactgccggaacgaactattcgggggatccgtcgccgacaatcttcttgcgccctggtcctgggacgaccatgataaaggacgcaagcccgactatgtgctcgactgcatcgacaacatcacgtccaaggtggagcttcttcactactgtcattcacactcaattcccgtgatttcggcaatgggagcaggatgcaagtcagatccaacgcgcgttacggtcggtgatatctcactcagcacggatgatccgttgtcgcggagcactcgtcggcgcctgaagttgttgggagtgaatacaggcattcctgttgttttctctactgagaagcccggccctggaaaagctactcttctcccattgaacgaagcagagtttagtaagggtgaggttggtgagcttagtgtgttgcccgatttccgggcgcgaattctccctgtgttgggaacaatgcctgcagtgtttggctacaccgtggcgaatcacgtcatctgcgatatctccggctatccgatggactacagcgtgggtggaaagggtcgtgacaagttgtacgatggagtcttggcagccttgcagggaacgctcgagcgcttggcccgggcggagtatggacctagccttgtcgggcttcgccttcctatcagcaaggatgatgttggatatttggtcgatgagatcttccgcggcaagagtgtggtcagtggcctgcccagtcgaatcagtctcgttccctggaagcgccctgacagaggattcggacctgatccggagtggatgaagcagggacagacatttgttccgcttgagttgaaggatttagtgtgtatgaccaaagatgaagctacgcgccatgaaaaggaagtgcttctgggtggcaagaagctggaggaggtatacgatgtcaagacgattgaaacggtgcagaagcgccaacaggagatggagtttcacgagcaatatcgctaa

SEQ ID NO: 40972 - protein, 512 aa, Aspergillus niger
MASWIQRQGGSHQTQLAATAVISGAAVAGAIFGYQAFRRKEAVQRLKASIPDVNNQHHAEKLTEYGVAAATQLSKEDERSALLARRAQEGDYDDELILEQLARNRVFLSDEGLARLRSSYIIVVGCGGVGSHAVASLARSGVSKIRLIDFDQVTLSSLNRHALATLADVGTPKVHCIRKRLEQITPWVKFDCRNELFGGSVADNLLAPWSWDDHDKGRKPDYVLDCIDNITSKVELLHYCHSHSIPVISAMGAGCKSDPTRVTVGDISLSTDDPLSRSTRRRLKLLGVNTGIPVVFSTEKPGPGKATLLPLNEAEFSKGEVGELSVLPDFRARILPVLGTMPAVFGYTVANHVICDISGYPMDYSVGGKGRDKLYDGVLAALQGTLERLARAEYGPSLVGLRLPISKDDVGYLVDEIFRGKSVVSGLPSRISLVPWKRPDRGFGPDPEWMKQGQTFVPLELKDLVCMTKDEATRHEKEVLLGGKKLEEVYDVKTIETVQKRQQEMEFHEQYR

SEQ ID NO: 40973 - DNA, 1542 bp, Aspergillus oryzae
  CDS (1)..(1542)
atgtcttcttggatacagcggcacgctggctcccaacagacacagcttgccgctacagctgtgctctcgggggctgctgttgcaggagctatctttgggtatcaagcgctcaaaaggaaagaagccgtcaaggaattgaaagcatctattccgaatatcgatgagaaacatatcgccgcgaagcttaccaaattcggtggcgcagaccctgtacaacaattgagcaaggaagatgagcgcagtgcggcgcttgcgcgcagagcgcagatgggggactacgacgacgagcttatccttgaacaacttgcccgtaatcgtgtcttcctcaccgacgagggtctagagaagcttcgttcatcttttataatagttgtgggatgtggaggtgtcgggtcgcatgctgcagcctccctttcccggtcgggtgcttctaagatacgattgattgatttcgaccaagtcacattatcctctctaaaccgacatgctctcgcgacgcttgctgatgtcgggacgccgaaggtgcactgcatccgcaaacggttggaacaaattacaccatggactaagttcgactgccgaaacgaactcttcagcggatctgttgccgatggtttacttgctccgtggtcgatggacgatagcgacaaagggcgaaagccagactacgtgctggactgtatcgataacatcacctccaaggtcgagctgctacactactgtcattcacactcaattcccgtaatttcttcgatgggtgcaggatgcaagtccgatcctacgtgcgtaacagtgggcgatatctcgacaagcacggacgaccctctctcgcgcagcactcgtcgacgtcttaagatcctcggagtaagcactggtatcccggtcgtattctcgacagagaagcccggcccaggcaaggctagtctcttgccacttgcagaggaagaattcaataagggccaagttggcgagctcagcgttctgccagacttccgtgcgcgaattctaccggttcttggaaccatgcctgcggtttttggatacaccgtggcaaaccatgttatctgtgatattgcaggttacccgagagactacagcattgccagaaaaggcaaggataaaatttatgactcggtccagacggctacccagggtttcatggaacggttggctagagttgaagttggtcaacatgtcattggccttcgtcttccaattaccaagggcgacgtcgttttccttgtggacgacatctggcgaggaaagagtgctatcaccggccttcctggccgactcatcctcgttccatgggagcggcccgctcgcggcttcgtgcctgaccctgagtgggagaagcaaggacagaaattcctaccgtttgagctgaaggaccttgtgtgtatgaccaaggaggagagcgcccgacacgagaaggaagttctcctgggtggaaagaaaccagaagacctatacgacgagaaaacaatccagagggtcaaggagcgaatggaggaggcgggattctacgagagatttcggtag

SEQ ID NO: 40974 - protein, 513 aa, Aspergillus oryzae
MSSWIQRHAGSQQTQLAATAVLSGAAVAGAIFGYQALKRKEAVKELKASIPNIDEKHIAAKLTKFGGADPVQQLSKEDERSAALARRAQMGDYDDELILEQLARNRVFLTDEGLEKLRSSFIIVVGCGGVGSHAAASLSRSGASKIRLIDFDQVTLSSLNRHALATLADVGTPKVHCIRKRLEQITPWTKFDCRNELFSGSVADGLLAPWSMDDSDKGRKPDYVLDCIDNITSKVELLHYCHSHSIPVISSMGAGCKSDPTCVTVGDISTSTDDPLSRSTRRRLKILGVSTGIPVVFSTEKPGPGKASLLPLAEEEFNKGQVGELSVLPDFRARILPVLGTMPAVFGYTVANHVICDIAGYPRDYSIARKGKDKIYDSVQTATQGFMERLARVEVGQHVIGLRLPITKGDVVFLVDDIWRGKSAITGLPGRLILVPWERPARGFVPDPEWEKQGQKFLPFELKDLVCMTKEESARHEKEVLLGGKKPEDLYDEKTIQRVKERMEEAGFYERFR

SEQ ID NO: 40975 - DNA, 1386 bp, Zea mays
  CDS (1)..(1386)
atgggggagcgggcgaaggaatggctcctcgcagcaggcgccggcgccgccgtcggcgcgctctctgccgccgctgtcatcgatcttctctcgagatccaagcgcagagagaggtacgcgcgggacctgctggagtccaatgcaatgacgactggtacgcgtgcagggaacactcggtccagcaagcacctgggctctcttgctagctcggctcttctctctgatgaagtggtctctgaacagcttacaaggaatatacaattttttggcatggactctcagaagaaagtgactgaatcctatgttgtggttattggtcttggaggggttggcagtcatgcagcatcaatgctcctgagatctggtgttggcaggttgcttcttgtggattttgatcaggtatcactctcatcactaaatcggcatgctgtggcaaccagagatgacgttggaacttcaaaagcgttgtgcctcaagaagcatttttcaatgatatacccagagtgccaaatagatgcaaaagtgcaattgtatgatgcatcgtctgaggaggaaattctttctggacagcctgactttgttcttgattgcatagataacattgataccaaggtgtcactccttgcagcttgcgtgcgcagaggtttgaaggtactttctgcaatgggggctggagctcgagctgatcccaccagaattcgtgtcgcagatttgagagaatcaagcaatgaccccctctctcgatcggtgaggtacaggctcaagaaagaacatggaattgagggtggaataccagtagtcttttcattggaaaagccaaaggcaaagcttcttccttttcaagcttcaaaagaagaggaaactccatcagattaccagattgtgccaggattcagggttcgcattataccagtattgggaaccatccctgcaatatttggtcaagttatggcctcctatgtggtcactcagcttgctggattagattttcaaactgaaccggttgttaacctggatttggatcattaccgtatacttcatcagcgtcttattgagcatgaggaactgatgtatggcacagccgagcaagttctggtagatgctgaagaggtaatgtacattgtcaaagaattgtggcgtggtcgaagtgctagagaccaaagccaggacactggccggaagatgtggagatctgtgaacgaactaatgcttgttcggtgggacaaatcaaaggctgctggcatctcaaacttaatacttgtcaagttcagtgaggctgacgcccatgaatccaccacactcgaccgaataaaagaacaagaacctgaattctactctatggtttcacgtgtcctgaaacgagctgagatggagtttgccttatga

SEQ ID NO: 40976 - protein, 461 aa, Zea mays
MGERAKEWLLAAGAGAAVGALSAAAVIDLLSRSKRRERYARDLLESNAMTTGTRAGNTRSSKHLGSLASSALLSDEVVSEQLTRNIQFFGMDSQKKVTESYVVVIGLGGVGSHAASMLLRSGVGRLLLVDFDQVSLSSLNRHAVATRDDVGTSKALCLKKHFSMIYPECQIDAKVQLYDASSEEEILSGQPDFVLDCIDNIDTKVSLLAACVRRGLKVLSAMGAGARADPTRIRVADLRESSNDPLSRSVRYRLKKEHGIEGGIPVVFSLEKPKAKLLPFQASKEEETPSDYQIVPGFRVRIIPVLGTIPAIFGQVMASYVVTQLAGLDFQTEPVVNLDLDHYRILHQRLIEHEELMYGTAEQVLVDAEEVMYIVKELWRGRSARDQSQDTGRKMWRSVNELMLVRWDKSKAAGISNLILVKFSEADAHESTTLDRIKEQEPEFYSMVSRVLKRAEMEFAL

SEQ ID NO: 40977 - DNA, 1374 bp, Zea mays
  CDS (1)..(1374)
atgggggagcgggcgaaggaatggctcctcgcagcaggcgccggcgccgccgtcggcgcgctctctgccgccgctgtcatcgatcttctctcgagatccaagcggagagagaggtacgcgcgggacctgctggagtccaatggaatgacgactgggaacactcggtccagcaagcacctgggctctcttggtagctcggctcttctctctgatgaagtggtctctgaacagcttacaaggaatatacaattttttggcatggactctcagaagaaagtgactgaatcctatgttgtggttattggtcttggaggggttggcagtcatgcagcatcaatgctcctgagatctggtgttggcaggttgcttcttgtggattttgatcaggtatcactctcatcactaaatcggcatgctgtggcaaccagagatgacgttggaacttcaaaagcgttgtgcctcaagaagcatttttcaatgatatacccagagtgccaaatagatgcaaaagtgcaattgtatgatgcatcgtctgaggaggaaattctttctggacagcctgactttgttcttgattgcatagataacattgataccaaggtgtcactccttgcagcttgcgtgcgcagaggtttgaaggtactttctgcaatgggggctggagctcgagctgatcccaccagaattcgtgtcgcagatttgagagaatcaagcaatgaccccctctctcgatcggtgaggtacaggctcaagaaagaacatggaattgagggtggaataccagtagtcttttcattggaaaagccaaaggcaaagcttcttccttttcaagcttcaaaagaagaggaaactccatcagattaccagattgtgccaggattcagggttcgcattataccagtattgggaaccatccctgcaatatttggtcaagttatggcctcctatgtggtcactcagcttgctggattagattttcaaactgaaccagttgttaacctggatttggatcattaccgtatacttcatcagcgtcttattgagcatgaggaactgatgtatggcacagccgagcaagttctggtagatgctgaagaggtaatgtacattgtcaaagaattgtggcgtggtcgaagtgctagagaccaaagccaggacactggccggaagatgtggagatctgtgaacgaactaatgcttgttcggtgggacaaatcaaaggctgctggcatctcaaacttaatacttgtcaagttcagtgaggctgacgcccatgaatccaccacactcgaccgaataaaagaacaagaacctgaattctactttatggtttcacgtgtcctgaaacgagctgagatggagtttgccttatga

SEQ ID NO: 40978 - protein, 457 aa, Zea mays
MGERAKEWLLAAGAGAAVGALSAAAVIDLLSRSKRRERYARDLLESNGMTTGNTRSSKHLGSLGSSALLSDEVVSEQLTRNIQFFGMDSQKKVTESYVVVIGLGGVGSHAASMLLRSGVGRLLLVDFDQVSLSSLNRHAVATRDDVGTSKALCLKKHFSMIYPECQIDAKVQLYDASSEEEILSGQPDFVLDCIDNIDTKVSLLAACVRRGLKVLSAMGAGARADPTRIRVADLRESSNDPLSRSVRYRLKKEHGIEGGIPVVFSLEKPKAKLLPFQASKEEETPSDYQIVPGFRVRIIPVLGTIPAIFGQVMASYVVTQLAGLDFQTEPVVNLDLDHYRILHQRLIEHEELMYGTAEQVLVDAEEVMYIVKELWRGRSARDQSQDTGRKMWRSVNELMLVRWDKSKAAGISNLILVKFSEADAHESTTLDRIKEQEPEFYFMVSRVLKRAEMEFAL

SEQ ID NO: 40979 - DNA, 25 bp, Artificial sequence
  primer
atgtctgtggtaattagtgatgcat

SEQ ID NO: 40980 - DNA, 22 bp, Artificial sequence
  primer
ttaaccctgacgcgccgctttc

SEQ ID NO: 40981 - protein, 284 aa, Artificial sequence
  consensus sequence
  Variant (2)..(6): Xaa in position 2 to 6 is any amino acid
  Variant (8)..(8): Xaa in position 8 is any amino acid
  Variant (10)..(21): Xaa in position 10 to 21 is any amino acid
  Variant (22)..(22): Xaa in position 22 is any or no amino acid
  Variant (24)..(24): Xaa in position 24 is any amino acid
  Variant (26)..(26): Xaa in position 26 is any amino acid
  Variant (32)..(34): Xaa in position 32 to 34 is any amino acid
  Variant (40)..(40): Xaa in position 40 is any amino acid
  Variant (42)..(42): Xaa in position 42 is any amino acid
  Variant (44)..(46): Xaa in position 44 to 46 is any amino acid
  Variant (48)..(48): Xaa in position 48 is any amino acid
  Variant (50)..(50): Xaa in position 50 is any amino acid
  Variant (52)..(56): Xaa in position 52 to 56 is any amino acid
  Variant (58)..(58): Xaa in position 58 is any amino acid
  Variant (62)..(63): Xaa in position 62 to 63 is any amino acid
  Variant (65)..(67): Xaa in position 65 to 67 is any amino acid
  Variant (68)..(69): Xaa in position 68 to 69 is any or no amino acid
  Variant (71)..(72): Xaa in position 71 to 72 is any amino acid
  Variant (74)..(79): Xaa in position 74 to 79 is any amino acid
  Variant (81)..(82): Xaa in position 81 to 82 is any amino acid
  Variant (83)..(83): Xaa in position 83 is any or no amino acid
  Variant (87)..(95): Xaa in position 87 to 95 is any amino acid
  Variant (97)..(104): Xaa in position 97 to 104 is any amino acid
  Variant (105)..(120): Xaa in position 105 to 120 is any or no amino acid
  Variant (122)..(124): Xaa in position 122 to 124 is any amino acid
  Variant (126)..(126): Xaa in position 126 is any amino acid
  Variant (129)..(132): Xaa in position 129 to 132 is any amino acid
  Variant (134)..(148): Xaa in position 134 to 148 is any amino acid
  Variant (149)..(151): Xaa in position 149 to 151 is any or no amino acid
  Variant (155)..(157): Xaa in position 155 to 157 is any amino acid
  Variant (160)..(165): Xaa in position 160 to 165 is any amino acid
  Variant (167)..(172): Xaa in position 167 to 172 is any amino acid
  Variant (176)..(179): Xaa in position 176 to 179 is any amino acid
  Variant (181)..(182): Xaa in position 181 to 182 is any amino acid
  Variant (184)..(193): Xaa in position 184 to 193 is any amino acid
  Variant (194)..(211): Xaa in position 194 to 211 is any or no amino acid
  Variant (213)..(213): Xaa in position 213 is any amino acid
  Variant (215)..(215): Xaa in position 215 is any amino acid
  Variant (217)..(223): Xaa in position 217 to 223 is any amino acid
  Variant (224)..(273): Xaa in position 224 to 273 is any or no amino acid
  Variant (275)..(282): Xaa in position 275 to 282 is any amino acid
FXXXXXLXGXXXXXXXXXXXXXVXGXGGVGSXXXEALARXGXGXXXLXDXDXXXXXNXNRQXXAXXXXXGXXKXXXXXXRXXXINPXXXXXXXXXFXXXXXXXXXXXXXXXXXXXXXXXXDXXXDXIDXXXXKXXXXXXXXXXXXXXXXXXGAGXXXDPXXXXXXDXXXXXXDPLXXXXRXXLXXXXXXXXXXXXXXXXXXXXXXXXXXXXVXSXEXXXXXXXXXXXXXXXXXXXXXXXXXXXXXXXXXXXXXXXXXXXXXXXXXXXXXXXXXGXXXXXXXXFG

SEQ ID NO: 40982 - protein, 40 aa, Artificial sequence
  protein pattern
  Variant (2)..(2): Xaa in position 2 is Ile, Leu, Met or Val
  Variant (6)..(10): Xaa in position 6 to 10 is any or no amino acid
  Variant (13)..(13): Xaa in position 13 is Phe, Ile, Leu or Met
  Variant (14)..(14): Xaa in position 14 is Ala, Cys or Thr
  Variant (16)..(16): Xaa in position 16 is Ala, Cys, Asn, Ser or Thr
  Variant (17)..(17): Xaa in position 17 is Ala, Gly or Asn
  Variant (18)..(18): Xaa in position 18 is Phe, Ile, Leu or Val
  Variant (19)..(20): Xaa in position 19 to 20 is any amino acid
  Variant (21)..(21): Xaa in position 21 is Ile, Leu or Met
  Variant (22)..(22): Xaa in position 22 is any amino acid
  Variant (23)..(23): Xaa in position 23 is Ile, Leu or Met
  Variant (24)..(24): Xaa in position 24 is Phe, Ile or Val
  Variant (25)..(25): Xaa in position 25 is Asp or Glu
  Variant (26)..(26): Xaa in position 26 is any amino acid
  Variant (28)..(28): Xaa in position 28 is any amino acid
  Variant (29)..(29): Xaa in position 29 is Ile, Leu or Val
  Variant (30)..(30): Xaa in position 30 is Ala, Cys, Asp, Ser or Val
  Variant (31)..(31): Xaa in position 31 is any amino acid
  Variant (32)..(32): Xaa in position 32 is Ser or Thr
  Variant (34)..(34): Xaa in position 34 is any amino acid
  Variant (38)..(39): Xaa in position 38 to 39 is any amino acid
  Variant (40)..(40): Xaa in position 40 is Ala or Thr
GXGGVXXXXXEAXXRXXXXXXXXXXXDXXXXXNXNRQXXX

SEQ ID NO: 40983 - protein, 17 aa, Artificial sequence
  protein pattern
  Variant (2)..(3): Xaa in position 2 to 3 is any amino acid
  Variant (5)..(6): Xaa in position 5 to 6 is any amino acid
  Variant (7)..(7): Xaa in position 7 is Ala, Ile, Leu or Val
  Variant (8)..(10): Xaa in position 8 to 10 is any amino acid
  Variant (12)..(14): Xaa in position 12 to 14 is any amino acid
GXXKXXXXXXRXXXINP

SEQ ID NO: 40984 - DNA, 693 bp, Escherichia coli
  CDS (1)..(693): transl_table=11
atgacatcatcaataaccaatgaaattatgcaattatatacggatagggaggttcttaacatggggctttgtagtcgttataaaagtcttacatgcaatagttgctcaatgcattgccaaataatgccagaagagtcaccgcgtttgcagtattgcgcaaactcgtgtttttgtatgtggcccgaagaaagttcatattttaatcgtggtgtggtagaaggtatcttaacaaaaaaccacaatgcgagattaagcggatatatttttgtcgatttttcagtaagttttttacgtctattccttgaaaaagactggattgactatcttgcaagtactgacatggggattgttttagtcagcgaccgcaatatgcaatcgttagctaattactggcgaaaacacaactcagcaatatctgctgtcatatataatgatgatggtcttgatgttgccaatgaaaagatcagacaactatttattggtcgttatttatcatttaccggaggtaacacattaactcagatggaattcaccataatggggtatatggtttctggttataatccatatcagattgctgaagttctggatatggatatccgtagcatctacgcgtacaagcaacgaatcgaaaagagaatgggtggtaaaataaacgaattatttattcgttcacattcggtccaacattaa

SEQ ID NO: 40985 - protein, 230 aa, Escherichia coli
MTSSITNEIMQLYTDREVLNMGLCSRYKSLTCNSCSMHCQIMPEESPRLQYCANSCFCMWPEESSYFNRGVVEGILTKNHNARLSGYIFVDFSVSFLRLFLEKDWIDYLASTDMGIVLVSDRNMQSLANYWRKHNSAISAVIYNDDGLDVANEKIRQLFIGRYLSFTGGNTLTQMEFTIMGYMVSGYNPYQIAEVLDMDIRSIYAYKQRIEKRMGGKINELFIRSHSVQH

SEQ ID NO: 40986 - DNA, 618 bp, Salmonella typhimurium LT2
  CDS (1)..(618): transl_table=11
atgatgagaaagccttcacaaattgtccattgcattagttgcgatttatcctgtcaattatttcctgacagcgcagtacgggtgcaatactgtcataatgcggcattttccatctggccagatggtaatgctttcctgaaaaaagggtttattgaaaagttattgcttgatagacacaatcatttatccagcggttttatctttgttgatttttctttcccgaatcttcgacgatttaccgatttgcaatgggctgacagtctggcagacagtggcatgcatattgtcctgatttctgacagaagtttaactccgctggccaattactggattttgaaaagcaataaaatacaagggattatttattccgatgacgatgatattgtgcaacagcaaaagatgcaccgcttgtttaccggtcggctcgccaacagtaaacgtggacgaacgcttaactatacggaatttatattactgaagcgctttgtatcaggaataagtattcagcagattgtaaatattgacaatattgatattaagaaactttatgtgcataagctgcggcttgaaaataagctagggcatagcattcataaaataatatcaaatattttatag

SEQ ID NO: 40987 - protein, 205 aa, Salmonella typhimurium LT2
MMRKPSQIVHCISCDLSCQLFPDSAVRVQYCHNAAFSIWPDGNAFLKKGFIEKLLLDRHNHLSSGFIFVDFSFPNLRRFTDLQWADSLADSGMHIVLISDRSLTPLANYWILKSNKIQGIIYSDDDDIVQQQKMHRLFTGRLANSKRGRTLNYTEFILLKRFVSGISIQQIVNIDNIDIKKLYVHKLRLENKLGHSIHKIISNIL

SEQ ID NO: 40988 - DNA, 618 bp, Salmonella enterica subsp. enterica serovar Typhi Ty2
  CDS (1)..(618): transl_table=11
atgatgagaaagccttcacaaattgtccattgcattagttgcgatttatcctgtcaattattccctgacagcgcagtacgggtgcaatactgtcataatgcggcattttccatctggccagatggtaatgctttcctgaaaaaagggtttattgaaaagttattgcttgatagacacaaccatttatccagcggttttatctttgttgatttttctttcccgaatcttcgacgatttaccgatttacaatgggctgacagtctggcaaacagtggtatgcatattgtcctgatttctgacagaagtttaactccgctggccaattactggattttgaaaagcaataaaatacaaggaattatttattccgatgacgatgatattgtgcaacagcaaaagatgcaccgcttgtttaccggtcggcttgccaacagtaaacgtggacgaacgcttaactatacggaatttatattactgaagcactttgtatcaggaataagtattcagcagattgtaaatattgacaatattgatattaagaaactttatgtgcataagctgcggcttgaaaataagctagggcatagcattcataaaataatatcaaatattttatag

SEQ ID NO: 40989 - protein, 205 aa, Salmonella enterica subsp. enterica serovar Typhi Ty2
MMRKPSQIVHCISCDLSCQLFPDSAVRVQYCHNAAFSIWPDGNAFLKKGFIEKLLLDRHNHLSSGFIFVDFSFPNLRRFTDLQWADSLANSGMHIVLISDRSLTPLANYWILKSNKIQGIIYSDDDDIVQQQKMHRLFTGRLANSKRGRTLNYTEFILLKHFVSGISIQQIVNIDNIDIKKLYVHKLRLENKLGHSIHKIISNIL

SEQ ID NO: 40990 - DNA, 630 bp, Enterobacter cloacae
  CDS (1)..(630): transl_table=11
atgaagtcactaatttatgattacggaagaatcaactgtatgagttgcccttctcaatgtgaattaaaaccaaatgcctcattgcgcgtttcgttttgccaggactattgtttttgtacctggccagaagggagtggctatttttctctggggattatggaggggctcctcaaacaaaattataataatctatatttaggctgtatttttgtcgatttttctatcagccatttgcgcttttttactaacgaacgttggatagattatttaattgaaacgaaattaaaaattgttatcgtttgtgataaataccttaaaccattggctaattactggtttaagcattctaaagatatttttcttgttatctatcagcaagatcggctgacgctggcctgtgaaaagttaaaaaagagatttatctatcagcgcgacgccttctttggcggagagtcactctctgaactggagtttgctgtcttaagcgcattgatttccggagacggttgtctgcaactggctgatgaactcaatgtcgatattcgtactatctatgctgcaaagcgccgtgcggaaaagaaaatgggggccgatatcaatacccttttccgattctcacattcgttataa

SEQ ID NO: 40991 - protein, 209 aa, Enterobacter cloacae
MKSLIYDYGRINCMSCPSQCELKPNASLRVSFCQDYCFCTWPEGSGYFSLGIMEGLLKQNYNNLYLGCIFVDFSISHLRFFTNERWIDYLIETKLKIVIVCDKYLKPLANYWFKHSKDIFLVIYQQDRLTLACEKLKKRFIYQRDAFFGGESLSELEFAVLSALISGDGCLQLADELNVDIRTIYAAKRRAEKKMGADINTLFRFSHSL

SEQ ID NO: 40992 - DNA, 990 bp, Salmonella infantis
  CDS (1)..(990): transl_table=11
atgaagtcgctcaataataattttgcaagagttacctgtatgagctgcccttctcattgtgaagttaagccaaatgcctctctacgggtttcattttgtcaggaatactgtttttgtacctggcctgaagccagtcgctatttctcactcggtatcatggagggtctccttaaacagcaatatcactacctgtatcttgggtgtgtttttgttgatttctctattagctatctgcgtttttttactgacaaaaaatggttggactatttatacgaaacaaaactaaagatagttctcgtttgcgataggcacctcagaccattggctaattactggtataagcatcacaaagatatttttttgattatttatcaacaggataatttaaagtctgctggtgataaattaaagaaaagatttatctatcagagagatgcgttttttcatggactatctctgtcaacgctcgagttcgatgtcctgggggcactgattgcgggtgaagattgtaaccatctggccagggggcgccatcttgatatccgtgcggtgtatgccgcaaagcgacgggcggagaagaaaatgggtgctgatatcaatacgccgtgcataataagccctacacaaattgggagatatatcatgaaaggctggctttttcttgttatcgcaatagttggcgaagtaatcgcaacatccgcattaaaatctagcgagggctttactaagcttgccccttccgccgttgtcataatcggttatggcatcgcattttattttctttctctggttctgaaatccatccctgtcggtgttgcttatgcagtctggtcgggactcggcgtcgtcataattacagccattgcctggttgcttcatgggcaaaagcttgatgcgtggggctttgtaggtatggggctcataattgctgcctttttgctcgcccgatccccatcgtggaagtcgctgcggaggccgacgccatggtga

SEQ ID NO: 40993 - protein, 329 aa, Salmonella infantis
MKSLNNNFARVTCMSCPSHCEVKPNASLRVSFCQEYCFCTWPEASRYFSLGIMEGLLKQQYHYLYLGCVFVDFSISYLRFFTDKKWLDYLYETKLKIVLVCDRHLRPLANYWYKHHKDIFLIIYQQDNLKSAGDKLKKRFIYQRDAFFHGLSLSTLEFDVLGALIAGEDCNHLARGRHLDIRAVYAAKRRAEKKMGADINTPCIISPTQIGRYIMKGWLFLVIAIVGEVIATSALKSSEGFTKLAPSAVVIIGYGIAFYFLSLVLKSIPVGVAYAVWSGLGVVIITAIAWLLHGQKLDAWGFVGMGLIIAAFLLARSPSWKSLRRPTPW

SEQ ID NO: 40994 - DNA, 663 bp, Kluyvera citrophila
  CDS (1)..(663): transl_table=11
atgaaattattaaattgcaaaagggaggggacaatgatgtcacgaaatattgattgcggaagaatcaactgtatgagctgcccttcaaactgtgaaataaaaccaaacgcttcattacgcgtatcattttgtcatgattactgcttttgtacctggccgggcagtggggattatttttcattgggcgtgatggaaggtattcttaaacaaacttataacaatctttatcttggctgtatatttgtagatttctcaataagctatcttcgacactttatggaaaaacgctggatagactatttaacggaaacaaaacttaaaatcgttatcgtttgtgataagtaccttagaccattggcaaactattggtttaaacatgataaagcgatctttctggtcatttatcccaacgataaagtggcgatatccagagataagctcagcaagcgagctatttatcaacgcgatgccttctttaagggggaggcgctgtctacgctggagttcgatgtcttgcgcgcgctgattgccggagagaactgtgagcaactggcagactcgttatccgtaaatatccggagaatatattccgcgaaacgccgggcggaaaagaaaatgggcgctgatattaatacgctgtttcgattttcacatgccatttaa

SEQ ID NO: 40995 - protein, 220 aa, Kluyvera citrophila
MKLLNCKREGTMMSRNIDCGRINCMSCPSNCEIKPNASLRVSFCHDYCFCTWPGSGDYFSLGVMEGILKQTYNNLYLGCIFVDFSISYLRHFMEKRWIDYLTETKLKIVIVCDKYLRPLANYWFKHDKAIFLVIYPNDKVAISRDKLSKRAIYQRDAFFKGEALSTLEFDVLRALIAGENCEQLADSLSVNIRRIYSAKRRAEKKMGADINTLFRFSHAI

SEQ ID NO: 40996 - DNA, 648 bp, Kluyvera ascorbata
  CDS (1)..(648): transl_table=11
atggataaggaggggacaatgaagtcgctcaataataattttgcaagagttacctgtatgagctgcccttctcattgtgaagttaagccaaatgcctctctacgggtttcattttgtcaggaatactgtttttgtacctggcctgaagccagtcgctatttctcactcggtatcatggagggtctccttaaacagcaatatcactacctgtatcttgggtgtgtttttgttgatttctctattagctatctgcgtttttttactgacaaaaaatggttggactatttatacgaaacaaaactaaagattgttctcgtttgcgataggcaactcagaccattggctaattactggtataagcatcacaaagatatttttttgattatttatcaacaggataatttaaagtctgctggtgagaaattaaagaaaagatttatctatcagagagatgcgttttttcatggactatctctgtcaacgctcgaattcgatgtcctgggggcactgattgcgggtgaaaattgtaaccatctggccagggggcgccatcttgatatccgtgcggtgtatgccgcaaagcgacgggcggagaagaaaatgggtgctgatatcaatacactgcttcgattttcgcactcatcataa

SEQ ID NO: 40997 - protein, 215 aa, Kluyvera ascorbata
MDKEGTMKSLNNNFARVTCMSCPSHCEVKPNASLRVSFCQEYCFCTWPEASRYFSLGIMEGLLKQQYHYLYLGCVFVDFSISYLRFFTDKKWLDYLYETKLKIVLVCDRQLRPLANYWYKHHKDIFLIIYQQDNLKSAGEKLKKRFIYQRDAFFHGLSLSTLEFDVLGALIAGENCNHLARGRHLDIRAVYAAKRRAEKKMGADINTLLRFSHSS

SEQ ID NO: 40998 - DNA, 693 bp, Escherichia coli
  CDS (61)..(693): transl_table=11
ttgacatcatcaataaccaatgaaattatgcaattatatacggatagggaggttcttaacatggggctttgtagtcgttataaaagtcttacatgcaatagttgctcaatgcattgccaaataatgccagaagagtcaccgcgtttgcagtattgcgcaaactcgtgtttttgtatgtggcccgaagaaagttcatattttaatcgtggtgtggtagaaggtatcttaacaaaaaaccacaatgcgagattaagcggatatatttttgtcgatttttcagtaagttttttacgtctattccttgaaaaagactggattgactatcttgcaagtactgacatggggattgttttagtcagcgaccgcaatatgcaatcgttagctaattactggcgaaaacacaactcagcaatatctgctgtcatatataatgatgatggtcttgatgttgccaatgaaaagatcagacaactatttattggtcgttatttatcatttaccggaggtaacacattaactcagatggaattcaccataatggggtatatggtttctggttataatccatatcagattgctgaagttctggatatggatatccgtagcatctacgcgtacaagcaacgaatcgaaaagagaatgggtggtaaaataaacgaattatttattcgttcacattcggtccaacattga

SEQ ID NO: 40999 - protein, 210 aa, Escherichia coli
MGLCSRYKSLTCNSCSMHCQIMPEESPRLQYCANSCFCMWPEESSYFNRGVVEGILTKNHNARLSGYIFVDFSVSFLRLFLEKDWIDYLASTDMGIVLVSDRNMQSLANYWRKHNSAISAVIYNDDGLDVANEKIRQLFIGRYLSFTGGNTLTQMEFTIMGYMVSGYNPYQIAEVLDMDIRSIYAYKQRIEKRMGGKINELFIRSHSVQH

SEQ ID NO: 41000 - DNA, 28 bp, Artificial sequence
  primer
atgacatcatcaataaccaatgaaatta

SEQ ID NO: 41001 - DNA, 26 bp, Artificial sequence
  primer
ttaatgttggaccgaatgtgaacgaa

SEQ ID NO: 41002 - protein, 187 aa, Artificial sequence
  consensus sequence
  Variant (2)..(2): Xaa in position 2 is any amino acid
  Variant (5)..(7): Xaa in position 5 to 7 is any amino acid
  Variant (9)..(11): Xaa in position 9 to 11 is any amino acid
  Variant (13)..(16): Xaa in position 13 to 16 is any amino acid
  Variant (18)..(20): Xaa in position 18 to 20 is any amino acid
  Variant (22)..(25): Xaa in position 22 to 25 is any amino acid
  Variant (27)..(28): Xaa in position 27 to 28 is any amino acid
  Variant (31)..(38): Xaa in position 31 to 38 is any amino acid
  Variant (40)..(41): Xaa in position 40 to 41 is any amino acid
  Variant (43)..(44): Xaa in position 43 to 44 is any amino acid
  Variant (46)..(54): Xaa in position 46 to 54 is any amino acid
  Variant (56)..(57): Xaa in position 56 to 57 is any amino acid
  Variant (63)..(65): Xaa in position 63 to 65 is any amino acid
  Variant (68)..(68): Xaa in position 68 is any amino acid
  Variant (70)..(73): Xaa in position 70 to 73 is any amino acid
  Variant (75)..(75): Xaa in position 75 is any amino acid
  Variant (77)..(77): Xaa in position 77 is any amino acid
  Variant (79)..(84): Xaa in position 79 to 84 is any amino acid
  Variant (87)..(89): Xaa in position 87 to 89 is any amino acid
  Variant (91)..(95): Xaa in position 91 to 95 is any amino acid
  Variant (101)..(106): Xaa in position 101 to 106 is any amino acid
  Variant (108)..(110): Xaa in position 108 to 110 is any amino acid
  Variant (113)..(114): Xaa in position 113 to 114 is any amino acid
  Variant (116)..(122): Xaa in position 116 to 122 is any amino acid
  Variant (124)..(127): Xaa in position 124 to 127 is any amino acid
  Variant (129)..(137): Xaa in position 129 to 137 is any amino acid
  Variant (139)..(140): Xaa in position 139 to 140 is any amino acid
  Variant (142)..(144): Xaa in position 142 to 144 is any amino acid
  Variant (147)..(154): Xaa in position 147 to 154 is any amino acid
  Variant (156)..(167): Xaa in position 156 to 167 is any amino acid
  Variant (170)..(172): Xaa in position 170 to 172 is any amino acid
  Variant (174)..(175): Xaa in position 174 to 175 is any amino acid
  Variant (177)..(177): Xaa in position 177 is any amino acid
  Variant (179)..(179): Xaa in position 179 is any amino acid
  Variant (181)..(183): Xaa in position 181 to 183 is any amino acid
  Variant (185)..(186): Xaa in position 185 to 186 is any amino acid
CXSCXXXCXXXPXXXXRXXXCXXXXFXXWPXXXXXXXXGXXEXXLXXXXXXXXXGXXFVDFSXXXLRXFXXXXWXDXLXXXXXXIVXXXDXXXXXLANYWXXXXXXIXXXIYXXDXXXXXXXKXXXXFXXXXXXXXXGXXLXXXEFXXXXXXXXGXXXXXXXXXXXXDIXXXYXXKXRXEXXXGXXI

SEQ ID NO: 41003 - protein, 60 aa, Artificial sequence
  protein pattern
  Variant (2)..(2): Xaa in position 2 is any amino acid
  Variant (3)..(4): Xaa in position 3 to 4 is any or no amino acid
  Variant (6)..(7): Xaa in position 6 to 7 is any or no amino acid
  Variant (9)..(9): Xaa in position 9 is Glu or Gln
  Variant (10)..(10): Xaa in position 10 is Ile, Leu or Val
  Variant (11)..(11): Xaa in position 11 is any amino acid
  Variant (13)..(13): Xaa in position 13 is Asp, Glu or Asn
  Variant (14)..(14): Xaa in position 14 is Ala, Glu or Ser
  Variant (15)..(15): Xaa in position 15 is Ala or Ser
  Variant (16)..(16): Xaa in position 16 is Leu, Pro or Val
  Variant (18)..(18): Xaa in position 18 is Leu or Val
  Variant (19)..(19): Xaa in position 19 is Gln or Ser
  Variant (20)..(20): Xaa in position 20 is Phe or Tyr
  Variant (22)..(22): Xaa in position 22 is any amino acid
  Variant (23)..(23): Xaa in position 23 is Asp, Glu or Asn
  Variant (24)..(24): Xaa in position 24 is any amino acid
  Variant (25)..(25): Xaa in position 25 is Ala or Cys
  Variant (27)..(27): Xaa in position 27 is Cys or Ser
  Variant (28)..(28): Xaa in position 28 is any amino acid
  Variant (31)..(31): Xaa in position 31 is Asp or Glu
  Variant (32)..(32): Xaa in position 32 is Ala, Glu or Gly
  Variant (33)..(33): Xaa in position 33 is Asn or Ser
  Variant (34)..(34): Xaa in position 34 is any amino acid
  Variant (35)..(35): Xaa in position 35 is Phe or Tyr
  Variant (36)..(36): Xaa in position 36 is Phe or Leu
  Variant (37)..(38): Xaa in position 37 to 38 is any amino acid
  Variant (40)..(40): Xaa in position 40 is Phe, Ile or Val
  Variant (41)..(41): Xaa in position 41 is Ile, Met or Val
  Variant (43)..(43): Xaa in position 43 is any amino acid
  Variant (44)..(44): Xaa in position 44 is Ile or Leu
  Variant (46)..(47): Xaa in position 46 to 47 is any amino acid
  Variant (48)..(48): Xaa in position 48 is Asn, Gln or Arg
  Variant (49)..(49): Xaa in position 49 is His or Tyr
  Variant (50)..(54): Xaa in position 50 to 54 is any amino acid
  Variant (56)..(56): Xaa in position 56 is any amino acid
  Variant (57)..(57): Xaa in position 57 is Ile or Val
SXXXSXXCXXXPXXXXRXXXCXXXXFXXWPXXXXXXXXGXXEXXLXXXXXXXXXGXXFVD

SEQ ID NO: 41004 - protein, 61 aa, Artificial sequence
  protein pattern
  Variant (3)..(3): Xaa in position 3 is Phe, Ile or Val
  Variant (4)..(4): Xaa in position 4 is Pro or Ser
  Variant (5)..(5): Xaa in position 5 is any amino acid
  Variant (8)..(8): Xaa in position 8 is any or no amino acid
  Variant (10)..(13): Xaa in position 10 to 13 is any amino acid
  Variant (14)..(14): Xaa in position 14 is any or no amino acid
  Variant (16)..(16): Xaa in position 16 is Ala, Ile or Leu
  Variant (18)..(18): Xaa in position 18 is any amino acid
  Variant (20)..(20): Xaa in position 20 is any amino acid
  Variant (21)..(21): Xaa in position 21 is Asp, Glu or Ser
  Variant (22)..(22): Xaa in position 22 is Ser or Thr
  Variant (23)..(23): Xaa in position 23 is any amino acid
  Variant (24)..(24): Xaa in position 24 is Leu or Met
  Variant (25)..(25): Xaa in position 25 is any amino acid
  Variant (28)..(28): Xaa in position 28 is Ile or Leu
  Variant (29)..(29): Xaa in position 29 is Ile or Val
  Variant (30)..(30): Xaa in position 30 is Cys or Ser
  Variant (32)..(32): Xaa in position 32 is Lys or Arg
  Variant (33)..(33): Xaa in position 33 is any amino acid
  Variant (34)..(34): Xaa in position 34 is Leu or Met
  Variant (35)..(35): Xaa in position 35 is any amino acid
  Variant (36)..(36): Xaa in position 36 is Pro or Ser
  Variant (42)..(43): Xaa in position 42 to 43 is any amino acid
  Variant (44)..(44): Xaa in position 44 is His or Lys
  Variant (45)..(47): Xaa in position 45 to 47 is any amino acid
  Variant (49)..(49): Xaa in position 49 is any amino acid
  Variant (50)..(50): Xaa in position 50 is Ala, Gly or Leu
  Variant (51)..(51): Xaa in position 51 is Ile or Val
  Variant (54)..(54): Xaa in position 54 is Asn, Pro, Gln or Ser
  Variant (55)..(55): Xaa in position 55 is Asp, Asn or Gln
  Variant (57)..(60): Xaa in position 57 to 60 is any amino acid
  Variant (61)..(61): Xaa in position 61 is Ala, Gln or Ser
FSXXXLRXFXXXXXWXDXLXXXXXXIVXXXDXXXXXLANYWXXXXXXIXXXIYXXDXXXXX

SEQ ID NO: 41005 - protein, 54 aa, Artificial sequence
  protein pattern
  Variant (2)..(7): Xaa in position 2 to 7 is any or no amino acid
  Variant (9)..(9): Xaa in position 9 is Asn, Ser or Thr
  Variant (10)..(11): Xaa in position 10 to 11 is any amino acid
  Variant (14)..(14): Xaa in position 14 is any amino acid
  Variant (15)..(15): Xaa in position 15 is Ile, Leu or Val
  Variant (16)..(16): Xaa in position 16 is Leu or Met
  Variant (17)..(18): Xaa in position 17 to 18 is any amino acid
  Variant (19)..(19): Xaa in position 19 is Phe, Leu or Met
  Variant (20)..(20): Xaa in position 20 is Ile or Val
  Variant (21)..(21): Xaa in position 21 is Ala or Ser
  Variant (23)..(23): Xaa in position 23 is any amino acid
  Variant (24)..(24): Xaa in position 24 is Asp, Gly, Asn or Ser
  Variant (25)..(27): Xaa in position 25 to 27 is any amino acid
  Variant (28)..(28): Xaa in position 28 is Ile or Leu
  Variant (29)..(29): Xaa in position 29 is Ala or Val
  Variant (30)..(30): Xaa in position 30 is Asp, Glu, Asn or Arg
  Variant (31)..(33): Xaa in position 31 to 33 is any amino acid
  Variant (34)..(34): Xaa in position 34 is Ile, Leu, Met or Val
  Variant (37)..(37): Xaa in position 37 is Lys or Arg
  Variant (38)..(38): Xaa in position 38 is any amino acid
  Variant (39)..(39): Xaa in position 39 is Ile, Leu or Val
  Variant (41)..(41): Xaa in position 41 is Ala or Val
  Variant (42)..(42): Xaa in position 42 is any amino acid
  Variant (44)..(44): Xaa in position 44 is any amino acid
  Variant (46)..(46): Xaa in position 46 is Ala, Ile or Leu
  Variant (48)..(48): Xaa in position 48 is any amino acid
  Variant (49)..(49): Xaa in position 49 is Lys or Arg
  Variant (50)..(50): Xaa in position 50 is Leu or Met
  Variant (52)..(53): Xaa in position 52 to 53 is any amino acid
SXXXXXXLXXXEFXXXXXXXXGXXXXXXXXXXXXDIXXXYXXKXRXEXXXGXXI

SEQ ID NO: 41006 - DNA, 585 bp, Escherichia coli
  CDS (1)..(585): transl_table=11
atgcttatgtctatacagaacgaaatgcctggttacaacgaaatgaaccagtatctgaaccaacaagggacgggtctgaccccagctgagatgcatggtttaatcagcgggatgatatgtggcggtaacgatgacagctcatggctaccgctacttcacgacctgacgaacgaaggcatggctttcggtcatgagctggcacaggcactgcgtaaaatgcactctgccaccagcgatgccctgcaggatgacggcttcctttttcagctttatctgcctgatggcgatgatgtcagcgttttcgatcgggctgatgcattggcaggttgggtcaatcacttcctgcttggtcttggcgttacgcaaccgaagctggataaagtgaccggcgaaaccggtgaagctatcgacgatctgcgtaacattgcgcaactgggttacgacgaagacgaagatcaggaagagcttgaaatgtcgcttgaagagatcatcgaatacgttcgtgttgccgcgctgttatgccacgacacctttactcatccgcaaccgaccgcgccagaagtacaaaaaccgactctacactaa

SEQ ID NO: 41007 - protein, 194 aa, Escherichia coli
MLMSIQNEMPGYNEMNQYLNQQGTGLTPAEMHGLISGMICGGNDDSSWLPLLHDLTNEGMAFGHELAQALRKMHSATSDALQDDGFLFQLYLPDGDDVSVFDRADALAGWVNHFLLGLGVTQPKLDKVTGETGEAIDDLRNIAQLGYDEDEDQEELEMSLEEIIEYVRVAALLCHDTFTHPQPTAPEVQKPTLH

SEQ ID NO: 41008 - DNA, 585 bp, Salmonella enterica subsp. enterica serovar Typhi Ty2
  CDS (1)..(585): transl_table=11
atgcttatgtctatacagaacgaaatgcctggttacgacgaaatgaaccggtttttgaatcaacaaggggccggtctgaccccggctgaaatgcatggtttaatcagcgggatgatttgcggcggcaacaacgacagctcatggcagccgctgttgcatgacctgacgaacgaaggtctggccttcgggcatgagcttgctcaggcgctgcgcaaaatgcacgcggcgaccagcgacgcgctggaagacgacggctttctttttcagctttatctgcctgaaggcgacgatgtcagcgtattcgatcgcgcagatgcattagccgggtgggttaaccactttttgcttggcctcggcgtaacgcagcctaaacttgataaagtcaccggcgaaacgggtgaagcgattgacgacctgcgtaatattgcgcagcttggttatgatgagagcgaagatcaggaagagctggagatgtcgctcgaagagatcatcgaatatgtccgtgttgcggcgctgttatgtcatgacactttcacgcgccaacagccgaccgcgccggaagtgcgtaaaccgacgctacactaa

SEQ ID NO: 41009 - protein, 194 aa, Salmonella enterica subsp. enterica serovar Typhi Ty2
MLMSIQNEMPGYDEMNRFLNQQGAGLTPAEMHGLISGMICGGNNDSSWQPLLHDLTNEGLAFGHELAQALRKMHAATSDALEDDGFLFQLYLPEGDDVSVFDRADALAGWVNHFLLGLGVTQPKLDKVTGETGEAIDDLRNIAQLGYDESEDQEELEMSLEEIIEYVRVAALLCHDTFTRQQPTAPEVRKPTLH

SEQ ID NO: 41010 - DNA, 552 bp, Haemophilus ducreyi 35000HP
  CDS (1)..(552): transl_table=11
atggctattacacattcaaatgaatttaaccatttaattgcagagcttgaaataactgaaacagcagcagaattacacggttttttaagcggtttagttgcgggtggcgtgcaagatgaatcttggaaaacactttgctaccagtttttaaatgacggtcatgcattttcccaacagccactcaaccgtttagcggtattttatcagcaattaagtgaaaattttaaccaagcaaacacgcttttttctgtttggatccccccgcataaagatggctttgctttagctgatgctattgctgattggacaaatcaatttttattaggattggggctagctcagcctaaattaagtcgagaaattgatgaaattggcgaagcattagatgatttggaagagatcgctaaattaggttaccagcaagatgataataatgatgaattattagatgcgggcgaagaagttttagaatatttaagtgtattagcccttttcttacatagtcattttggattagggcaaaaaccacttgaaaaattaccgcttcattag

SEQ ID NO: 41011 - protein, 183 aa, Haemophilus ducreyi 35000HP
MAITHSNEFNHLIAELEITETAAELHGFLSGLVAGGVQDESWKTLCYQFLNDGHAFSQQPLNRLAVFYQQLSENFNQANTLFSVWIPPHKDGFALADAIADWTNQFLLGLGLAQPKLSREIDEIGEALDDLEEIAKLGYQQDDNNDELLDAGEEVLEYLSVLALFLHSHFGLGQKPLEKLPLH

SEQ ID NO: 41012 - DNA, 588 bp, Erwinia carotovora subsp. atroseptica SCRI1043
  CDS (1)..(588): transl_table=11
atgtctatagagaatacgtttcctgcctatgaaggccttaaccaactgcttcaccaacagcaagtcgcgctgaccgcagcagaaatgcacggcttgatcagcggtatgctgtgtggtggaaaccatgacgacagttggagaacgctggtttttgaactgaccaatgaaggtatggcgtttactcaaacgctgtctcagccgcttcaggacctgtatcaagccacgcgagatgcactggaagatgatggcttcatgtttcagcttttcctgccagatgattcactggacgaggtgagcgtcttcgatcgcgccgatgcgttggcaggctgggttaaccactttctgcttggcctgggcgtcattcagccgaagttgaacaaggttaaaggcgagctgaaagaagctatcgaagatttacgcaacatcgcacagcttggctatgacgaagatgaagatcaggaagagctggagcaatcaatggaagaagtaattgagtatgttcgcgtttctgccattttgtgccataccgaatttaccaaccaacgcgttgtgacggcacccgaacagcaaaagccaacgctgcattga

SEQ ID NO: 41013 - protein, 195 aa, Erwinia carotovora subsp. atroseptica SCRI1043
MSIENTFPAYEGLNQLLHQQQVALTAAEMHGLISGMLCGGNHDDSWRTLVFELTNEGMAFTQTLSQPLQDLYQATRDALEDDGFMFQLFLPDDSLDEVSVFDRADALAGWVNHFLLGLGVIQPKLNKVKGELKEAIEDLRNIAQLGYDEDEDQEELEQSMEEVIEYVRVSAILCHTEFTNQRVVTAPEQQKPTLH

SEQ ID NO: 41014 - DNA, 594 bp, Mannheimia succiniciproducens MBEL55E
  CDS (1)..(594): transl_table=11
atgatagaatggcgttatcttattcaagacaataacagtgaactaaatatgatttcttattcaagtttaaatcaacaacttaaaagtgccgatatcggcgcaaccgcttccgaattgcacgggttattaagcggtttaatttgcggtggcattaatgacgacagctggcaaccgttactttatcaatttaccaacgataaccatgcgtatcccatcgctttattaaatgaaatcaaagaaatttatcaggatatcgggcaaaaacttgcggatatggataatttttcttttgaattatggctgccggaagataatgaggtttttgcgcgggcggatgcgttgtcggaatggacaaataattttttgctcggtttagggttggcacagcccaaactggataaagaaaccgatgaaatcggcgaggcgcttgacgatttacatgacatttgccagcttgggtatgacgaagaagataacgaagaagatctgagcgacgctttggaagaaattatagaatatgtgcgcaccattgcttcattattctatacccatttccatcgtccgcaagcacaagaaaaacctgttttacattag

SEQ ID NO: 41015 - protein, 197 aa, Mannheimia succiniciproducens MBEL55E
MIEWRYLIQDNNSELNMISYSSLNQQLKSADIGATASELHGLLSGLICGGINDDSWQPLLYQFTNDNHAYPIALLNEIKEIYQDIGQKLADMDNFSFELWLPEDNEVFARADALSEWTNNFLLGLGLAQPKLDKETDEIGEALDDLHDICQLGYDEEDNEEDLSDALEEIIEYVRTIASLFYTHFHRPQAQEKPVLH

SEQ ID NO: 41016 - DNA, 537 bp, Methylococcus capsulatus str. Bath
  CDS (1)..(537): transl_table=11
atgcacgagagtccttcgtatgaggaaatccaggcgatattcctcaatcatcacgttcctgccagtgccgccgaagcccacggcacgctggcgggccttttgtgcgtcgacggccggctcgattgcgggcagtggctgaacgccgtgttcggtgaagacaaggcgggactggctccggacgagcgggcgtcttgcgaaaccctctgcaagcggacgcgcgagcaactggatgctttcgacttcagcttcgaactgtacctgccggacgatgaccatccgatgaccgaccgcgcccgcgcattgggggaatggtgccagggattcctgtacggtctgggctataagctcggcggcagcgactggcccggcgagtgccgcgaggtgctcgacgacatcctccagctttcccgtctcgacgccgaacacgcggatgaaaccgacgaggaggcctatgcggagctgaccgaattcgtccgcgcgggggttcaactcgtccgcagcgagttcgagcagaatgcctctccccaactccactga

SEQ ID NO: 41017 - protein, 178 aa, Methylococcus capsulatus str. Bath
MHESPSYEEIQAIFLNHHVPASAAEAHGTLAGLLCVDGRLDCGQWLNAVFGEDKAGLAPDERASCETLCKRTREQLDAFDFSFELYLPDDDHPMTDRARALGEWCQGFLYGLGYKLGGSDWPGECREVLDDILQLSRLDAEHADETDEEAYAELTEFVRAGVQLVRSEFEQNASPQLH

SEQ ID NO: 41018 - DNA, 570 bp, Pseudomonas syringae pv. syringae B728a
  CDS (1)..(570): transl_table=11
atgcccattcagaattctccgtacaaagcgttcgccactctgctcaatagcggtggccataaagtatcccctgccgaactgcacggcctgctgttgggccgcagttgcgcgggtgccggcttcgatagcgaaggctggttcgccgacgcctcgatgctgctggaaaccgagctgctggaaaccgagccgcaagaaaacattcgtgcagcgcttgtcggcctgcaagagatggtcaagggcgaactcaccggcgatgacatgacggtcgtgctgttgctgccgggcgatgatgagccgctcaccgagcgcgccgccgcgctgggccagtggtgtcagggtttcctcgcaggctttggcctgtccatcggtgacaaggttctgggcagcgaagcgaaagccgtgctcgaggacctggctgccatcgcgcaggttcaggacgcgctggaagagtccgaagacggcgaaaccgactacatggaagtcatggagtacatgcgtgtagcgccgctgctgctgttcactgaattcaacgagccgtccgcgccgcaacccaagccttccctgcactga

SEQ ID NO: 41019 - protein, 189 aa, Pseudomonas syringae pv. syringae B728a
MPIQNSPYKAFATLLNSGGHKVSPAELHGLLLGRSCAGAGFDSEGWFADASMLLETELLETEPQENIRAALVGLQEMVKGELTGDDMTVVLLLPGDDEPLTERAAALGQWCQGFLAGFGLSIGDKVLGSEAKAVLEDLAAIAQVQDALEESEDGETDYMEVMEYMRVAPLLLFTEFNEPSAPQPKPSLH

SEQ ID NO: 41020 - DNA, 558 bp, Pseudomonas fluorescens Pf-5
  CDS (1)..(558): transl_table=11
atgcccattcagaattccccgtacaacgccttcgccaccctgctcagcagcagcggtcatcctgtttctcctgccgagctgcacggcctgttgctgggtcgcagctgcgccggcgccggcttcgaagtcgacggctggctggtggacgccgccgaactgctcgaaggcgagccgcaagacaacgtgcgcagcgccttgatcggcctgcaggagatggtcaagggcgagctcaccagcgatgacatgaccgtggtcctgctgctgcccagcgacgacgcccccctggccgagcgtgccgctgccctgggccagtggtgccagggcttcctcgccggtttcggcctcaactcccgcgacagcagtgcccttagcgtcgaggccacggaagtgttgcaggaccttgcagccattgctcaggtccaggacgcgctggaggaatccgatgacggtgaaagcgactacatggaagtgatggagtacctgcgggttgcgcctctgctgctattcaccgagaccaacaagactgttgcgccggctgccaagccttctctgcactga

SEQ ID NO: 41021 - protein, 185 aa, Pseudomonas fluorescens Pf-5
MPIQNSPYNAFATLLSSSGHPVSPAELHGLLLGRSCAGAGFEVDGWLVDAAELLEGEPQDNVRSALIGLQEMVKGELTSDDMTVVLLLPSDDAPLAERAAALGQWCQGFLAGFGLNSRDSSALSVEATEVLQDLAAIAQVQDALEESDDGESDYMEVMEYLRVAPLLLFTETNKTVAPAAKPSLH

SEQ ID NO: 41022 - DNA, 603 bp, Colwellia psychrerythraea 34H
  CDS (1)..(603): transl_table=11
atgactgaaataacctcaaataacgataccgacaaaaacttaatcgactttgctacgatgcaagccattttgaccagcgaagatgtgaagtcccatgccagtgaacttcatggtgtattaacagggttagtttgtgctggttttgaatttgaagatcaaggttatgtagccatgctgcatgatttattcaatgagggtgatggctttccaacggcagtaaaaaaagcactcaagcaaatgtatagtgaattgtggagcagcatcttagatgacagttatagttttaaccttttacttcccgatgatgatgactctatagctgaacgtggtcatgccttaagtgtatgggtacaaggttttaacttaggctttggtttacagcaaaaagatagcccagttgtttctgacgaagttaaagaagtactgactgattttggcgaaattgctaacttatctgatgacatggaagaagatgaagatactgagcaagcgtattttgaaattggggaatatgttcgaatctctgctttattatgttttagtgaactagcaacaccgccaaataatgaaagcaataacgaagataaaaagataattcactaa

SEQ ID NO: 41023 - protein, 200 aa, Colwellia psychrerythraea 34H
MTEITSNNDTDKNLIDFATMQAILTSEDVKSHASELHGVLTGLVCAGFEFEDQGYVAMLHDLFNEGDGFPTAVKKALKQMYSELWSSILDDSYSFNLLLPDDDDSIAERGHALSVWVQGFNLGFGLQQKDSPVVSDEVKEVLTDFGEIANLSDDMEEDEDTEQAYFEIGEYVRISALLCFSELATPPNNESNNEDKKIIH

SEQ ID NO: 41024 - DNA, 555 bp, Pseudomonas syringae pv. phaseolicola 1448A
  CDS (1)..(555): transl_table=11
atgcccattcagaattctccgtacaaagcgttcgccactctgcttaacagtggcggtcaccaggtatcccctgccgagctgcatggcctgctgctggggcgtagttgcgcaggtgccggtttcgacaacgaaggctggtttgccgatgcttcggtgctgctggaaaccgagccgcaagacaatatccgccaggcgctcatcggcttgcaagagatggtcaagggcgaactcaccggtgacgacatgaccgtcgtgctgttgctgccgggcgacgatgagcctctgaccgagcgtgctgccgcgctgggccaatggtgtcaggggtttctggcaggcttcggtctggccattggcgacaagacgctcggcactgaagccaaggatgttcttgaggatctggcggccattgcccaggtgcaggatgcactggacgagtccgaagacggcgagaccgactatatggaagtcatggaatacatgcgcgtagcgccattgttgctcttcaccgaattcaatgagcctgctgcgccgcaacccaagccttctctgcactga

SEQ ID NO: 41025 - protein, 184 aa, Pseudomonas syringae pv. phaseolicola 1448A
MPIQNSPYKAFATLLNSGGHQVSPAELHGLLLGRSCAGAGFDNEGWFADASVLLETEPQDNIRQALIGLQEMVKGELTGDDMTVVLLLPGDDEPLTERAAALGQWCQGFLAGFGLAIGDKTLGTEAKDVLEDLAAIAQVQDALDESEDGETDYMEVMEYMRVAPLLLFTEFNEPAAPQPKPSLH

SEQ ID NO: 41026 - DNA, 561 bp, Pseudomonas fluorescens PfO-1
  CDS (1)..(561): transl_table=11
atgcccattcagaattccccgtaccaaggcttcgccaccctgctaaattccagcggtcactccgtttcgcctgccgaactgcacggcctgttgctcggtcgcagttgtgccggcgccggcttcaatgccgaagaatggctgatcgatgccgccgagctgcttgaaagcgagccgcaggacaacgttcgcaacgcgctgatcggcctgcaggaaatggtcaagagcgaactcaccggcgacgacgtcaccgtggttctgctgctgccgaacgatgacgcacctctggccgagcgcgccgccgcgctgggcgaatggtgccagggcttcctcaccggtttcggcctgaactgccgcgacagcagcatgctgagcaccgaagctaccgaagtgttgcaggatttggcagcgatctcccaggtgcaagacgccctggaagaatccgaagacggcgaaagcgattacatggaagtcatggagtacctgcgtgtcgcgccgctgctgttgttctccgaaaccaaaaaggccgacgtgccgccagcggccaagccgtcgctgcactga

SEQ ID NO: 41027 - protein, 186 aa, Pseudomonas fluorescens PfO-1
MPIQNSPYQGFATLLNSSGHSVSPAELHGLLLGRSCAGAGFNAEEWLIDAAELLESEPQDNVRNALIGLQEMVKSELTGDDVTVVLLLPNDDAPLAERAAALGEWCQGFLTGFGLNCRDSSMLSTEATEVLQDLAAISQVQDALEESEDGESDYMEVMEYLRVAPLLLFSETKKADVPPAAKPSLH

SEQ ID NO: 41028 - DNA, 594 bp, Saccharophagus degradans 2-40
  CDS (1)..(594): transl_table=11
atgagtaacctttttgatttcgcgtttttaaacgaccaaatgttgtccatgggcgcggttaactccgtgtccgaattgcagggtttgctgtgtggctatttgagcggcaagcaggccaaggtaggcccagaggcggtgctcgacacggccgcatggcgaatgttggcggtggagtacatggagctggccgattttgatttagaagaagatcgcctcgcattatttgatttactattagaaaaaacacgcaacgccttggtggatacgcagcttggttttcaacccttattgccaagtgatgatgtcggcatagtgcgcagggccgaggaactaggcgcgtggtgcaccggctttttacacggtttgggccgctcggggttagagggcagcgatgcctttagtaccgatgccgccgatgccattaaagatttagcccacatagcgcaaataagtgccgaagtggacgagctggaagaaaacgaagtgtattggtttgaattggtggaatacgtaaaagtagccgtgttatgcgtttactccgaacttgccgccaaagcgccaaaacctgcgggagacgcaggcctagtgcattga

SEQ ID NO: 41029 - protein, 197 aa, Saccharophagus degradans 2-40
MSNLFDFAFLNDQMLSMGAVNSVSELQGLLCGYLSGKQAKVGPEAVLDTAAWRMLAVEYMELADFDLEEDRLALFDLLLEKTRNALVDTQLGFQPLLPSDDVGIVRRAEELGAWCTGFLHGLGRSGLEGSDAFSTDAADAIKDLAHIAQISAEVDELEENEVYWFELVEYVKVAVLCVYSELAAKAPKPAGDAGLVH

SEQ ID NO: 41030 - DNA, 558 bp, Haemophilus somnus 129PT
  CDS (1)..(558): transl_table=11
atgtcagaaaaacctcttatttattcggaatttaatcaacaactgaaacaagcaaatattgcattaacggtggctgaattgcatggttttcttaccggtttaatttgcggtggtattacagatcaacgttggcagtatcttctttatcaatttacaaatgatgatcatgcgtatcccacttccttattgaaagaagtggaacaaatttatcagaaaattgaccgcactttatccgatattgataaatttaattttgagctttggttaccggaagaagacaatgtttttgctcgagctgatgctctgtcggaatggaccaaccattttttattaggattagggctaaatcagcctaatttaaataaagaggtaggcgaaatcggcgaagcactggatgatttacaagctattggacaacttggatatgatgaaaaagatgatcaagaggagttatctaaagcattagaagaaattattgaatatgtgagaacgattacctttttattctttaatcacttcggactattatcggaaacaaagacaaccgtattacattag

SEQ ID NO: 41031 - protein, 185 aa, Haemophilus somnus 129PT
MSEKPLIYSEFNQQLKQANIALTVAELHGFLTGLICGGITDQRWQYLLYQFTNDDHAYPTSLLKEVEQIYQKIDRTLSDIDKFNFELWLPEEDNVFARADALSEWTNHFLLGLGLNQPNLNKEVGEIGEALDDLQAIGQLGYDEKDDQEELSKALEEIIEYVRTITFLFFNHFGLLSETKTTVLH

SEQ ID NO: 41032 - DNA, 576 bp, Shewanella sp. MR-4
  CDS (1)..(576): transl_table=11
atggcgacccctccttcgttacgcatcgacagcttaaaaatcgccctcgatgcggctgaaattggtcagcatcccgtggaagtgcacggtgcccttgtgggtttaatctgcggtggcgtagagcaaaccggcgatctgtggattaaaccgttatttgacctgatgaatgatggtcagcccttacccgcacctctgcatcaattggtgtgtgagttgttccaagactcggttgcccgtttgagtgactttgattttggttttatgccattgcttcccgaagaggaagagccgttaagtcaacgggttgaggccttgtccctgtggacgcaaagcttcttaacgggcattgccattatccagcctaagctgaataaagcctcggccgaagtgcgtgaagtgatcaaagatctggccgagatcgcccaagtggaatttgatgttgccgatgatgaagaatcggaaacggcttacacagagttgctggaatttgtgcgtattgccgccattttgtgttactccgagtttggccctgagccgagccacggagagggcgacgatcccgcggtgatccattaa

SEQ ID NO: 41033 - protein, 191 aa, Shewanella sp. MR-4
MATPPSLRIDSLKIALDAAEIGQHPVEVHGALVGLICGGVEQTGDLWIKPLFDLMNDGQPLPAPLHQLVCELFQDSVARLSDFDFGFMPLLPEEEEPLSQRVEALSLWTQSFLTGIAIIQPKLNKASAEVREVIKDLAEIAQVEFDVADDEESETAYTELLEFVRIAAILCYSEFGPEPSHGEGDDPAVIH

SEQ ID NO: 41034 - DNA, 576 bp, Alkalilimnicola ehrlichei MLHE-1
  CDS (1)..(576): transl_table=11
atgcgcctggaagcagcctacgacgacctgcaggaagccctcgcagctattaacgccagcagccacccggccgaggcccacggtgtgctctgtggcatgagcgccctgcccgacggcgccgacaaggcgcgttggatcgcgcaggtgctgagcggcacccaacccagcggcgacgccgccaaacgggtcctggccctgctcgccggcctctatgaccaggtgcaaagccagctcgacgataaggacctggccttcgacctgctcctcccccctgacgaggaggccctggaggtgcgcgccgatgcgctttcccagtggtgccagggttttctctacggcctgggcgtggccggcctcccggagctcagcgaactgcccacggacgtgcgcgaggtgctcacggacctgggtgagatcgcccgggtggaactggaccccgagtccaccgaggacaacgagtccgcctacgcggagctggtggaatatgtccgtgtcgccgccctgctggtgcgcgacaacctccacccactgaaacccgacgccggccccgccccggacaaatccaccctgcactga

SEQ ID NO: 41035 - protein, 191 aa, Alkalilimnicola ehrlichei MLHE-1
MRLEAAYDDLQEALAAINASSHPAEAHGVLCGMSALPDGADKARWIAQVLSGTQPSGDAAKRVLALLAGLYDQVQSQLDDKDLAFDLLLPPDEEALEVRADALSQWCQGFLYGLGVAGLPELSELPTDVREVLTDLGEIARVELDPESTEDNESAYAELVEYVRVAALLVRDNLHPLKPDAGPAPDKSTLH

SEQ ID NO: 41036 - DNA, 558 bp, Haemophilus somnus 2336
  CDS (1)..(558): transl_table=11
atgtcagaaaaacctcttatttattcggaatttaatcaacaactgaagcaagcaaatattgcattaacggtggctgaattgcatggttttcttaccggtttaatttgcggtggtattacagatcaacgttggcagtatcttctttatcaatttacaaatgatgatcatgcgtatcccacttccttattgaaagaagtggaacaaatttatcagaaaattgaccgcactttatccgatattgataaatttaattttgagctttggttaccggaagaagataatgtttttgctcgagctgatgctctgtcggaatggaccaaccattttttattaggattagggctaaatcagcctaatttaaataaagaggtaggcgaaatcggcgaagcactggatgatttacaagctattggacaacttggatatgatgaaaaagatgatcaagaggagttgtctaaagcattagaagaaattattgaatatgtgagaacgattacctttttattctttaatcacttcggaccattatcggaaacaaagaaaaccgtattacattag

SEQ ID NO: 41037 - protein, 185 aa, Haemophilus somnus 2336
MSEKPLIYSEFNQQLKQANIALTVAELHGFLTGLICGGITDQRWQYLLYQFTNDDHAYPTSLLKEVEQIYQKIDRTLSDIDKFNFELWLPEEDNVFARADALSEWTNHFLLGLGLNQPNLNKEVGEIGEALDDLQAIGQLGYDEKDDQEELSKALEEIIEYVRTITFLFFNHFGPLSETKKTVLH

SEQ ID NO: 41038 - DNA, 552 bp, Actinobacillus pleuropneumoniae serovar 1 str. 4074
  CDS (1)..(552): transl_table=11
atggctattacacaatcaaccgaatttaatcaattaattgcgcagcttcaaatcgccgaaagcgccgcggaagtgcatggatttttaagcggattaattgcgggcggcgtacaggacgaatcttggaaaaccctaacgtatcaatttttaaatgacgggcatgctttttcacaagctcctttagcggagttgagtgccttttaccgacaattgagcgaaagttttgacgaagccaataccttattttcgctttggactccgcataatgaagatggtttcgccgtggcggacgctatagccgactggaccagccaattcttattaggtttagggctcgcgcaacctaaattaagccgcgaaacggatgaaatctgcgaagcgttagatgatttagaagaaatatccaaattaggttacaatgaagacgatgataataacgagttgttggaagccggagaagaagtggtcgagtaccttagagtattaacgcttttcttacacagtcattttgccttaaacgtaaaaacaagcgagaaacctcaacttcactaa

SEQ ID NO: 41039 - protein, 183 aa, Actinobacillus pleuropneumoniae serovar 1 str. 4074
MAITQSTEFNQLIAQLQIAESAAEVHGFLSGLIAGGVQDESWKTLTYQFLNDGHAFSQAPLAELSAFYRQLSESFDEANTLFSLWTPHNEDGFAVADAIADWTSQFLLGLGLAQPKLSRETDEICEALDDLEEISKLGYNEDDDNNELLEAGEEVVEYLRVLTLFLHSHFALNVKTSEKPQLH

SEQ ID NO: 41040 - DNA, 549 bp, Haemophilus influenzae R2866
  CDS (1)..(549): transl_table=11
atgcttatttcttattccgaccttaaccaacaacttaaatctgctggaatcggctttaatgcaacagaactacacggttttttaagcggtttactttgtggtggattaaaagatcaaagttggctaccgctcttatatcaattcagcaatgataatcacgcttacccaacaggattagttcaacccgttacagaactttatgaacaaattagtcaaaccttatcagatgttgaaggatttacctttgaacttggtttaagtgaaaatgaaaatgtctttgcacaagcagatagcctatctgactgggcaaaccaattcttacttggtcttggcttagcacaacctaaattagcaaaagaaaaaggtgaaattggcgaagccgtagatgatttacaagatatttgccaacttggttatgatgaagatgataacgaagaagaactagcggaagcgctagaagaaatcattgaatatgttcgcaccattgcaatgttattctattctcatttcaacgaagaagaaattgagagcaaacctgtattacattaa

SEQ ID NO: 41041 - protein, 182 aa, Haemophilus influenzae R2866
MLISYSDLNQQLKSAGIGFNATELHGFLSGLLCGGLKDQSWLPLLYQFSNDNHAYPTGLVQPVTELYEQISQTLSDVEGFTFELGLSENENVFAQADSLSDWANQFLLGLGLAQPKLAKEKGEIGEAVDDLQDICQLGYDEDDNEEELAEALEEIIEYVRTIAMLFYSHFNEEEIESKPVLH

SEQ ID NO: 41042 - DNA, 567 bp, Pseudoalteromonas tunicata D2
  CDS (1)..(567): transl_table=11
atgatcgaaaacctcacctaccaagaagcacagttgctgctcgaaaaacatcaagtgtttgttatgccctcagaagtacatggcgttattagcggtctacttgcctgcggccttgaaattgaaagtactgagtatttatctttattaagtgatgtatttaatgaaggtcaggcttttcaaactgagttaaaaacgtttttagttgaactttataagcaagtcaccagcaaattaagcgaccgcgaattacattttgaattgtatttacccgatgacgacgaatcattagccgaccaagctaatgcggtagttgcttggattgccggttttttactggggtttggtttaaaacaaaaagattacggccgtttgtcagacgatgtcaaagaagtgatccaagattttactgagatcagtaaacttgatacccattttgatgagaccgaagaagacagccaaagtttatatgaaatcattgaatatgtgcgtatttcaaccttgttatgttttgccgaattaggtgaaaaacaagtcacaagtacaccgactaataaaacgattcattaa

SEQ ID NO: 41043 - protein, 188 aa, Pseudoalteromonas tunicata D2
MIENLTYQEAQLLLEKHQVFVMPSEVHGVISGLLACGLEIESTEYLSLLSDVFNEGQAFQTELKTFLVELYKQVTSKLSDRELHFELYLPDDDESLADQANAVVAWIAGFLLGFGLKQKDYGRLSDDVKEVIQDFTEISKLDTHFDETEEDSQSLYEIIEYVRISTLLCFAELGEKQVTSTPTNKTIH

SEQ ID NO: 41044 - DNA, 579 bp, Photobacterium sp. SKA34
  CDS (1)..(579): transl_table=11
atgagtgaaataaccctacctacataccaagctgttgaatctgcgttaaaagagcaagggcttgcagcggcacctgctgaattacatggtttattaagtggcatgatttgcggtggtttagcgattgatgatgagagctgggttgggcctgtgagtgattatgccaacgaaggtgaaccattaaccgatggtgctaaaacaatgatccgtgctttgtttacgactacagcgaatgagttgtttagtggtggctttgagttttcattactgatgcccgatgatgatgagccattaacgatacgagcagatgcattaacagagtgggtaaatagttttatttctggtttaggactgatggatctccaaaagaaccaattgtctgaagctgtcactgaagctttagctgatcttcaagatatcgctcagttaggtattgatgaagatgacgatatggaagaacaagcagccttatttgaacaagttgttgaacatgtccgtatgtgtgtattgagttgtcattctgaattaggccagcgtccggttgatgaagatgcagaggaaaaaccaacgttgcactaa

SEQ ID NO: 41045 - protein, 192 aa, Photobacterium sp. SKA34
MSEITLPTYQAVESALKEQGLAAAPAELHGLLSGMICGGLAIDDESWVGPVSDYANEGEPLTDGAKTMIRALFTTTANELFSGGFEFSLLMPDDDEPLTIRADALTEWVNSFISGLGLMDLQKNQLSEAVTEALADLQDIAQLGIDEDDDMEEQAALFEQVVEHVRMCVLSCHSELGQRPVDEDAEEKPTLH

SEQ ID NO: 41046 - DNA, 564 bp, Alteromonadales bacterium TW-7
  CDS (1)..(564): transl_table=11
atgaacgatttaccagattacgaaaaagctcaactacttttagaaaaaaacgaaatatttgtttctcctgccgaagcgcatggtgttattagtggtttattagcatgtggactaagtattgacgacaaggagtacctaggccttttaagcgatgtattcaacgatggtgaatcgttcggtaatggtttaaaagcattttttggcactatttataagcaagttgttacaagctttaatgatgaagagttccagtttgatttatttttaccaagtgatgacgaaacactcatcgatcaggctaatggcctcgtatcatgggtatcgggatttatgcttggttttggtttaaagcaaaaagattacggtaagctgtcggctgacgtgaaagaagtaattagcgactttagcgaaataacacgcctagataccactttcgaagaaaccgaagaagatgctaacgcacttcacgaagttattgaatatgtacgtgtatcggcactactttgttttgccgagctaggtaaagagcaaagcagccaaagtgataaaaaaacgcttcattaa

SEQ ID NO: 41047 - protein, 187 aa, Alteromonadales bacterium TW-7
MNDLPDYEKAQLLLEKNEIFVSPAEAHGVISGLLACGLSIDDKEYLGLLSDVFNDGESFGNGLKAFFGTIYKQVVTSFNDEEFQFDLFLPSDDETLIDQANGLVSWVSGFMLGFGLKQKDYGKLSADVKEVISDFSEITRLDTTFEETEEDANALHEVIEYVRVSALLCFAELGKEQSSQSDKKTLH

SEQ ID NO: 41048 - DNA, 606 bp, marine gamma proteobacterium HTCC2080
  CDS (1)..(606): transl_table=11
ttgcgccgcctatttacaggagaaaaagtcgtgctagatgccctaggtgactatgaaacgatgcccgattggcaggaatcagctgacgttttgttgggtgttgggctcatgttgaatccctcagaacttcatggtgcctcgacggggttgctggcgaccgggatggctcatgacaccgatgagcaaaagactgcggcgctgggtcttttggaaaaagcgttggccgtggatttacacggcgagtcggcagactttgcgactcgtttgctggcagcgacattatcggcagctagagataccgactttgcatttggccctttgcttcctgatgacgatgaagcctttgaaatacgactgacctcactgggtcgttgggcgacagggtttttgactggatttactcaggcggtggcggcggctaatacggcatcggagccggttgatccaaatacggcagattccttgaaggactttgctgccattgctcaggttgatattggcgaagaagagagcgatgacaatgaacgcgagctggaagagttgattgattatcttcgactcgcggctttgaatatgttgactgatgctttgagccatcaggactaa

SEQ ID NO: 41049 - protein, 201 aa, marine gamma proteobacterium HTCC2080
MRRLFTGEKVVLDALGDYETMPDWQESADVLLGVGLMLNPSELHGASTGLLATGMAHDTDEQKTAALGLLEKALAVDLHGESADFATRLLAATLSAARDTDFAFGPLLPDDDEAFEIRLTSLGRWATGFLTGFTQAVAAANTASEPVDPNTADSLKDFAAIAQVDIGEEESDDNERELEELIDYLRLAALNMLTDALSHQD

SEQ ID NO: 41050 - DNA, 555 bp, Pseudomonas putida GB-1
  CDS (1)..(555): transl_table=11
atgcccaatactcaatcgccctacatcgccttcgccatgctgctttccagtaatggccaccctgtcacccctgccgaactgcacggcctgctgatcggccgcagctgtgccggcgccggcttcgatgccgatgcctggctggccgatgccgcccaactgctggaaaccgagccgggtgacaccgtgcgcaacgccctgatcggcctgcaggaaatggtcaagggcgagctgaacagcgacgacatggccatcgtcctgctgctgccttccgacgacgctgccctgagcgaccgcgccaccgcgctgggccagtggtgccaaggcttcattaccggtttcggcctgaatgccggtggcaaggacctgtccgacgaggccaaggatgtgctgcaggacctggtggccatttcccaggtacaagaagccctcgaagagtccgaagacggcgagagcgactacatggaagtcatggagtacctgcgcgtggcacctctgttgctgttctccgagctggccaagccggccgcacccgcgcccaagccatcgctgcactga

SEQ ID NO: 41051 - protein, 184 aa, Pseudomonas putida GB-1
MPNTQSPYIAFAMLLSSNGHPVTPAELHGLLIGRSCAGAGFDADAWLADAAQLLETEPGDTVRNALIGLQEMVKGELNSDDMAIVLLLPSDDAALSDRATALGQWCQGFITGFGLNAGGKDLSDEAKDVLQDLVAISQVQEALEESEDGESDYMEVMEYLRVAPLLLFSELAKPAAPAPKPSLH

SEQ ID NO: 41052 - DNA, 576 bp, Vibrio vulnificus
  CDS (1)..(576): transl_table=11
atgagtaaaaatcaacttccaagctaccaagtcgttgctgatgaaatgaaaatggccactctggcggtaactccagcggaactgcatggattacttgcaggcctgatcagtggtggtttgtcacagcaagatcaaagttggcagccaatgttgtttgattataccaatgatggcatgggttggccgagtgcggcgttggaacaggcgcaagcgttgtttaacgtgacttcagctcagttaaccagtgatgaaatggtgttaaacctgttgttgccaaacgcagaaggtgaagaagccatttttgcgttggcggatgccctttctgattgggttaatcattatatttctggtttgggcttagcgggagcagcgttcaacaaggcgtcagaagaggcgaaagaagcactggcggatctcgaagagatggctcgtctcggtgttgatgaagacgacgatttgcaagagcaagcagagttgctggaacaagttattgaacatgttaaagcgtgtacgttgctgattcatgcagagtttggcgccaaaacgtcttcctctgaaaccccgaccattcattaa

SEQ ID NO: 41053 - protein, 191 aa, Vibrio vulnificus
MSKNQLPSYQVVADEMKMATLAVTPAELHGLLAGLISGGLSQQDQSWQPMLFDYTNDGMGWPSAALEQAQALFNVTSAQLTSDEMVLNLLLPNAEGEEAIFALADALSDWVNHYISGLGLAGAAFNKASEEAKEALADLEEMARLGVDEDDDLQEQAELLEQVIEHVKACTLLIHAEFGAKTSSSETPTIH

SEQ ID NO: 41054 - DNA, 549 bp, Pasteurella multocida
  CDS (1)..(549): transl_table=11
atgtcgtcgtattccgacttttctcaacaattaaaaaccgccggtatcgctttatctgccgcagaattacatggttttctcacaggtctaatctgcgggggcatccacgatcaaagttggcaacccctgcttttccaatttacgaatgaaaatcacgcttatcccaccgcactgttgcaagaagtcactcaaatacagcaacacatcagcaagaaattagccgatattgatggttttgactttgaattatggttacctgaaaatgaagatgacgtctttactcgtgccgatgcattatccgaatggacaaaccatttcttacttggtttggggctcgcccaaccgaaattagataaagagaaaggtgatattggcgaagctattgacgacttacacgatatctgtcaactcggttacgatgaaagtgacgataaagaagaactcagcgaagcattagaagaaatcattgaatatgtccgtactctagcttgtttgttattcacacattttcaaccccaactccctgaacaaaaacccgtattacattaa

SEQ ID NO: 41055 - protein, 182 aa, Pasteurella multocida
MSSYSDFSQQLKTAGIALSAAELHGFLTGLICGGIHDQSWQPLLFQFTNENHAYPTALLQEVTQIQQHISKKLADIDGFDFELWLPENEDDVFTRADALSEWTNHFLLGLGLAQPKLDKEKGDIGEAIDDLHDICQLGYDESDDKEELSEALEEIIEYVRTLACLLFTHFQPQLPEQKPVLH

SEQ ID NO: 41056 - DNA, 558 bp, Xylella fastidiosa
  CDS (1)..(558): transl_table=11
atggaatctcccatgcatcttcctgaagtgattgcggtgcaacaagaaagtcagcagatgggtttgtctgtcactgctccagagcttcatggcagtctatccggtttgttagccggtggagggggcaatgggcctgattggttggcaatgattctagccgatgcggaagtggctgcgccccccaaagggagtgtgcttgaacggctctatcaggccactgcgtcgcaattggaggatcctgatttcgccttccaattactgttggccgatgatggagcgactttggctgcacgtgccgacgctctattcgagtggtgtcgtgcttttctgggtggctttggcttggcggctcactcccgttcggtactgtctgcagaaggtgatgagatcctccgtgatctagctaagttggcccaagcatcagtcgacgacttcgacatgaatgaagaggaggaggatgggtcattggaagagattgaagaattcgtgcgtgtggcagtgttgctgttgcatggggactgtttgattggtccgtgcgctcctcagcctcttaattga

SEQ ID NO: 41057 - protein, 185 aa, Xylella fastidiosa
MESPMHLPEVIAVQQESQQMGLSVTAPELHGSLSGLLAGGGGNGPDWLAMILADAEVAAPPKGSVLERLYQATASQLEDPDFAFQLLLADDGATLAARADALFEWCRAFLGGFGLAAHSRSVLSAEGDEILRDLAKLAQASVDDFDMNEEEEDGSLEEIEEFVRVAVLLLHGDCLIGPCAPQPLN

SEQ ID NO: 41058 - DNA, 576 bp, Vibrio vulnificus
  CDS (1)..(576): transl_table=11
atgagtaaaaatcaacttccaagctaccaagtcgttgctgatgaaatgaaaatggccactctggcggtaactccagcggaactgcatggattacttgcaggcatgatcagtggtggtttgtcacagcaagatcaaagttggcagccaatgttgtttgattataccaatgatggcatgggttggccgagtgcggcgttggaacaggcgcaagcgttgtttaacgtgacttcagctcagttaaccagtgatgaaatggtgttaaacctgttgttgccaaacgcagaaggtgaagaagccatttttgcgttggcggatgccctttctgattgggttaatcattatatttctggtttgggcttagcgggagcagcgctcaacaaggcgtcagaagaggcgaaagaagcactggcggatctcgaagagatggctcgtctcggtgttgatgaagacgacgatttgcaagagcaagcagagttgctggaacaagttattgaacatgttaaagcgtgtgcgttgctgattcatgcagagtttggcgccaaaacgtcttcctctgaaaccccgaccattcattaa

SEQ ID NO: 41059 - protein, 191 aa, Vibrio vulnificus
MSKNQLPSYQVVADEMKMATLAVTPAELHGLLAGMISGGLSQQDQSWQPMLFDYTNDGMGWPSAALEQAQALFNVTSAQLTSDEMVLNLLLPNAEGEEAIFALADALSDWVNHYISGLGLAGAALNKASEEAKEALADLEEMARLGVDEDDDLQEQAELLEQVIEHVKACALLIHAEFGAKTSSSETPTIH

SEQ ID NO: 41060 - DNA, 555 bp, Pseudomonas putida
  CDS (1)..(555): transl_table=11
atgcccaatactcaatcgccctacaacgctttcgccatgctgctctcgagcaatggccatcctgtcaccccggccgaactgcacggcctgctgattggccgcagctgcgccggcgccggcttcgatgccgatgcctggttggccgatgccgcccaactgctggaaatcgagcctggtgacagtgtccgcaatgccttggtcggcttgcaggaaatggtcaagggcgagctgaccagcgacgacatggcgatcgtcctgctgctgcctaccgatgatgctgcactgagcgaccgcgccaccgcgctgggccagtggtgccaaggcttcgtgaccggtttcggcctgaacgctggcgggaaggacttgtccgacgaggccaaggaagtgctgcaggacctggtggccatttcgcaggtccaggaagcgctcgaagagtccgaagacggcgagagcgactacatggaagtcatggaatacctgcgcgtggcgcccctgctgctgttctccgaactggccaagccggccgcacccgcgcccaagccctcgctgcactga

SEQ ID NO: 41061 - protein, 184 aa, Pseudomonas putida
MPNTQSPYNAFAMLLSSNGHPVTPAELHGLLIGRSCAGAGFDADAWLADAAQLLEIEPGDSVRNALVGLQEMVKGELTSDDMAIVLLLPTDDAALSDRATALGQWCQGFVTGFGLNAGGKDLSDEAKEVLQDLVAISQVQEALEESEDGESDYMEVMEYLRVAPLLLFSELAKPAAPAPKPSLH

SEQ ID NO: 41062 - DNA, 579 bp, Yersinia pestis
  CDS (1)..(579): transl_table=11
atgtctatagagaatacattaccaacttacccatcacttgccttggcactcagccagcaagcagtagcattaaccccggctgagatgcatgggttgatcagcggaatgctctgtggtggcagtaaagacaacggctggcagacgctggtacatgacttgaccaatgagggagttgcttttccacaagccctgagtctgccgttacaacagttacatgaagcaacacaagaagcgctggagaatgaaggttttatgttccagttgcttatccctgaaggcgaagatgttactgtttttgatcgtgcagatgcgttatcaggttgggtaaatcatttcctcttggggttagggatgttgcagccgaagttggcacaggtgaaagatgaagtgggtgaagccattgacgacttgcgtaatatcgctcaattgggatatgacgaagatgaagatcaagaagaactggcgcaatcattagaagaagttgtcgagtatgtgcgtgttgcggccattttgtgccatatcgaatttacccagcagaaacctaccgcccctgaaatgcataaaccgacactgcattga

SEQ ID NO: 41063 - protein, 192 aa, Yersinia pestis
MSIENTLPTYPSLALALSQQAVALTPAEMHGLISGMLCGGSKDNGWQTLVHDLTNEGVAFPQALSLPLQQLHEATQEALENEGFMFQLLIPEGEDVTVFDRADALSGWVNHFLLGLGMLQPKLAQVKDEVGEAIDDLRNIAQLGYDEDEDQEELAQSLEEVVEYVRVAAILCHIEFTQQKPTAPEMHKPTLH

SEQ ID NO: 41064 - DNA, 555 bp, Pseudomonas aeruginosa
  CDS (1)..(555): transl_table=11
atgtccactcagaattccgcctacagcgccttttcctcccttctcgccgaggcggccatgccggtctcgccggccgaactgcacggccatctgctgggtcgggtctgcgccggcgccggcttcgacgaggccgcctggcaacacgctgccgccgaactgctcggcggcgcgccgggcgaacgactcaaggccgcgttgtccggcctgctcggcatggtccggcaggacttttccgccggcgaggtcgccgtcgtcatgctcctgcccgacgacgaaaccccgctcgcccagcgcaccgaggcgctcggccaatggtgccagggtttcctcgccggtttcggcctcaccgcccgcgaaggcagcctgaccggcgaagccgaggaagtgctgcaggacatggccgccatcgcccaggtccagggccagctggaagacagcgaggacggcgagacggactatatggaagtcatggaatacctgcgggtcgctccgctgctgctgttcgccgagtgcggcaagccgctggagcccgctcccaagccttcactgcactga

SEQ ID NO: 41065 - protein, 184 aa, Pseudomonas aeruginosa
MSTQNSAYSAFSSLLAEAAMPVSPAELHGHLLGRVCAGAGFDEAAWQHAAAELLGGAPGERLKAALSGLLGMVRQDFSAGEVAVVMLLPDDETPLAQRTEALGQWCQGFLAGFGLTAREGSLTGEAEEVLQDMAAIAQVQGQLEDSEDGETDYMEVMEYLRVAPLLLFAECGKPLEPAPKPSLH

SEQ ID NO: 41066 - DNA, 579 bp, Salmonella typhimurium
  CDS (1)..(579): transl_table=11
atgtctatacagaacgaaatgcctggttacaacgaaatgaaccggtttttgaatcaacaaggggccggtctgaccccggctgaaatgcatggtttaatcagcgggatgatttgcggcggcaacaacgacagctcatggcagccgctgttgcacgacctgacgaacgaaggtctggccttcgggcatgagcttgctcaggcgctgcgcaaaatgcacgcggcgaccagcgacgcgctggaagacgacggctttctttttcagctttatctgcctgaaggcgacgatgtcagcgtattcgatcgcgcagatgccttagccgggtgggttaaccactttttgcttggcctcggcgtaacgcagcctaaacttgataaagtcaccggcgaaacgggtgaagcgattgacgacctgcgtaatattgcgcagcttggttatgatgagagcgaagatcaggaagagctggagatgtcgctcgaagagatcatcgaatatgtccgtgttgcggcgctgttatgtcatgacactttcacgcgccaacagccgaccgcgccggaagtgcgtaaaccgacgctacactaa

SEQ ID NO: 41067 - protein, 192 aa, Salmonella typhimurium
MSIQNEMPGYNEMNRFLNQQGAGLTPAEMHGLISGMICGGNNDSSWQPLLHDLTNEGLAFGHELAQALRKMHAATSDALEDDGFLFQLYLPEGDDVSVFDRADALAGWVNHFLLGLGVTQPKLDKVTGETGEAIDDLRNIAQLGYDESEDQEELEMSLEEIIEYVRVAALLCHDTFTRQQPTAPEVRKPTLH

SEQ ID NO: 41068 - DNA, 26 bp, Artificial sequence
  primer
atgcttatgtctatacagaacgaaat

SEQ ID NO: 41069 - DNA, 25 bp, Artificial sequence
  primer
ttagtgtagagtcggtttttgtact

SEQ ID NO: 41070 - protein, 186 aa, Artificial sequence
  consensus sequence
  Variant (2)..(2): Xaa in position 2 is any amino acid
  Variant (5)..(7): Xaa in position 5 to 7 is any amino acid
  Variant (9)..(11): Xaa in position 9 to 11 is any amino acid
  Variant (12)..(12): Xaa in position 12 is any or no amino acid
  Variant (14)..(18): Xaa in position 14 to 18 is any amino acid
  Variant (19)..(27): Xaa in position 19 to 27 is any or no amino acid
  Variant (29)..(57): Xaa in position 29 to 57 is any amino acid
  Variant (58)..(63): Xaa in position 58 to 63 is any or no amino acid
  Variant (65)..(72): Xaa in position 65 to 72 is any amino acid
  Variant (73)..(73): Xaa in position 73 is any or no amino acid
  Variant (75)..(75): Xaa in position 75 is any amino acid
  Variant (78)..(85): Xaa in position 78 to 85 is any amino acid
  Variant (86)..(89): Xaa in position 86 to 89 is any or no amino acid
  Variant (91)..(91): Xaa in position 91 is any amino acid
  Variant (94)..(95): Xaa in position 94 to 95 is any amino acid
  Variant (97)..(99): Xaa in position 97 to 99 is any amino acid
  Variant (101)..(102): Xaa in position 101 to 102 is any amino acid
  Variant (104)..(104): Xaa in position 104 is any amino acid
  Variant (106)..(118): Xaa in position 106 to 118 is any amino acid
  Variant (119)..(123): Xaa in position 119 to 123 is any or no amino acid
  Variant (125)..(127): Xaa in position 125 to 127 is any amino acid
  Variant (130)..(131): Xaa in position 130 to 131 is any amino acid
  Variant (133)..(149): Xaa in position 133 to 149 is any amino acid
  Variant (150)..(152): Xaa in position 150 to 152 is any or no amino acid
  Variant (154)..(155): Xaa in position 154 to 155 is any amino acid
  Variant (158)..(158): Xaa in position 158 is any amino acid
  Variant (160)..(163): Xaa in position 160 to 163 is any amino acid
  Variant (165)..(180): Xaa in position 165 to 180 is any amino acid
  Variant (181)..(185): Xaa in position 181 to 185 is any or no amino acid
EXHGXXXGXXXXGXXXXXXXXXXXXXXWXXXXXXXXXXXXXXXXXXXXXXXXXXXXXXXXXXXLXXXXXXXXXLXLPXXXXXXXXXXXXAXALXXWXXXFXXGXGXXXXXXXXXXXXXXXXXXEXXXDLXXIXXXXXXXXXXXXXXXXXXXXEXXEYXRXXXXLXXXXXXXXXXXXXXXXXXXXXH

SEQ ID NO: 41071 - protein, 16 aa, Artificial sequence
  protein pattern
  Variant (2)..(3): Xaa in position 2 to 3 is any amino acid
  Variant (5)..(6): Xaa in position 5 to 6 is any or no amino acid
  Variant (8)..(8): Xaa in position 8 is Ala, Cys, Thr or Val
  Variant (9)..(10): Xaa in position 9 to 10 is any amino acid
  Variant (11)..(11): Xaa in position 11 is Phe or Tyr
  Variant (12)..(12): Xaa in position 12 is Ile, Leu, Met or Val
  Variant (13)..(13): Xaa in position 13 is any amino acid
  Variant (15)..(15): Xaa in position 15 is Phe, Ile or Leu
  Variant (16)..(16): Xaa in position 16 is Ala or Gly
AXXLXXWXXXXXXGXX

SEQ ID NO: 41072 - protein, 21 aa, Artificial sequence
  protein pattern
  Variant (2)..(8): Xaa in position 2 to 8 is any or no amino acid
  Variant (10)..(10): Xaa in position 10 is Leu, Met or Val
  Variant (13)..(13): Xaa in position 13 is any amino acid
  Variant (14)..(14): Xaa in position 14 is Ile or Leu
  Variant (15)..(15): Xaa in position 15 is any amino acid
  Variant (17)..(18): Xaa in position 17 to 18 is any amino acid
  Variant (19)..(19): Xaa in position 19 is Ala, Cys or Ser
  Variant (20)..(20): Xaa in position 20 is Ala or Gly
AXXXXXXXEXHGXXXGXXXXG

SEQ ID NO: 41073 - DNA, 660 bp, Escherichia coli
  CDS (1)..(660): transl_table=11
atgacgcaggatgaattgaaaaaagcagtaggatgggcggcacttcagtatgttcagcccggcaccattgttggtgtaggtacaggttccaccgccgcacactttattgacgcgctcggtacaatgaaaggccagattgaaggggccgtttccagttcagatgcttccactgaaaaactgaaaagcctcggcattcacgtttttgatctcaacgaagtcgacagccttggcatctacgttgatggcgcagatgaaatcaacggccacatgcaaatgatcaaaggcggcggcgcggcgctgacccgtgaaaaaatcattgcttcggttgcagaaaaatttatctgtattgcagacgcttccaagcaggttgatattctgggtaaattcccgctgccagtagaagttatcccgatggcacgtagtgcagtggcgcgtcagctggtgaaactgggcggtcgtccggaataccgtcagggcgtggtgaccgataatggcaacgtgatcctcgacgtccacggcatggaaatccttgacccgatagcgatggaaaacgccataaatgcgattcctggcgtggtgactgttggcttgtttgctaaccgtggcgcggacgttgcgctgattggcacacctgacggtgtcaaaaccattgtgaaataa

SEQ ID NO: 41074 - protein, 219 aa, Escherichia coli
MTQDELKKAVGWAALQYVQPGTIVGVGTGSTAAHFIDALGTMKGQIEGAVSSSDASTEKLKSLGIHVFDLNEVDSLGIYVDGADEINGHMQMIKGGGAALTREKIIASVAEKFICIADASKQVDILGKFPLPVEVIPMARSAVARQLVKLGGRPEYRQGVVTDNGNVILDVHGMEILDPIAMENAINAIPGVVTVGLFANRGADVALIGTPDGVKTIVK

SEQ ID NO: 41075 - DNA, 1140 bp, Zea mays subsp. mays
  CDS (143)..(967)
ccaccaacccaacctctgacgatcaccatcgccgctagcctccaccaccaacttcccatcgcctccccctcatctccccacactcctgacctcacctctccgaactgcagcacctcccctcccgccacccacacgtgctcccatggccgccaccgcgatctcagtccgcctccacccaaccgccgcgcgccatgtggcctccgcccgccgcgcccgcctcggggccgtccgcgcgcagtccgcgccggcggcggcggcggcggcgctgacgcaggacgacctcaagcggctggcggcggtgcgcgccgtcgagcaggtgaagagcgggatggtgctcgggctcgggacgggctccacggccgccttcgccgtcgccgagatcggcgcgctcctggccgcgggcaagctcgagaagatcgtcggcgtgcccacatccaagcgcaccttcgagcaggcgcagtcgctcggcatcccgctctccacgctcgacgacaacccgctcatcgacctcgccatcgacggtgccgacgaggttgaccctgacctcaaccttgtgaaagggcggggtggtgctcttcttcgtgagaagatggttgaggcagcatcggacaagtttattgttattgttgacgagacaaaactagttgatgggttaggaggtagtggtctagccatgccagtggaagttgtgcagttctgctggaagtacaaccttgtaagattgcaggaactgtttaaggaggaaggagtcgaggcaaagctaaggtttgaaggcgacaagccctatgttactgacaactcaaactacatcgtcgatttatacttcaagacgccaatcaaggatgcgttggcagcaggacaggaaattgcagctctggaaggagttgttgaccatgggttgttcttgaacatggcgagttcagtgatcattgctggaacggacggtgtcagtgtcaaaacgaagtgagtttttgagttgctttgttgtttgtgttgagttttacaatttaatgtacaagctattggtgtaaaagcagctgataagatgcttcaataaaggtgttcccccaatgtggggattgactatcacttattgtgggataaaaagccattttaataggttgaaacttctgttgattc

SEQ ID NO: 41076 - protein, 274 aa, Zea mays subsp. mays
MAATAISVRLHPTAARHVASARRARLGAVRAQSAPAAAAAALTQDDLKRLAAVRAVEQVKSGMVLGLGTGSTAAFAVAEIGALLAAGKLEKIVGVPTSKRTFEQAQSLGIPLSTLDDNPLIDLAIDGADEVDPDLNLVKGRGGALLREKMVEAASDKFIVIVDETKLVDGLGGSGLAMPVEVVQFCWKYNLVRLQELFKEEGVEAKLRFEGDKPYVTDNSNYIVDLYFKTPIKDALAAGQEIAALEGVVDHGLFLNMASSVIIAGTDGVSVKTK

SEQ ID NO: 41077 - DNA, 657 bp, Proteus mirabilis
  CDS (1)..(657): transl_table=11
atgactcaagatgaattaaaaaaagcagtaggttgggccgcccttgaatatgtaaaaccgggtactatcgtgggcgttggaacaggctctacggcttctcattttattgatgctcttgcaacaatgaaaggtcaaattgaaggggcagtttctagctcagaggcttcaacggcaaaactaaaaagctatggcattcccgtttttgactgtaatgaagttgattcgctcgatatctacgtagacggtgctgatgaaattaaccatcaaatgcagatgatcaaaggtggtggtgcggcattaacccgtgaaaaaatcattgcagcggtggcaaaaacctttgtgtgtattgtcgatgaatcgaaacaagtggatgttttgggtaaattccctctgcctgttgaagttatcccaatggctcgctcttatgttgctcgcgagctggttaaattaggtgggttacctgaatatcgtgaaaacgtcgtgacggataatggtaacgtgatcttagacgtttataatctcactattctgaatcctattgagctagaaaataaaattaatagtattgcaggggtggtcactgtcgggcttttcgctaatcgcggagcagacattgtattaatggggacttctgaaggtgtgaaaaccattaaatga

SEQ ID NO: 41078 - protein, 218 aa, Proteus mirabilis
MTQDELKKAVGWAALEYVKPGTIVGVGTGSTASHFIDALATMKGQIEGAVSSSEASTAKLKSYGIPVFDCNEVDSLDIYVDGADEINHQMQMIKGGGAALTREKIIAAVAKTFVCIVDESKQVDVLGKFPLPVEVIPMARSYVARELVKLGGLPEYRENVVTDNGNVILDVYNLTILNPIELENKINSIAGVVTVGLFANRGADIVLMGTSEGVKTIK

SEQ ID NO: 41079 - DNA, 669 bp, Methylophilus methylotrophus
  CDS (1)..(669): transl_table=11
atggcgatggataaagcacaacaagacgcacttaaactggaagtggcgaaagcggctgtaacctatgtgaaagatggcattatcggcgttggcactggctcgactgccaacttttttattgatgaactggccaaggtcaaacacaaaattactggcgcagttgccagctccgaagccaccgcgcaacgcctgcgtaaccacggtatcgaagtattcgatttgaacagtgtagacagcctggatatttatgtagacggcgcggatgaaatcaccgaacacatgcatatgcttaaaggcggcggtggtgcgttgacccgagaaaagatcgtggcagctgtggccaaatctttcatctgtatctgtgacgaaagcaaattcgtacccgtcttgggcaagtttcccctgccagtagaagtattaccgatggcacgcagccatgtggcacgtgaactggtgaaactgggtggtcaaccacagttgcgtgacttcacgacggataacggcaacctgattctggacgtgcatggtttaaccatcagtgacccaatcgccatggaagccaaaatcaaccagatcgtcggcgtggtgaccaatggtttatttgctgcccgtccagccaatgtactcctgttggcgactccaaccggcgtcaaaacgctgacaaaataa

SEQ ID NO: 41080 - protein, 222 aa, Methylophilus methylotrophus
MAMDKAQQDALKLEVAKAAVTYVKDGIIGVGTGSTANFFIDELAKVKHKITGAVASSEATAQRLRNHGIEVFDLNSVDSLDIYVDGADEITEHMHMLKGGGGALTREKIVAAVAKSFICICDESKFVPVLGKFPLPVEVLPMARSHVARELVKLGGQPQLRDFTTDNGNLILDVHGLTISDPIAMEAKINQIVGVVTNGLFAARPANVLLLATPTGVKTLTK

SEQ ID NO: 41081 - DNA, 828 bp, Oryza sativa (japonica cultivar-group)
  CDS (1)..(828)
atgggcagcttcgcctcccccctcgacgccgcccccgcccctcccaccgccaagccctcccctccgccggcgccggcgccggccaacgggctggtgacccaggaggagctgaagcgggtggcggcgcaccgggccgtggagatggtggagcccgggatgacgctgggcctcggcacgggctccaccgcggcccacgcgctggaccgcctcggcgacctcctccggtccggggagctcgccgcggtggccggcgtcccgacctcgctcaagacggaggcgcacgccgccagggtggggatcccgatgctgccgctcggggaggcgggcgggatcgatctgtccatcgacggcgccgacgaggtcgacccggagctgaacctcgtgaaggggcggggtgggtcgctgctcagggagaagatgatcgaggggtccgggggaaggttcgtcgtcatcgtcgatgagtccaagctcgtcccgcggctcggctgtacgggcgccgtccccgtcgaggttgtccccttcgggtgcgaccacactctgggcctcgtccgcaaggtgttcgacggattgcctggcttcagcgcgaggctcaggacggtcgcctccaaggacggcgaggggaaggaggagatgttcgtcaccgacaacggcaactacatcgtcgagatgttcttcgaggatggcatacgcggcgacctcaacgagatcagcgaccgcctcctacggatcaccggcgtcgtcgagcacggcatgttcctcggcatggccacctcggtggtcgtcgccaagaaggacggcaccgtcgccctgctccacaagaagaagtaa

SEQ ID NO: 41082 - protein, 275 aa, Oryza sativa (japonica cultivar-group)
MGSFASPLDAAPAPPTAKPSPPPAPAPANGLVTQEELKRVAAHRAVEMVEPGMTLGLGTGSTAAHALDRLGDLLRSGELAAVAGVPTSLKTEAHAARVGIPMLPLGEAGGIDLSIDGADEVDPELNLVKGRGGSLLREKMIEGSGGRFVVIVDESKLVPRLGCTGAVPVEVVPFGCDHTLGLVRKVFDGLPGFSARLRTVASKDGEGKEEMFVTDNGNYIVEMFFEDGIRGDLNEISDRLLRITGVVEHGMFLGMATSVVVAKKDGTVALLHKKK

SEQ ID NO: 41083 - DNA, 843 bp, Oryza sativa (japonica cultivar-group)
  CDS (1)..(843)
atggccgccgccaccgtctccgtccgcttccacccggccgcatccgccgcgcgctgcggcggcggctcgcgccggagcaggcgcctgtccggggtcatcagggcgcagtcggcgccggcttcggcggcggcggcggcgctgacgcaggacgacctgaagaggctggcggcggtgcgcgcggtggagcaggtggagagcgggatggtgctggggctggggaccgggtcgacggcggccttcgccgtcgcggagatcggggcgctgctggcgtccgggaagctgagcggcatcgtcggggtgcccacctccaagcgcacgttcgagcaggcgcagtcgctcggcatcccgctctccaccctcgacgaccacccccgcatcgacctcgccatcgacggcgccgacgaggtcgatccagaccttaaccttgtgaaagggagaggtggtgcccttctccgggagaagatggttgaggcagcatcagacaagttcatcgttgttgttgacgagacaaagctagttaccggcttaggagggagtggtctagccatgcctgtggaggttgtgcagttctgctggaagtacaaccaagtgagattgcaggatctgtttaacgatgaaggatgcgaggcgaagctgagattggatgaaggcggcaaaccctacgttaccgacaactcaaactacatcgttgatttatacttcaagacgccgatcaaggatgcgttggcagcagggaaggagatctcagctttggaaggcgtcgttgagcatgggctgttcctggacatggcgacttcggtgatcatcgctggaacagatggcgtcagtgtcaaaacaaagtga

SEQ ID NO: 41084 - protein, 280 aa, Oryza sativa (japonica cultivar-group)
MAAATVSVRFHPAASAARCGGGSRRSRRLSGVIRAQSAPASAAAAALTQDDLKRLAAVRAVEQVESGMVLGLGTGSTAAFAVAEIGALLASGKLSGIVGVPTSKRTFEQAQSLGIPLSTLDDHPRIDLAIDGADEVDPDLNLVKGRGGALLREKMVEAASDKFIVVVDETKLVTGLGGSGLAMPVEVVQFCWKYNQVRLQDLFNDEGCEAKLRLDEGGKPYVTDNSNYIVDLYFKTPIKDALAAGKEISALEGVVEHGLFLDMATSVIIAGTDGVSVKTK

SEQ ID NO: 41085 - DNA, 804 bp, Arabidopsis thaliana
  CDS (1)..(804)
atgggttctgcattcgatccccttgtcacggccactgaggatctcgccgccgtcaactcggcgccgccactctcaaacctcacgcaagaagaactcaagaaaatcgccgcttataaagccgtcgaattcgtcgaatctggaatggttatcggtctcggcactggctccaccgcgaaacacgccgtggctcgtatcagcgagcttctccgagaaggaaaactcaaggatataatcggaatccctacttcaaccacaacgcatgagcaagcggtgtctctagggataccattatccgatctagattcgcatccggtggtggatctatcaatcgatggcgccgacgaagtcgatccggctcttaatctggtgaaaggacgcggcggatcgttattgagagagaagatgattgaaggagcatctaagaagttcgttgtgattgttgatgaatcgaagcttgtcaagtatatcggaggaagcggactcgctgttccggtggaggttgttccgttctgctgcgatttcacaagggggaaactggaagagctatttagagattcgggatgtgttgcgaagctgaggatgaaaatcggatctaacggcgaagaggcggcgccggctgtgacggataataggaattatgtggtggatttgtatttggagagagatattggagatttagaggtggcgagtgaggcgatattgaggtttcctggagtagtggagcatgggatgtttctgggaatggcgactacgttgatcgtcgccggcaaatttggtgttaccgtcaaggataggtttggataa

SEQ ID NO: 41086 - protein, 267 aa, Arabidopsis thaliana
MGSAFDPLVTATEDLAAVNSAPPLSNLTQEELKKIAAYKAVEFVESGMVIGLGTGSTAKHAVARISELLREGKLKDIIGIPTSTTTHEQAVSLGIPLSDLDSHPVVDLSIDGADEVDPALNLVKGRGGSLLREKMIEGASKKFVVIVDESKLVKYIGGSGLAVPVEVVPFCCDFTRGKLEELFRDSGCVAKLRMKIGSNGEEAAPAVTDNRNYVVDLYLERDIGDLEVASEAILRFPGVVEHGMFLGMATTLIVAGKFGVTVKDRFG

SEQ ID NO: 41087 - DNA, 831 bp, Arabidopsis thaliana
  CDS (1)..(831)
atggcttccttatccttcgtttcctcttctcaccttacgctacgcactccttctattgccctacgcagcactggctcttctcctcgaacctccgtttcattctccgtcaaggctcaatccgtcgcgctttcacaggacgatttgaagaagctcgcggcggagaaagctgtggaggcaattaaacctgggatggttctagggctcggaaccggatccaccgcagctttcgctgttgatcagatcgggaaactactctcttccggtgaactctacgatattgtcggtatcccaacgtcgaaacgaacggaggaacaagcacggtcgttagggattcctcttgttgggttagatacacatccgagaatcgatctcgctattgacggagcagacgaggtagatccgaatcttgatttagtcaaaggtcgtggaggtgctcttctccgtgagaaaatggtggaagctgtggctgacaagtttattgttgtggctgatgataccaaactcgttacaggactcggtggaagtggattagctatgccggtggaagttgttcaattctgctggaactttaatttgattagattgcaagacctcttcaaggaatttggatgtgaatcaaagcttagagttgatggtgatggcaagccttatgtgactgataacagtaattacattattgatttgtattttaagactcctttgaaggatggattcgctgcggctaaagagattgggaagtttcaaggagtggtggagcatggtctgtttctcggaatggctacttctgtcattatcgctggaaagaatggcgttgaagttatgaccaagtga

SEQ ID NO: 41088 - protein, 276 aa, Arabidopsis thaliana
MASLSFVSSSHLTLRTPSIALRSTGSSPRTSVSFSVKAQSVALSQDDLKKLAAEKAVEAIKPGMVLGLGTGSTAAFAVDQIGKLLSSGELYDIVGIPTSKRTEEQARSLGIPLVGLDTHPRIDLAIDGADEVDPNLDLVKGRGGALLREKMVEAVADKFIVVADDTKLVTGLGGSGLAMPVEVVQFCWNFNLIRLQDLFKEFGCESKLRVDGDGKPYVTDNSNYIIDLYFKTPLKDGFAAAKEIGKFQGVVEHGLFLGMATSVIIAGKNGVEVMTK

SEQ ID NO: 41089 - DNA, 684 bp, Sulfolobus solfataricus P2
  CDS (1)..(684): transl_table=11
gtggatccaaaggaattactagcaacgtatactttgaactatctaagaggaaaaaagataataggcgttggtactggaaaaactgttaagaaattgatagaagttttaagtagtgaagaaaatcttaaagaaagctcattatttgttgcgagctctatcgatactgaaatcgaattaagtaagcgcggttttaaagtactttcccttttctccgctattcaaccagaaatttacgtcgatagcttcgatatagttaccaaagacggtattatgataaagggtggaggaggtgccttgcttagggaaaaacttttggcatacttttctaaatacagaatttttataggagaatctactaaactaaaagacactaaagtgattgatattccaattgaggtcataagcgttggagtaagttatgtcaaatacaaattagagaaaatgggatttaccgtgaaaataagggagggaagcggtaaaatggggccaattatttcagataatggaaatgtgattttggacgtttctgttaaaactgaaaatctatgcgagtttgacagaatgataaagaatataccatcaatagtagaaactggaattttctgcaaggaattatataataagatcatattggctaatgaacaaggtagaattgaagaaatggatgcgggggacgggatttga

SEQ ID NO: 41090 - protein, 227 aa, Sulfolobus solfataricus P2
MDPKELLATYTLNYLRGKKIIGVGTGKTVKKLIEVLSSEENLKESSLFVASSIDTEIELSKRGFKVLSLFSAIQPEIYVDSFDIVTKDGIMIKGGGGALLREKLLAYFSKYRIFIGESTKLKDTKVIDIPIEVISVGVSYVKYKLEKMGFTVKIREGSGKMGPIISDNGNVILDVSVKTENLCEFDRMIKNIPSIVETGIFCKELYNKIILANEQGRIEEMDAGDGI

SEQ ID NO: 41091 - DNA, 684 bp, Clostridium acetobutylicum ATCC 824
  CDS (1)..(684): transl_table=11
atggcaaaggataatctaaaaaaaatatctgctaagaaggctttagaatatataaaggataacacggtaatagggctcggcggaggagagacaataggatatttatgtgattatttaaaggaaaaaattaaaagtggtttcaatattaaagtggtaacaccatctataaaaactagaaacacctgtattgaaaatggtattgaggttttatatacatcaagtgttgaacatttggatgtggcttttgatggatgtgatcagcttgatgaaaaattaaacgcccttaaaagctgtggaggaatacattcaaaggagaagattattgcttctatggctgataaatatattttacttactaatgaaagtaaattcgtaaagaaattagattctacataccctatagttttagaaatattggaggagtcagcaggttatgttaaaagaagaataagtgaaattggtggaaaagcaacctttagatcaagtgctgcaaaggatggattcactataacggatagtggaaatctattgttagatgtattctttgatgaattaggagatgctaaggaacttcaaaaggggcttaagggtataacaggagttgttgaaacttctttatttgtggatttagtaagtcaggcgataatagcttatgaagatgatataaagattatttctaaataa

SEQ ID NO: 41092 - protein, 227 aa, Clostridium acetobutylicum ATCC 824
MAKDNLKKISAKKALEYIKDNTVIGLGGGETIGYLCDYLKEKIKSGFNIKVVTPSIKTRNTCIENGIEVLYTSSVEHLDVAFDGCDQLDEKLNALKSCGGIHSKEKIIASMADKYILLTNESKFVKKLDSTYPIVLEILEESAGYVKRRISEIGGKATFRSSAAKDGFTITDSGNLLLDVFFDELGDAKELQKGLKGITGVVETSLFVDLVSQAIIAYEDDIKIISK

SEQ ID NO: 41093 - DNA, 741 bp, Streptococcus pneumoniae R6
  CDS (1)..(741): transl_table=11
ttgaataaaaagcggtttcatagtaaaataagaactgagaatgatggaggtaaatcggtggaaaatctgaagaaaatggcaggtatcaaggctgctgagttcgtgagcgatggaatggtcgttggacttggaacaggctcgactgcctattattttgtcgaagaaatcggtcgtcgtatcaaggaagaaggattgcagattacagctgtaacaacttctagtgtgaccactaaacaggcagaaggccttaatatcccgctcaagtctattgaccaagtagactttgtcgatgtgacggttgatggcgcggatgaagtggatagtcagtttaatggaatcaaaggcggtggtggtgcccttctcatggaaaaggtggtcgcaacaccatcaaaagaatacatttgggtggtggatgaaagcaagctggtcgaaaaactaggtgcttttaaattgccagtagaagtggttcagtatggtgcagagcaggtctttcgtcattttgaacgagctggctacaaaccaagtttccgtgaaaaagacggccaacgttttgtgacggatatgcagaattttatcattgacctcgccttggatgtcattgaaaatccaattgcttttggacaagaattggaccatgtcgttggtgttgtggagcatggtttattcaaccaaatggtggataaggtaatcgttgctggacgagatggagttcagatttcaacttcaaaaaaaggaaaatag

SEQ ID NO: 41094 - protein, 246 aa, Streptococcus pneumoniae R6
MNKKRFHSKIRTENDGGKSVENLKKMAGIKAAEFVSDGMVVGLGTGSTAYYFVEEIGRRIKEEGLQITAVTTSSVTTKQAEGLNIPLKSIDQVDFVDVTVDGADEVDSQFNGIKGGGGALLMEKVVATPSKEYIWVVDESKLVEKLGAFKLPVEVVQYGAEQVFRHFERAGYKPSFREKDGQRFVTDMQNFIIDLALDVIENPIAFGQELDHVVGVVEHGLFNQMVDKVIVAGRDGVQISTSKKGK

SEQ ID NO: 41095 - DNA, 681 bp, Agrobacterium tumefaciens str. C58
  CDS (1)..(681): transl_table=11
atgaagatcaaggccgccgaggccgcattgtcccatgtgcaggacggcatgcggctgggtatcggcaccggttcgacggccgaggaattcgtccgtcttctggcggagaaggttgcggccggcctgaaggtcgagggcgttcccacatccgagcgtaccgcacgtctgtgcgtcgagcttggcgtgccgctgaaatccctcgatgaattgccggaactggatctgaccatcgacggcgccgacgaagttgatcatgtactacgtctcgtcaagggcggcggcggcgcgctgctgcgcgaaaagatcgtggcggcagcatccggccgcatgatcgtcatcgccgaccagagcaaggtcgtcgagacgctgggcgcctttccgcttcccatcgagatcaatcccttcggccaggtggcgacacgcatcgccattgaaaaactggcggctcggtcgggtctttcgggcgaactgacgatgcgttcttccggcgacggcgccttcatgacggatggcggacacctgatcctcgacgcatcttttggccgtattcctgatgcagaagcactggcacgcgagctgaacactatccccggtgttgttgagcacggacttttcataaatttggcatcgcttgccatcatcgcgggccctgaaggcgcccgcatgatgcaggcagtataa

SEQ ID NO: 41096 - protein, 226 aa, Agrobacterium tumefaciens str. C58
MKIKAAEAALSHVQDGMRLGIGTGSTAEEFVRLLAEKVAAGLKVEGVPTSERTARLCVELGVPLKSLDELPELDLTIDGADEVDHVLRLVKGGGGALLREKIVAAASGRMIVIADQSKVVETLGAFPLPIEINPFGQVATRIAIEKLAARSGLSGELTMRSSGDGAFMTDGGHLILDASFGRIPDAEALARELNTIPGVVEHGLFINLASLAIIAGPEGARMMQAV

SEQ ID NO: 41097 - DNA, 672 bp, Pyrobaculum aerophilum str. IM2
  CDS (1)..(672): transl_table=11
atgttgaagaggctgttggcaagagaggcgattaggcttgtaaagagcggaatggtagtggggctcggctcaggtactacggcgcgcgagttcataaaagcgctcgccgaggcgggcgttgacgacgtcttgctagtggccacctcgtctgacagcgaaatactggcgtatgaggtagggctgggggacaggctccgccccatgtgggctgtggatagaattgacctagccgttgacggcgcggatgaagtgactaaggacaaggtattgctgaaggggaagggaggggcgttgttgagggagaaaatagtggactatgccgctgagaaattcgtcgttttgatcgaagagcataagcttgtggagagaataccgtcaaacaacccagtgccggtggaggtggtgccctgggcttggcgttttgtggccagagaggttgagaagaggtttggcggcgtcgccaaactacgccaagatggggggaagctggggcctgtcgtcacagacaacgggaattatattatagactggaacccccccggatttattgacccttatcttgaagatgagctcaaggccattccaggggttgtcgaaaatggcgtgttctccaagcggagagatgccacaattttagtggccagctcagacggcacaataaaaacactttaa

SEQ ID NO: 41098 - protein, 223 aa, Pyrobaculum aerophilum str. IM2
MLKRLLAREAIRLVKSGMVVGLGSGTTAREFIKALAEAGVDDVLLVATSSDSEILAYEVGLGDRLRPMWAVDRIDLAVDGADEVTKDKVLLKGKGGALLREKIVDYAAEKFVVLIEEHKLVERIPSNNPVPVEVVPWAWRFVAREVEKRFGGVAKLRQDGGKLGPVVTDNGNYIIDWNPPGFIDPYLEDELKAIPGVVENGVFSKRRDATILVASSDGTIKTL

SEQ ID NO: 41099 - DNA, 825 bp, Schizosaccharomyces pombe 972h-
  CDS (1)..(825)
atggattcagcagaaaagaagttggatttgtctcccattgaattagctaagcgattggcttgtcatatggcggttgacgaaaattatcctgaaaatcccaaagtcattggtattggaagtggcagtaccgttgtatacgttgtcgagcgtttattgacaaagcctggcgttgatagtgttgttttcattcctactggtttccaatctaaacaattgattgtcaacaacggtttacgcctcggggatcctgattgctatccaaacgtggatgtgtcttttgacggtgctgatgaagtggatgacaatcttcagtgcattaagggtggtggtgcttgccttttccaggagaaattaattgccttcttagcaaagagacttgtaatcgttgccgattctcgtaaaaattcccatgtcctcggtgaatattggaaaaaaggtgttcccattgaagtaatgcccatggcctatgcttctattttaccccaactggtggaactcggtgctattgaacctaagcttcgtatgggtgctcctggaaaggctggtcctgttgttaccgataatggaaatttcatcattgatgctcatttcggtcttattaaaaaccccaaagaactttttgccaaaatcaaattattggttggtgtagtagaagttggcttattttgtgatatgatttcagccgtttattttggtagcaaagatggaagtgttaccgtcaaaaaagctagtggtgaaaaacacattattccggctcctgttactgctgctgctaatgaagtggatgccaaagtagctgaaacaaatgcaaagcctctcaattag

SEQ ID NO: 41100 - protein, 274 aa, Schizosaccharomyces pombe 972h-
MDSAEKKLDLSPIELAKRLACHMAVDENYPENPKVIGIGSGSTVVYVVERLLTKPGVDSVVFIPTGFQSKQLIVNNGLRLGDPDCYPNVDVSFDGADEVDDNLQCIKGGGACLFQEKLIAFLAKRLVIVADSRKNSHVLGEYWKKGVPIEVMPMAYASILPQLVELGAIEPKLRMGAPGKAGPVVTDNGNFIIDAHFGLIKNPKELFAKIKLLVGVVEVGLFCDMISAVYFGSKDGSVTVKKASGEKHIIPAPVTAAANEVDAKVAETNAKPLN

SEQ ID NO: 41101 - DNA, 843 bp, Drosophila melanogaster
  CDS (1)..(843)
atgttatctgggtttttgcgacgaggcgtccaaagagcacggttcaccttcacccagcaactcggcgaagatcttttgagcggcgcagcggcaacactccacacccagatacgcatgatggatgacattgcgctggacgcggccaagaagacggcggcccgcacggcggtggaccagtgggtgactgaggatacgaagattctggggattggcagcggatcgacggtggtgtacgccgtgcagcggatcgcggagcgcgtgtggaaggagggcgagctgacggacctcatctgcgtgccctcgtcctaccaggcgcgccatctgatactcgactacaaccttaacctgggcgatctggacaggaatcccaacatagacgtggccatcgacggggccgacgaggtcgatcgccatatggtgctgatcaagggcggcggcggctgcttgctgcaggagaaggtggtggcctcctgcgccaagcacttcatcgtggtggccgactacacaaagaactccatccgcctgggcgagcagtggtgccgcggcgtgcccatcgaggtggcgcccatggcgtacgtgcccatcaagctgcacatcgaggcgcttttcggcggcgaggcctcgttgcgtatggccaaggtgaaggcgggacccattgtcacggacaatggcaacttcctcctggactggaagttcatcgccaacagggagtacgactgggacgaggtcaaccgcgccatcaccctcatcccgggcgtcctggagacgggcctgttcgtgaacatggcccacaaatgctactacggcatggccaatggctcggtcaaggtccagaacaagtag

SEQ ID NO: 41102 - protein, 280 aa, Drosophila melanogaster
MLSGFLRRGVQRARFTFTQQLGEDLLSGAAATLHTQIRMMDDIALDAAKKTAARTAVDQWVTEDTKILGIGSGSTVVYAVQRIAERVWKEGELTDLICVPSSYQARHLILDYNLNLGDLDRNPNIDVAIDGADEVDRHMVLIKGGGGCLLQEKVVASCAKHFIVVADYTKNSIRLGEQWCRGVPIEVAPMAYVPIKLHIEALFGGEASLRMAKVKAGPIVTDNGNFLLDWKFIANREYDWDEVNRAITLIPGVLETGLFVNMAHKCYYGMANGSVKVQNK

SEQ ID NO: 41103 - DNA, 663 bp, Vibrio vulnificus CMCP6
  CDS (1)..(663): transl_table=11
atgagcatgactcaagatgaaatgaaaaaagccgctggttgggcagcgctcaaatatgtggaaaaaggcagcattgttggcgtaggaacaggctcaacggttaatcacttcatcgatgctcttggaaccatgagtgaagagatcaaaggtgcggtatccagctctgttgcatcaacagagaaacttgaagcgctaggtattaaaattttcgactgcaatgaagtcgcatctttagacatttatgttgatggcgcggacgaaatcaacgccgatcgtgaaatgatcaaaggcggtggcgcggcgctcactcgcgagaagatcgttgcggcgattgcggacaagtttatctgtatcgttgatggcacaaaggctgtcgatgttcttgggactttccctcttcctgttgaagtcatcccaatggctcgctcatacgttgcgcgtcaattggttaaactgggtggtgatccttgttaccgcgaaggggtgattactgacaacggtaacgtcatccttgatgtttacggtatgaagatcaccaatccaaaacagctggaagatcagatcaacggcatcccaggtgtcgtcactgtcggcctatttgctcatcgcggtgctgacgtggtcattaccggcactccagaaggcgccaaaattgaggaataa

SEQ ID NO: 41104 - protein, 220 aa, Vibrio vulnificus CMCP6
MSMTQDEMKKAAGWAALKYVEKGSIVGVGTGSTVNHFIDALGTMSEEIKGAVSSSVASTEKLEALGIKIFDCNEVASLDIYVDGADEINADREMIKGGGAALTREKIVAAIADKFICIVDGTKAVDVLGTFPLPVEVIPMARSYVARQLVKLGGDPCYREGVITDNGNVILDVYGMKITNPKQLEDQINGIPGVVTVGLFAHRGADVVITGTPEGAKIEE

SEQ ID NO: 41105 - DNA, 702 bp, Bacteroides thetaiotaomicron VPI-5482
  CDS (1)..(702): transl_table=11
atgaactgggaaaatcacctgatcaaagacctccaatggtccaatgagattatcaacagagaagcgaaagaacgtgtagcacgtgagatcgccgccacagccaaaacaggcgatgtgataggggccggctccggttccaccgtctacctcactttgtttgagctggcaaagcggattcacgaagagcacctatatctggaagtgattcccgcctctcaggaaatctccatgacttgcatacaactgggcatcccgcagaccaccctttgggacaaacgccccgactggacattcgacggagcggatgaggtagaccccgaccgcaacctgataaaaggacgtggcggagccatgttcaaagaaaagctgctgatcagaagcagcggaaaaaccttcattatcgtcgatcccagcaaacttgtcaatatcttgggaagcaaattccccataccggtagaggtgttcccgcatgcactgtcatacgtcgaaaaagaactgcgccgactgggtgcctccgaaatatcactacgccccgcccacggaaaagacggtcctattttgacagaaaacggaaactttatccttgatacccgtttccattatattgacgcttcgctggaagaacagctgaaaacaatcacgggcgttattgaaagcggacttttcatcaattacgacattgaagtagttgtaaccagataa

SEQ ID NO: 41106 - protein, 233 aa, Bacteroides thetaiotaomicron VPI-5482
MNWENHLIKDLQWSNEIINREAKERVAREIAATAKTGDVIGAGSGSTVYLTLFELAKRIHEEHLYLEVIPASQEISMTCIQLGIPQTTLWDKRPDWTFDGADEVDPDRNLIKGRGGAMFKEKLLIRSSGKTFIIVDPSKLVNILGSKFPIPVEVFPHALSYVEKELRRLGASEISLRPAHGKDGPILTENGNFILDTRFHYIDASLEEQLKTITGVIESGLFINYDIEVVVTR

SEQ ID NO: 41107 - DNA, 663 bp, Vibrio vulnificus YJ016
  CDS (1)..(663): transl_table=11
atgagcatgactcaagatgaaatgaaaaaagccgctggttgggcagcgctcaagtatgtggaaaaaggcagcattgttggcgtaggaacgggctcaacggttaatcacttcatcgatgctcttggaaccatgagtgaagagatcaaaggtgcggtatccagttctgttgcatcaacagaaaaacttgaagcgctaggcattaaaattttcgactgcaatgaagtcgcctctttagacatttacgttgatggcgcggacgaaatcaacgccgatcgtgaaatgatcaaaggcggtggcgcggcgctcactcgcgagaagatcgttgcagcgattgcggacaagtttatctgtatcgttgatggcacaaaggctgtcgatgttcttgggactttccctcttcctgttgaagtcatcccaatggctcgctcatacgttgcgcgtcaattggttaaacttggtggcgatccttgttaccgcgaaggggtgattactgacaacggtaacgtcatccttgatgtttacggtatgaagatcaccaatccaaaacagctggaagatcagatcaacgctattccaggcgtagtgactgtcggtctttttgctcatcgcggtgctgacgtggtcatcaccggcactccagaaggtgccaaaattgaggaataa

SEQ ID NO: 41108 - protein, 220 aa, Vibrio vulnificus YJ016
MSMTQDEMKKAAGWAALKYVEKGSIVGVGTGSTVNHFIDALGTMSEEIKGAVSSSVASTEKLEALGIKIFDCNEVASLDIYVDGADEINADREMIKGGGAALTREKIVAAIADKFICIVDGTKAVDVLGTFPLPVEVIPMARSYVARQLVKLGGDPCYREGVITDNGNVILDVYGMKITNPKQLEDQINAIPGVVTVGLFAHRGADVVITGTPEGAKIEE

SEQ ID NO: 41109 - DNA, 894 bp, Magnaporthe grisea 70-15
  CDS (1)..(894)
atggcaagctcagggtcggccgtgtcggcggtcgagcaggcgcagttgatagagatggccaagaaggccgccgccttcactgccgtcaaggaccacttggatcctcgctacacacacgtcggcatcgggtctggctccaccgtcgtctacgtcgtcgaggccatcaaggagctgcacccagaggcctcgaaggacatgaccttctacccgactggcgaccagtccaaaggcctcatcaaggccggcgggctccgggcggccccgatagaggaccgaccccagggcagcctgctggacgtctactttgacggcgccgacgaggccgacgccgacctcaacctgatcaagggcggcggcggctgcctgtggcaggagaagatcgtcgccgtggcctcgcgcacatttgtctgcatcggcgacttccgcaagctctcgaggaacctaggcacccaatggaagcaagggatcccaatcgaggttctccccaaggcggcagaccatgtgctggccgagctggagaggctcggcgcgcactcgccgcgactgagatccggctcaggaaaggccgggtccgtggtgacggacaatgggatgcacatcatcgatgcccccttcaccccgctgcttctggccggagatgagggtgggactggcgagaatggaatctggagcgtcgacaggctcgcggctaaactcaagtctctggtcggcgtctgcgagattggcctcttctacggccgtagcggcctggatgcaaaggatgagggcggtgcacagaagcccgtcgcggcctatttcggcatggctgacggcagcgtgcagattctcaaccagggctccccgcccgtcacccttacaacatcgagcacgggtggctctgatggttccaaatga

SEQ ID NO: 41110 - protein, 297 aa, Magnaporthe grisea 70-15
MASSGSAVSAVEQAQLIEMAKKAAAFTAVKDHLDPRYTHVGIGSGSTVVYVVEAIKELHPEASKDMTFYPTGDQSKGLIKAGGLRAAPIEDRPQGSLLDVYFDGADEADADLNLIKGGGGCLWQEKIVAVASRTFVCIGDFRKLSRNLGTQWKQGIPIEVLPKAADHVLAELERLGAHSPRLRSGSGKAGSVVTDNGMHIIDAPFTPLLLAGDEGGTGENGIWSVDRLAAKLKSLVGVCEIGLFYGRSGLDAKDEGGAQKPVAAYFGMADGSVQILNQGSPPVTLTTSSTGGSDGSK

SEQ ID NO: 41111 - DNA, 1044 bp, Nasonia vitripennis
  CDS (1)..(1044)
atgtcgaagagcacgttggagagcgcgaaaaaaatcgcggcgtacaaagccgtggacgagtatgtaaaggacaacagtgttattgggattggtagtgggtcaactattgtttacgccgtccagaggttagctgaacgtgtgaaagaagaaaaactcaatgtagtttgtgtacctacctcatttcaagctcgccagcttattattaacaatcatttaagtttaggagatttagaaactcaccctcagttggattttgctattgatggtgctgatgaagttgactgtgatcttaatcttatcaagggaggtggaggttgcttattacaagaaaaaattgtagcctcttgtaccgatactttggttattatagcagattacacaaaaaattcgcaaaaacttggtgagcagtacaaaaaaggtcttcctttggaagtagtccctatggcctatgttcctataagaagaaaagtagaagaagattttggaggcagtgttaaattgagaatggcagtagctaaagcaggtccagtggtgactgacaatggcaattttattttggattggcaatttcctgacaatgtcaaggactggcctgctgtgaatcaaaaacttttgtcaattcctggtttagttgaaactggtctatttgttaatatggcgaaaaaagtattctttggaatgcctgatggtagcattaaagaacaagtgctaaaactcgttctttccctgctgataatcatcgagtccgtggaaatcgctcgagccgatgatggactggagatcgttgcaatgaaacggccattctgcaatgcattcacgggctgcggcagaaagcgcgacccgtcctacgcgtcgggcctgcagctgcccattccactgtaccgggcactgctgcggctgtccagtctgcgcaacggcgccgccgccgaggtcaggatgaggcagcgtccccttggtctcatcgggccggagaatctcgtgcaacttggcccgcaagctccacgtctgatggccgctccggtcgttgtgccgagcctatattaa

SEQ ID NO: 41112 - protein, 347 aa, Nasonia vitripennis
MSKSTLESAKKIAAYKAVDEYVKDNSVIGIGSGSTIVYAVQRLAERVKEEKLNVVCVPTSFQARQLIINNHLSLGDLETHPQLDFAIDGADEVDCDLNLIKGGGGCLLQEKIVASCTDTLVIIADYTKNSQKLGEQYKKGLPLEVVPMAYVPIRRKVEEDFGGSVKLRMAVAKAGPVVTDNGNFILDWQFPDNVKDWPAVNQKLLSIPGLVETGLFVNMAKKVFFGMPDGSIKEQVLKLVLSLLIIIESVEIARADDGLEIVAMKRPFCNAFTGCGRKRDPSYASGLQLPIPLYRALLRLSSLRNGAAAEVRMRQRPLGLIGPENLVQLGPQAPRLMAAPVVVPSLY

SEQ ID NO: 41113 - DNA, 783 bp, Candida glabrata CBS 138
  CDS (1)..(783)
atgtcctacaccccattgccaaatattaacgacttcccaactctaggtaatcctctagaagatgccaagagagcagctgcttatcgtgctgttgatgaaaacttgaactttgacgaacacagaatcatcggtgtaggtagtggtagtactgttgtttacgttgccgagcgaattggtcaatacttgaaggatgagaagtaccatgacaaagtatccaaatttatctgtatccctactggttaccaatcccgtaacttgattcaagataatggtttaattctaggttctatcgagcagcacccccatgtagacattgcctttgacggtgctgacgaagttgaccacaacttgcaattgatcaaaggtggtggtgcatgcttgttccaagaaaaattggtatccactagtgcaaaaatcttcattgttgttgctgattccagaaaaaaatcggatactaacttggggataaattggaagagaggtgtgccaatagaaatcgtgccttcggcctggtcaagagttcaacatgacttgactagcattctccatgcaaactctgctcctgtaaggcaaggtggcagtgctaaagccggtccagttgtcactgataacatgaacttcttgatcgacgctgacttcggtgaaattcaagatccaaaagccctacatgaacaaatcaaaatgttggtgggtgtcgtcgaaactggtctgttcattgataacgctcacagagcttacttcggtaagcctgacggtagcgttgaagtcattgataagaaataa

SEQ ID NO: 41114 - protein, 260 aa, Candida glabrata CBS 138
MSYTPLPNINDFPTLGNPLEDAKRAAAYRAVDENLNFDEHRIIGVGSGSTVVYVAERIGQYLKDEKYHDKVSKFICIPTGYQSRNLIQDNGLILGSIEQHPHVDIAFDGADEVDHNLQLIKGGGACLFQEKLVSTSAKIFIVVADSRKKSDTNLGINWKRGVPIEIVPSAWSRVQHDLTSILHANSAPVRQGGSAKAGPVVTDNMNFLIDADFGEIQDPKALHEQIKMLVGVVETGLFIDNAHRAYFGKPDGSVEVIDKK

SEQ ID NO: 41115 - DNA, 825 bp, Kluyveromyces lactis NRRL Y-1140
  CDS (1)..(825)
atgtaccgtgtgtttgataaactagcttctaggccgtttgtttcactccccggaatccagctcatcgccaaaatgccattatccgatcttaataaactgcctccattagctgaccagttggaacaagctaagagaattgcagcctaccgtgctgttgacgaaaacttcgacgcaaagacccataaggttgtcggtgttggcagtggtactactgttgtttatgttgctgaaagacttggggaatacatggatgagaaaacaaattttgtttgtattccaacgggcttccaatcgaagcaattgatcctatcaaacaagttacaacttggtgtcattgaacaattcccagaagttgacattgcctttgacggtgccgatgaagttgatgcaggtttgcaattaattaagggtggtggtgcttgcttgttccaagagaagttagttagtactagtgccaaaaaattcatcgttgtggcggattcaaggaagaaatctccaaagtacttgggtaccaactggaaaaaaggtgttccaattgaggttgttccaagctcgtacgttcgtgtcctctctgatttaaagaacaaattgaactgcaaatctgccatggtaagacaaggtgggtcagctaaagccggccctgttgtcaccgataactgcaatttcatcatcgatgctgatttcggagaaattacagacccaagaaagctacatcaagatatcaaactattagttggtgttgtcgaaactggtttgttcattgataatgccgaaaaggcttactttggctatccagatggttctgtagacctacaagagttataa

SEQ ID NO: 41116 - protein, 274 aa, Kluyveromyces lactis NRRL Y-1140
MYRVFDKLASRPFVSLPGIQLIAKMPLSDLNKLPPLADQLEQAKRIAAYRAVDENFDAKTHKVVGVGSGTTVVYVAERLGEYMDEKTNFVCIPTGFQSKQLILSNKLQLGVIEQFPEVDIAFDGADEVDAGLQLIKGGGACLFQEKLVSTSAKKFIVVADSRKKSPKYLGTNWKKGVPIEVVPSSYVRVLSDLKNKLNCKSAMVRQGGSAKAGPVVTDNCNFIIDADFGEITDPRKLHQDIKLLVGVVETGLFIDNAEKAYFGYPDGSVDLQEL

SEQ ID NO: 41117 - DNA, 732 bp, Yarrowia lipolytica CLIB122
  CDS (1)..(732)
atgtcctccgaactgcctcctcttgagcaggccaagcgaatcgccgcccaccaggccgtggagcaacactaccccaaggacgccaaggtcgtgggcattggctcaggatccaccgtggtctacgttgccgagaagattgcgtcgttgcccaaggagctcaccaaggacaccgtgttcatttctacgggtttccagagcaagcagctgatccagaacgccgggttgcgactgggatgcatcgaccagtactccaacggagatctggacgtggcgtttgacggcgccgacgagaccgaccctcagctcaactgcatcaagggcggaggagcatgcctcttccaggaaaagattgtcgccgagtgtgcccgcaagtttgtcgtggtggccgactaccgaaaacagtccaaggctctgggcaccgtgtggatccagggtatccccattgaggtggtgcccgacgcctacaacaaggtaattgctgatctcaagaagatgggcgcccagtccgcggtgctgcgacccggctctcccggaaaggcgggccccatcatcaccgacaatggcaacttcattgtcgacgcctactttggcgagatccaacccgacgccgtcaaggacctgcacatcaagatcaagctgctgttgggcgtcgttgagaccggcctcttcactaacgcggacgtagcgtactttggaaacgccgacggaaccatctccaccattaccaagtaa

SEQ ID NO: 41118 - protein, 243 aa, Yarrowia lipolytica CLIB122
MSSELPPLEQAKRIAAHQAVEQHYPKDAKVVGIGSGSTVVYVAEKIASLPKELTKDTVFISTGFQSKQLIQNAGLRLGCIDQYSNGDLDVAFDGADETDPQLNCIKGGGACLFQEKIVAECARKFVVVADYRKQSKALGTVWIQGIPIEVVPDAYNKVIADLKKMGAQSAVLRPGSPGKAGPIITDNGNFIVDAYFGEIQPDAVKDLHIKIKLLLGVVETGLFTNADVAYFGNADGTISTITK

SEQ ID NO: 41119 - DNA, 708 bp, Anopheles gambiae str. PEST
  CDS (1)..(708)
atgtccctggaggaagcaaaaaagtgtgccgcgtacaaggcggtcgatgagtacgtgaaggataataccgtcgttggggtcggttcgggctcaaccgtggtgtacgcggtgcaccggatagcggagcgggtgaaggcggaaggactgaagctggtctgcattccgacgagcttccaggcccggcagctcatcatcgagcacgggctggtgcttggcgatttggagtgcaatccccggctggactgtgcgatcgatggggcggacgaggtggacgccaagatggttctgatcaagggtggcggtggatgtttgctgcaggaaaaaatcgtcgcctcctgtgccgaccggctggtggtgatagcggactacacgaaagactcggccaagctgggccaacagtaccgtaaaggcattccgatcgaggtcgcaccgatggcttacgtgccgatcaagggcaaggtggagtcgcggttcggcggtacgctcaagctgcggatggccgtcgctaaggcgggccccgtcgtcaccgacaacggtaacttcatactggactggagcttcccggccgataaggagcacgactgggacgctgtcaatcgggagatcatgatgataccgggggtcgttgatacggggctattcgttggcatggcgaccaaggcgtactttggccaacaggatggttcggtcacggaacggagcgcctaa

SEQ ID NO: 41120 - protein, 235 aa, Anopheles gambiae str. PEST
MSLEEAKKCAAYKAVDEYVKDNTVVGVGSGSTVVYAVHRIAERVKAEGLKLVCIPTSFQARQLIIEHGLVLGDLECNPRLDCAIDGADEVDAKMVLIKGGGGCLLQEKIVASCADRLVVIADYTKDSAKLGQQYRKGIPIEVAPMAYVPIKGKVESRFGGTLKLRMAVAKAGPVVTDNGNFILDWSFPADKEHDWDAVNREIMMIPGVVDTGLFVGMATKAYFGQQDGSVTERSA

SEQ ID NO: 41121 - DNA, 714 bp, Apis mellifera
  CDS (1)..(714)
atgggagagttacttactctcgaaagtgctaaacaaattgcagcttacaaagcagttgacgaatatgtgaagaataacagtatcattggaattggtagtggatctacagtaatatatgctgttcacaggcttgttgaacgtgtaaaggaggaaaatcttaatgttatttgtgttccaacttcattccaagctcggcagttaatattaaataatcatcttaaattgggtgatttggagacctatcctaaattggattgtgcaattgatggagcagatgaagttgattctgacatgaatcttatcaaaggtggaggaggttgtttacttcaagaaaaaattgttgcatcctgtgctaatcaacttattatagtagcagattatacgaaaaattctcaaaaacttggtgaacaatataaaaagggtattcctattgaagtagttcctatggcatatgtcgctattttaagaagaattgaagataattatggaggacttgtgaaagttagaatggctttagctaaagctggtccagttataacagataatggtaattttatccttgattggcattttcctcgtgatataagtaattgggataaaatcaatatagaaatctcaatgataccaggagtagttgaaactggactttttataaaaatggcaaaaaaagtgtactttggaatgcctgatggtagtgttaaagaacaattttaa

SEQ ID NO: 41122 - protein, 237 aa, Apis mellifera
MGELLTLESAKQIAAYKAVDEYVKNNSIIGIGSGSTVIYAVHRLVERVKEENLNVICVPTSFQARQLILNNHLKLGDLETYPKLDCAIDGADEVDSDMNLIKGGGGCLLQEKIVASCANQLIIVADYTKNSQKLGEQYKKGIPIEVVPMAYVAILRRIEDNYGGLVKVRMALAKAGPVITDNGNFILDWHFPRDISNWDKINIEISMIPGVVETGLFIKMAKKVYFGMPDGSVKEQF

SEQ ID NO: 41123 - DNA, 822 bp, Aspergillus nidulans FGSC A4
  CDS (1)..(822)
atggccgagcttatcgagaaggctaaacgcgccgctggaaaggccgctgtcgaaaaccactaccccaaagatgccaaatttgtcggtattggcagtggttctactattgtgtatgttgttgaggccatcaaggagctgggaatcgatacctctggcacgtgttatgtgccaacgggcttccagtccaagcagctgatcgtctcggccggcctgacagcagtggatttcgatgccattcccgaaggaacagtgcttgatattgcgttcgacggtgcagacgaggtggatgatgagcttaaccttataaagggcggtggtgcttgtcttttccaggaaaaaattgttgctctccaagccaaggagttcatttgcgttgccgattcaagaaagttgcagtcccgcctcctgtctaactggaagtacattcccattgaggttgctccgatagctgctaagcgggtgctacctgctctgagacagctgggcagcatcaatcctgtacttcggccgcagactggatccaagctaggcccattgaaaactgaccaggacttttacatcatcgatgcacctttcccaactcttttaacaaaagcggacgttgcagctggaaaggacggtagcggaaaggatggcatttgggaggtcgacgctttgtcactggcgattaagcaaattcccggcgttttagatgttggtatcttctctggagtgaccgggcctcaggcccaggcgctcggcggcattggaggccagaagcccgttgcggcttactttgggatgcctgacggctcagtgcaggtcagaaaagcggacgcttga

SEQ ID NO: 41124 - protein, 273 aa, Aspergillus nidulans FGSC A4
MAELIEKAKRAAGKAAVENHYPKDAKFVGIGSGSTIVYVVEAIKELGIDTSGTCYVPTGFQSKQLIVSAGLTAVDFDAIPEGTVLDIAFDGADEVDDELNLIKGGGACLFQEKIVALQAKEFICVADSRKLQSRLLSNWKYIPIEVAPIAAKRVLPALRQLGSINPVLRPQTGSKLGPLKTDQDFYIIDAPFPTLLTKADVAAGKDGSGKDGIWEVDALSLAIKQIPGVLDVGIFSGVTGPQAQALGGIGGQKPVAAYFGMPDGSVQVRKADA

SEQ ID NO: 41125 - DNA, 792 bp, Candida albicans SC5314
  CDS (1)..(792): transl_table=12
atgttcataagaagtttatatcatcgaattagcaacactaaaacaattacaaatctcattatacgaaacatgtcttctacaagtaaagttgaatccgccaaaaaattagctgcttataaagcagttgatgaaaattttcctaaagatgctaaagtcattggtattggatctggatccactgttatttatgctgccgaaagaattggtcaattggacaataaggattcatttatttgtatccccacggggtttcaatcaaaacaattaatcattgataatggattaagattaggtactattgaacaatacccagatattgatattgcctttgatggagctgatgaagttgatccacaattaaatttgattaaaggtggtggtgcttgtttatttcaagaaaaattagtagcggcatctgctaaaaaatttgttgttgttgctgattatagaaagaaatctgataaattgggacaactgtggagacaaggtgtacctattgaaattgttcctaattcatatagtaaaatcattcaggaattatctaaaaaattaggagctaaaaatgtggatttaagacaaggtggtaaagctaaagctggtcctataattactgataataataatttcttattggatgctgattttggtgaaatagaaattgacaatgttggtaaattacatgaacaaattaaattattagttggtgtcgttgaaaccggattatttactaatatggctaataaagcatattttggtgaagaagatggatctgttagtgtatggagtaaatag

SEQ ID NO: 41126 - protein, 263 aa, Candida albicans SC5314
MFIRSLYHRISNTKTITNLIIRNMSSTSKVESAKKLAAYKAVDENFPKDAKVIGIGSGSTVIYAAERIGQLDNKDSFICIPTGFQSKQLIIDNGLRLGTIEQYPDIDIAFDGADEVDPQLNLIKGGGACLFQEKLVAASAKKFVVVADYRKKSDKLGQSWRQGVPIEIVPNSYSKIIQELSKKLGAKNVDLRQGGKAKAGPIITDNNNFLLDADFGEIEIDNVGKLHEQIKLLVGVVETGLFTNMANKAYFGEEDGSVSVWSK

SEQ ID NO: 41127 - DNA, 861 bp, Ustilago maydis 521
  CDS (1)..(861)
atggcttcttccaacgctaccaacagtaccagtgccgccagtgctgccaacaccaactcgtctgctttcaagagtgccgaattggctgctttgagcggcgtcgaggctgctaagcgtgctgctgcgtacgctgccgttgacaaccacgtcaagccgcagcacgagatcattggtattggctcgggctcaacggtgccttatgttgttgagcgaattgctcaacagggacctgctgtgaatgcaaagcgttggttcgttcccaccggcttccagtcacgcgaactcatcatcaacgccggccttcgtctcggtgatgtggatagcttccccagcatcgacgtcactatcgatggcgctgacgaggtcgacaatgcgctcaactgcatcaagggcggcggtgcttgtcatttgcgcgaaaaggtactcgccgaagccgccaatgaatttgtcgtagtcgctgactaccgcaagaatggatcgcagctcggcacaaagtggctgcaaggtgtccccatcgaggtcgctccgtttgcctatgcaaaagtgcttcagaacctcaaaaagatgggttctgacaaggcggtccttcgcatgggcaaggcaaaagccggtcccgtcgttacagataatggcaacttttgcatcgatgctcccttccccgaagcacagatgaaggatccctctgatttgctcaagcgtatcaagttgctcaccggtgtacttgaggtcggtctgttttgcaacatttgcaagtccgcctactttggcaacgatgacggcaccatcaccatcaaaaccgccgccggagatgtgcaagagggcgtccactttgacgtctccaaggcgcctgcaacagcataa

SEQ ID NO: 41128 - protein, 286 aa, Ustilago maydis 521
MASSNATNSTSAASAANTNSSAFKSAELAALSGVEAAKRAAAYAAVDNHVKPQHEIIGIGSGSTVPYVVERIAQQGPAVNAKRWFVPTGFQSRELIINAGLRLGDVDSFPSIDVTIDGADEVDNALNCIKGGGACHLREKVLAEAANEFVVVADYRKNGSQLGTKWLQGVPIEVAPFAYAKVLQNLKKMGSDKAVLRMGKAKAGPVVTDNGNFCIDAPFPEAQMKDPSDLLKRIKLLTGVLEVGLFCNICKSAYFGNDDGTITIKTAAGDVQEGVHFDVSKAPATA

SEQ ID NO: 41129 - DNA, 909 bp, Cryptococcus neoformans var. neoformans B-3501A
  CDS (1)..(909)
atgccctccccggccgtagaccttctcaagcaaaagacagcaagcctgccgaatgcccctatcagcgtcgtcgctgccaacacctttgtccctcctactcagcctgtgacggctggaaaccagctgcctacctctgtccctctccctgtcctgcctgcagttgaagctgccaaacgtttggcagcatatgccgctgtggaccgacacatcgcacacgagcacaaggtcattggtatcggatcaggatccactgtcccctacgtcgtggacagaatacttgctcaagggtttgaagccaataaagaccgggttttccttcctaccggcttccagtccaaagagcttatcgttaaagctggcttgactttgggcgacgtggatcaatatgctcgaatcgacgtgaccattgacggtgccgatgaggtcgacaacgagctcaactccatcaagggcggcggcgcttgtcagcttcgtgaaaaggtcctcgcagaggctgctgatacgtggatcatcgtggccgactaccgcaagaactctgaagttctcggcacatcttggactaaaggaattcccatcgaagtcgtcccctttgcgtacgccaaagtcctcaccaacctcgcccacatgggctccccacatgttcttcccaacggtcagcctggtcttagcttgcgtatgggtaagatgaaggctggacctgtggtcagcgataatggaaactttatcattgatgctcccttcgctgaggaattgatgcgacagcctgaagagctgttgcacaagatcaaaatgttgaccggtgtcgtcgaagtcggacttttctgtggcatggccaaggctgcgtactttggtaacgaggatggctccgttacaatccgttctgatgacggtaccatttctcagctgtaa

SEQ ID NO: 41130 - protein, 302 aa, Cryptococcus neoformans var. neoformans B-3501A
MPSPAVDLLKQKTASLPNAPISVVAANTFVPPTQPVTAGNQLPTSVPLPVLPAVEAAKRLAAYAAVDRHIAHEHKVIGIGSGSTVPYVVDRILAQGFEANKDRVFLPTGFQSKELIVKAGLTLGDVDQYARIDVTIDGADEVDNELNSIKGGGACQLREKVLAEAADTWIIVADYRKNSEVLGTSWTKGIPIEVVPFAYAKVLTNLAHMGSPHVLPNGQPGLSLRMGKMKAGPVVSDNGNFIIDAPFAEELMRQPEELLHKIKMLTGVVEVGLFCGMAKAAYFGNEDGSVTIRSDDGTISQL

SEQ ID NO: 41131 - DNA, 702 bp, Tribolium castaneum
  CDS (1)..(702)
atggcatccctcgaaagtgctaaaaaactggcggcctacaaagctgtggacctccacgtgcaaaacaattccattgtgggtgtcggcagcggctccaccgttgtttacgccgttgagaggttagccgaacgtgtgaaaaacgaaaaattaaatgtacagtgtgtcccaacgtcctttcaagccaggcaattgatcatccagcacaggctgcacctaaccgacctagagatacatccaagattggatgtttgcattgatggtgccgatgaagttgattccaccttgacattgattaaaggaggtgggggatgcttattgcaggagaagattgttgctagctgcgccaaggagttaattattatagcggattataccaaaaattcacaaaagctgggggaacaatacaaaaaggggattccgattgaagttgttccgatggcctatctccccattaaaacgcaaattgaaaaccaactgggagggacagttgagctcagaatggctaaagccaaagctggacctgtggtcaccgataatgggaattttatcctggattggaaaaacttccaggattataaatgggacacaatcaacaccaaattgaatctcattccgggagttgtggagacgggactatttgttaacatggccaagaaggcctattttgggttggccgatgggtcagtcaaagaacaaatttaa

SEQ ID NO: 41132 - protein, 233 aa, Tribolium castaneum
MASLESAKKLAAYKAVDLHVQNNSIVGVGSGSTVVYAVERLAERVKNEKLNVQCVPTSFQARQLIIQHRLHLTDLEIHPRLDVCIDGADEVDSTLTLIKGGGGCLLQEKIVASCAKELIIIADYTKNSQKLGEQYKKGIPIEVVPMAYLPIKTQIENQLGGTVELRMAKAKAGPVVTDNGNFILDWKNFQDYKWDTINTKLNLIPGVVETGLFVNMAKKAYFGLADGSVKEQI

SEQ ID NO: 41133 - DNA, 717 bp, Prochlorococcus marinus str. MIT 9303
  CDS (1)..(717): transl_table=11
atggcggaccttcaaactcagatgaagcaagcggtggcggcagccgctgtggagcagatcaaagatggcatggttcttggtttgggctcaggctcgacggcagctctgatgatccaggctcttggtgccaagctggccagtggtgagcttcgggagattgttggcgttaccacctctttccaaggcgaagtgatggctgcggagttggggattcccttgcgcaacctcacggccgtggatcgcatcgacttggcgatcgatggagctgatgaagttgatccctcttttcagttaattaaaggtggcggggcctgccatgtgcaggagaagcttgtcgccagtagagcggatcgctttgtggttgttgttgattccacaaagattgttgatcggctcaaccttggttttttacttccggttgaggtcttgcctggtgcttggcgacaggtgcagggtcgcttggctgagttgggcggtattgctgatttgcgtatggctcagtgcaaggctggtcctgtggtcaccgatcagggcaatctcgttttggatgtgagcatggccggagggattggtgaccctgaggatttggagtgtcgaattaacaatcttccgggtgtcttggagaacggtttgttcgtcaatctcaccgatgaagttttggttggccagattagtgatggtgttgcgggagtgcgtcgtctacagcgccgtgagtag

SEQ ID NO: 41134 - protein, 238 aa, Prochlorococcus marinus str. MIT 9303
MADLQTQMKQAVAAAAVEQIKDGMVLGLGSGSTAALMIQALGAKLASGELREIVGVTTSFQGEVMAAELGIPLRNLTAVDRIDLAIDGADEVDPSFQLIKGGGACHVQEKLVASRADRFVVVVDSTKIVDRLNLGFLLPVEVLPGAWRQVQGRLAELGGIADLRMAQCKAGPVVTDQGNLVLDVSMAGGIGDPEDLECRINNLPGVLENGLFVNLTDEVLVGQISDGVAGVRRLQRRE

SEQ ID NO: 41135 - DNA, 672 bp, Herminiimonas arsenicoxydans
  CDS (1)..(672): transl_table=11
atgacccaagatgaaatgaaacaagcagttgcccgcgctgcaatcgaatatgttgttccgggtgaaattattggggtcggtaccggctctactgccaattttttcatcgacgaactgggcaaaatcaaggatcgcatcaaaggcgcagtcgcttcatcggaagcgaccgcacaacgcctgaaatcgcatggcattgctgttttcgatctgaacgagatcgatgccatgtcggtatatatcgacggtgcggatgaaatcactgcgcaaggggcaatgatcaagggcggcggcgcggcactgacgcgtgaaaaaatcgttgcttctgtcgccaaacaatttgtttgcattgccgatggctcgaaactggtggatctgctgggcaatttccccttgccggtggaagtgattccgatggcgcaagcggtggtggcgcgcaagctggcggcactgggcggcgaaccgcgtctgcgattgaaggatggcaagccgctggtgaccgataatggctgcttcatcattgatgtgctgggcttgaagattcaagatcctgccgaactggaagcgcagatcaacaatatcgtcggggtggtaacggtcggcctgtttgcacggcgcggcgccgatattgccttgctcggcacggcagaaggcgtcaagcgtctgacgttctag

SEQ ID NO: 41136 - protein, 223 aa, Herminiimonas arsenicoxydans
MTQDEMKQAVARAAIEYVVPGEIIGVGTGSTANFFIDELGKIKDRIKGAVASSEATAQRLKSHGIAVFDLNEIDAMSVYIDGADEITAQGAMIKGGGAALTREKIVASVAKQFVCIADGSKLVDLLGNFPLPVEVIPMAQAVVARKLAALGGEPRLRLKDGKPLVTDNGCFIIDVLGLKIQDPAELEAQINNIVGVVTVGLFARRGADIALLGTAEGVKRLTF

SEQ ID NO: 41137 - DNA, 684 bp, Streptococcus pyogenes str. Manfredo
  CDS (1)..(684): transl_table=11
atggaagcactcaaaaaaattgccggtgttaccgctgcgcaatatgtgactgatggcatgaccattgggcttggaactgggtcaacggcttactattttgttgaggaaattggccgtcgcgtaaagcaagaaggactgcaagtggttggtgtgaccacgtcaagtgtgactagcaagcaagcagaaggcttaggcattcctttaaaatcgatagatgatattgatagcattgacctcaccgtagatggtgctgatgaagtggataaggatttcaatggaatcaagggtggtggtgcagccttactaatggaaaaaattgttgcaacaccaacaaaagaatacatctgggttgttgatgcttctaaaatggtagagcatctgggtgcctttaagttaccagtcgaagtcgttcaatatggtgctgatcgtttgttccgtgtctttgaaaaagctggttacaaaccgtcttttcgtatgaaaggtgatagtcgtttggtgacagacatgcaaaactatattattgatcttgatttgggttgtattaaagatcctgttgcttttggtcacctgttagatggaacagttggtgttgtggaacacggtctctttaatggtatggttgataaggtgattgttgctagtaaagacggtgttactgttttagaagcgcctaaagcaggctag

SEQ ID NO: 41138 - protein, 227 aa, Streptococcus pyogenes str. Manfredo
MEALKKIAGVTAAQYVTDGMTIGLGTGSTAYYFVEEIGRRVKQEGLQVVGVTTSSVTSKQAEGLGIPLKSIDDIDSIDLTVDGADEVDKDFNGIKGGGAALLMEKIVATPTKEYIWVVDASKMVEHLGAFKLPVEVVQYGADRLFRVFEKAGYKPSFRMKGDSRLVTDMQNYIIDLDLGCIKDPVAFGHLLDGTVGVVEHGLFNGMVDKVIVASKDGVTVLEAPKAG

SEQ ID NO: 41139 - DNA, 693 bp, Bradyrhizobium sp. ORS278
  CDS (1)..(693): transl_table=11
atggatgcattgaagcggcaggcggcggcgcgtgcgctggaagaagtcgagagcggcatgaagctcggcctcggcaccggctcgaccgccaagcatttcgtcgatctgctgggcgagaaggtgcgcgccggcctcaaggtggtgggcgttccgacctccgaggcgacgcgggcgcaggccgaagcttgcggcgtgccgctcaccacgctcgacgagatcgaccgtctcgatatcaccatcgacggcgccgacgagatcaatccggcgctcgacctgatcaagggcggcggcggcgcgctgttgcgcgagaagatcgtcgccagcgcctcgaatcgcatgatcgtgatcgccgacgacagcaaatgggtcgcgcggctcggccgcttcccgctgccgatcgaggtggtcccgttcgggatcgcggccacgcagcgcgagatcgccgacgccttcaccaaggctggcgtggctgggccgatgagcttgcgcaagtccgcagatggccacgttttcgtcaccgatggtggccactggattgtcgacgttcgcctgggggagatcgaggatcccccgcgcctggcgagctttttgagcgcaattccgggcgtggtcgagcacgggctgttcatcggcctcggcagcacggcgatcctggcaggcgcacagggaattcgcgttatccagcggccttga

SEQ ID NO: 41140 - protein, 230 aa, Bradyrhizobium sp. ORS278
MDALKRQAAARALEEVESGMKLGLGTGSTAKHFVDLLGEKVRAGLKVVGVPTSEATRAQAEACGVPLTTLDEIDRLDITIDGADEINPALDLIKGGGGALLREKIVASASNRMIVIADDSKWVARLGRFPLPIEVVPFGIAATQREIADAFTKAGVAGPMSLRKSADGHVFVTDGGHWIVDVRLGEIEDPPRLASFLSAIPGVVEHGLFIGLGSTAILAGAQGIRVIQRP

SEQ ID NO: 41141 - DNA, 657 bp, Dichelobacter nodosus VCS1703A
  CDS (1)..(657): transl_table=11
atgaatcaacagcttctcaaggaaaaagtcgctgctgccgtattagaacatgtgcctgaaaatattacgttgggcgtgggcagcggttcaacggtgttgtgttttattgaggcgttaaaacaggcaaaaagacaatttcgcgatattgttgccgcttcggaaacgtccagcaaagcattggaagcggcgggatttcgggtgcgcgatttaaatgcctgcgatccgccggatatttatgtggacggcgccgatgaaattaatgatgacaaaatcatgataaaaggcggcggcgcggcgttgacacgggaaaaaatcatcgcgtcggcggcaaaagaatttatttgcatcattgatgaatcaaaaaaagtggcgcaattaggacgttttccagttgccgttgaagtgattccgatggcgagaagttacgttgcgcgggaaattgtgaaattaggcgccgaaccgcgctggcggcagggcgtggtgacggataatggtcattggattttagatgtgcattatttagatttaacggctgccgaacggatggaagcgcgtattaacacgattgccggcgtggtggaatgcggcatttttgcgcaaagacgggcggataaagttttaatgagccaaagcgacggggaaattgtgctttggtaa

SEQ ID NO: 41142 - protein, 218 aa, Dichelobacter nodosus VCS1703A
MNQQLLKEKVAAAVLEHVPENITLGVGSGSTVLCFIEALKQAKRQFRDIVAASETSSKALEAAGFRVRDLNACDPPDIYVDGADEINDDKIMIKGGGAALTREKIIASAAKEFICIIDESKKVAQLGRFPVAVEVIPMARSYVAREIVKLGAEPRWRQGVVTDNGHWILDVHYLDLTAAERMEARINTIAGVVECGIFAQRRADKVLMSQSDGEIVLW

SEQ ID NO: 41143 - DNA, 687 bp, Borrelia garinii PBi
  CDS (1)..(687): transl_table=11
atggaaaatcaaaaaatgttggtagcaaaatacgcaattgatcgctacatcaaaagcaatatgaaccttggggttggaacaggtacaactatttattatgcaataaaatatttaagcgaaaagataaaatcgggcaacctaaaaaatttaaaactctatgcaacaagtagcgatacaaaatatttactatcaaaagaacaaattccttgtgaatcaaatttttcaaaacttaataaaaatctagacattgcaattgatggagctgatgaaattctattagaaaaaaaaagcttaataaaaggaatgggaggcgcacatctaatggagaaagtaatagcttacaattcagaaacattgctaataatagcagatgaaacaaaaattgtaaaaaaattgggaacaaaaatgtctattcccatagaagttgcccaaaatgcagttggatttattatgaccaggcttgaagaaatgaatttagacacaaccttaagagtttgtaaggaaaaaaaaggacctattataactgacaataataattatattttagatgtaaaaatgcacgtagaaaatcccgaaggaacagaaaaatacttcaaactatttccaggtatacttgagattggaatattcaatcataaaaacacaaaaatagtttattaccaaaacaaacaaatcaaggaagcctaa

SEQ ID NO: 41144 - protein, 228 aa, Borrelia garinii PBi
MENQKMLVAKYAIDRYIKSNMNLGVGTGTTIYYAIKYLSEKIKSGNLKNLKLYATSSDTKYLLSKEQIPCESNFSKLNKNLDIAIDGADEILLEKKSLIKGMGGAHLMEKVIAYNSETLLIIADETKIVKKLGTKMSIPIEVAQNAVGFIMTRLEEMNLDTTLRVCKEKKGPIITDNNNYILDVKMHVENPEGTEKYFKLFPGILEIGIFNHKNTKIVYYQNKQIKEA

SEQ ID NO: 41145 - DNA, 708 bp, Burkholderia mallei ATCC 23344
  CDS (1)..(708): transl_table=11
ttgacgcttcccatgacacaagacgaactcaaacgcctcgtcggcgaggccgctgcccgatacgtgaccgaaaacgtgccgcagggcgcggtgatcggcgtcggcacgggctcgaccgccaactgcttcatcgatgcgctcgcggccgtcaaggatcgctatcgcggcgcggtgtcgagttcggtggcgacgaccgagcgcctgaagtcacacggcatcaaggtgttcgatctgaacgagatcgaatcgctgcaggtgtatgtcgacggcgccgacgagatcgacgggagcggcgcgatgatcaagggcggcggcggcgcgctcacgcgcgagaagatcgttgcttcggttgccgaaacgttcgtgtgcatcgccgatgcgagcaagcgcgtggcggtgctcggccagttcccgctgcccgtcgaggtggtgccgatggcgcgcaccgcgatcggccgccggctcgccgcgctgggcggcgtgcccgtgctgcgcgtgaagcaggacggcgcgccgtacgtgaccgacaacggcaacgagattctcgacgtgaagggcctgcggatcgacgatccgcgcgcgctcgaagcggcgatcaacggctggcccggcgtcgtgacggtcgggctgttcgcgcaacgcggcgcggatctctgcctgctcggcaccgagcgcggcgtcgagacgctccgttacgctgcgcattaa

SEQ ID NO: 41146 - protein, 235 aa, Burkholderia mallei ATCC 23344
MTLPMTQDELKRLVGEAAARYVTENVPQGAVIGVGTGSTANCFIDALAAVKDRYRGAVSSSVATTERLKSHGIKVFDLNEIESLQVYVDGADEIDGSGAMIKGGGGALTREKIVASVAETFVCIADASKRVAVLGQFPLPVEVVPMARTAIGRRLAALGGVPVLRVKQDGAPYVTDNGNEILDVKGLRIDDPRALEAAINGWPGVVTVGLFAQRGADLCLLGTERGVETLRYAAH

SEQ ID NO: 41147 - DNA, 702 bp, Chlamydophila abortus S26/3
  CDS (1)..(702): transl_table=11
gtgaaaaaagatccctatttagaagtaaaaaaacagttagctcttgaagcggcaaacttggtggagccaggaatgcttttgggattagggagtggctcgacatctagagaatttatcaaagctgttgctcacaagcataaacaagaaaatttagatattcgtgctgtggcttcttcaaaagagtcgcattctctagccaagagtctaggaattcctttggttgatgacgaagagttcacggaaatagatcttgctgttgatggtgcagatgaaatcgatcctcaattgcgcatgattaaaggtggaggtggagccatttttcgtgagaagatcttattacaatccagtcggcgacggttgatacttgcagatgaaagtaaacatgtgcaggttttagggaagtttggtcttcctatagaaattagtcctttcggtagatcttctattattgctactttgaaaaatttggggtatctaggaaatttaagaaaaaattctcatggaggattttttatcaccaataacagaaattatatttacgatattcatactccaaatgtatatcctcatcccgaggaagacctgctgaagctgctacaaattcatggtattattgaagtcgggtttgttatagcgagcgttgaagtatggtttggttatgccaacggtcagattggtaaaaagaacaccggtagagtatga

SEQ ID NO: 41148 - protein, 233 aa, Chlamydophila abortus S26/3
MKKDPYLEVKKQLALEAANLVEPGMLLGLGSGSTSREFIKAVAHKHKQENLDIRAVASSKESHSLAKSLGIPLVDDEEFTEIDLAVDGADEIDPQLRMIKGGGGAIFREKILLQSSRRRLILADESKHVQVLGKFGLPIEISPFGRSSIIATLKNLGYLGNLRKNSHGGFFITNNRNYIYDIHTPNVYPHPEEDLLKLLQIHGIIEVGFVIASVEVWFGYANGQIGKKNTGRV

SEQ ID NO: 41149 - DNA, 672 bp, Pseudomonas syringae pv. syringae B728a
  CDS (1)..(672): transl_table=11
atgacccaggatcaactcaaacaggcagtcgcccaggcagctgtcgacttcatccttccgaagctcgatgacaaaagcattgtgggcgtcggcaccggctccacggccaactgcttcatcgacgcgctggcaaagcacaaggccgcctttgacggtgctgtcgccagctcgcaagccactgcggcgcgcctgaaggcgcacggcattccggtctatgagctgaacacggtcagcgatctggagttctatgtcgacggcgccgacgaaagcgacgagcacctgaatctgatcaagggcggcggcgcggcactgactcgcgaaaaaatcgtcgcggcggtggccaataccttcatctgcatcgccgacggcagcaagctggtgccagtgctgggcgcgttcccgctgccggtcgaagtcattccgatggcccgtagccacgtggcgcggcaactggtgaaactgggcggcgacccggtttatcgcgaaggtgttctgaccgacaacggcaacatcatcattgatgtgcacaacatgagcattaccaacccggtggagctggaagcgcagatcaacgccatcgtcggcgtggtcaccaatggcctgttcgccgcccgtccggccgacctgttgctgctgggtaccgctgaaggcgtgaaaaccctgacgcgctga

SEQ ID NO: 41150 - protein, 223 aa, Pseudomonas syringae pv. syringae B728a
MTQDQLKQAVAQAAVDFILPKLDDKSIVGVGTGSTANCFIDALAKHKAAFDGAVASSQATAARLKAHGIPVYELNTVSDLEFYVDGADESDEHLNLIKGGGAALTREKIVAAVANTFICIADGSKLVPVLGAFPLPVEVIPMARSHVARQLVKLGGDPVYREGVLTDNGNIIIDVHNMSITNPVELEAQINAIVGVVTNGLFAARPADLLLLGTAEGVKTLTR

SEQ ID NO: 41151 - DNA, 672 bp, Pseudomonas fluorescens Pf-5
  CDS (1)..(672): transl_table=11
atgacccaggatcaactcaaacaggccgttgcccaggccgccgtcgaccttatcctcccgaaactcgatgacaagagcatcgtcggggtcggcaccggctccaccgccaactgcttcatcgacgccctggccctgcacaagggcaccttcgacggcgccgtggccagctccgaagccaccgccgcgcgcctcaagggccacgggattccggtctacgagctcaacaccgtgagcgacctggagttctacatcgacggcgccgacgaaagcgacgagcacctgaacctgatcaagggcggcggcgccgccctgactcgggaaaagatcgtcgccgccgtggccaagacgttcatctgcatcgccgacgccagcaagctggtgccggtgctgggcaacttcccgctgcccgtggaagtgatccccatggcccgcagccacgtggcccgtgaactggtgaaactgggcggcgacccggtgtaccgcgaaggcgtgatcaccgacaacggcaacatcatcctcgatgtgcacaacatgcagatcaccaatccggtggaactggaaagccagatcaatgccattgtcggcgtggtcaccaatggcctgttcgctgcacgccccgctgatgtgctgctgctgggtaccgccgaaggggtgaagaccctcaaggcctga

SEQ ID NO: 41152 - protein, 223 aa, Pseudomonas fluorescens Pf-5
MTQDQLKQAVAQAAVDLILPKLDDKSIVGVGTGSTANCFIDALALHKGTFDGAVASSEATAARLKGHGIPVYELNTVSDLEFYIDGADESDEHLNLIKGGGAALTREKIVAAVAKTFICIADASKLVPVLGNFPLPVEVIPMARSHVARELVKLGGDPVYREGVITDNGNIILDVHNMQITNPVELESQINAIVGVVTNGLFAARPADVLLLGTAEGVKTLKA

SEQ ID NO: 41153 - DNA, 660 bp, Psychrobacter arcticus 273-4
  CDS (1)..(660): transl_table=11
atgagtgatcagcaagcacaaaagcaagccgcagccaaagccgctctacgctatattgaagatgatatgatacttggcgtggggacgggcagtacggtgaactgtctgattgagttattaccgacattaaagcttgctggcgcggttgcaagctcgcaggtgacagaagatagattgcgtgcacttggtatcgagattgttgatttaaactttgcaggtcagcttgatgtgtatattgatggtgctgacgaagtaaacgcgcatttgcaactgattaaaggtggcggcggtgcgctgacacgcgaaaaaatcgtcgccgcagcttccaataagtttgtctgcatggtcgatgagagtaaaagtgttgagatactggggcgcgctttcccagtaccaatagaggtattgccccaagcacgttcttatgtggcgcggcaattagcccgtatgggcggcgagccggtttatcgtgaagattttgtcacggattatggcaatgtgattttggatacttacgatttggatgtcagtaatccactagcacttgaacagcagttaaacaatatcgtcggtgtggtttgtaatggtatctttgctgccaatcaagcagacgttttgctcaaagcaagcagtaacggggttgaaatacttaaccgttaa

SEQ ID NO: 41154 - protein, 219 aa, Psychrobacter arcticus 273-4
MSDQQAQKQAAAKAALRYIEDDMILGVGTGSTVNCLIELLPTLKLAGAVASSQVTEDRLRALGIEIVDLNFAGQLDVYIDGADEVNAHLQLIKGGGGALTREKIVAAASNKFVCMVDESKSVEILGRAFPVPIEVLPQARSYVARQLARMGGEPVYREDFVTDYGNVILDTYDLDVSNPLALEQQLNNIVGVVCNGIFAANQADVLLKASSNGVEILNR

SEQ ID NO: 41155 - DNA, 657 bp, Colwellia psychrerythraea 34H
  CDS (1)..(657): transl_table=11
atgactcaagatgaaatgaaaaacgcagccgccattaaggcattagaattcattgaaaatgatactatcgtcggtgttggcactggctcaacagttaactttttcattgaagctctagcctcgatgaaagataaaatagcaggtgctgtttctagctcagaagagtcaactaagcgtttaaaagcacacggtattgaggtatttgatttaaacagtgttgatgttttagatgtatacgttgacggtgccgatgaaatcactcgtcatatgtcgatgatcaaaggcggtggcgcagcattaacccgtgaaaaaatcgtggcggcagtcgccaagaaatttatttgcattgccgacgattccaaacaagtaaaagtattgggtaactttcctttgcctgttgaagtaatacctatggcgcggagttatgtcgcacgtgaattagttaaattaggtggcgacccagtttaccgtcaaggtgtgaccacagataatggcaacgttatccttgatgtgtacaatctcgaaattcttgatccaaaagcactagaaactcaaattaacgctattgttggcgttgtgactaatggtttgtttgcacttcgtggcgctgacatattagtacttggtagcaaagatggaattcaggttatccaataa

SEQ ID NO: 41156 - protein, 218 aa, Colwellia psychrerythraea 34H
MTQDEMKNAAAIKALEFIENDTIVGVGTGSTVNFFIEALASMKDKIAGAVSSSEESTKRLKAHGIEVFDLNSVDVLDVYVDGADEITRHMSMIKGGGAALTREKIVAAVAKKFICIADDSKQVKVLGNFPLPVEVIPMARSYVARELVKLGGDPVYRQGVTTDNGNVILDVYNLEILDPKALETQINAIVGVVTNGLFALRGADILVLGSKDGIQVIQ

SEQ ID NO: 41157 - DNA, 699 bp, Dechloromonas aromatica RCB
  CDS (1)..(699): transl_table=11
atgcgcagcaaaccattcaggagcatcaccatgacccaggacgaactcaagcaggccgttgcccaggccgccgccgattacgtggcgcagaccgccccggccggcagcattatcggcgttggcaccggctcgacggccaatttcttcatcgatgcgctggcgccgctcaaggacaagtacaagggcgccgtcgccagttcggaagcgacccgcaagcgcctcgaaggccatggcatcgcagtctacgacctcaatgatgttgaagatattcccgtctatgttgatggcgctgacgaaatcgacgccggcctgaacatgatcaagggtggtggcggtgcgctgactcgcgaaaagatcgtcgcggccgtggctcgtgagttcgtctgcatctgtgacggctccaagctggtcgacaccatgggcaagtttccactgccggttgaggtcatcccgatggcccgcgcccatgttgcccgcgaactggccaagctgggtggtacgccggtgctgcgcgagggttttgtgaccgataacggcaatatcattctcgacgtcaaaggcctgtcgattaccgacccgaaggggctggaagcgcaaatcaaccagatcaccggcgtcgtcaccaatgggctgtttgccgttcgcccggccaacctgttgctgctcggcacggctgacggcgtcaggaccattcgctga

SEQ ID NO: 41158 - protein, 232 aa, Dechloromonas aromatica RCB
MRSKPFRSITMTQDELKQAVAQAAADYVAQTAPAGSIIGVGTGSTANFFIDALAPLKDKYKGAVASSEATRKRLEGHGIAVYDLNDVEDIPVYVDGADEIDAGLNMIKGGGGALTREKIVAAVAREFVCICDGSKLVDTMGKFPLPVEVIPMARAHVARELAKLGGTPVLREGFVTDNGNIILDVKGLSITDPKGLEAQINQITGVVTNGLFAVRPANLLLLGTADGVRTIR

SEQ ID NO: 41159 - DNA, 711 bp, Prochlorococcus marinus str. NATL2A
  CDS (1)..(711): transl_table=11
atggatctccaaaaccagatgaaaaaagcagttgctcaagctgctgtagatcaaattcaaaacggtatgattctaggccttggctctggttctacagcagctttgatgattgaagctcttgctataaaaataaaatcaggagaaattaaagatgttgttggagtgactacatcttttcagggtgaagttcttgcttctgaattaggcataccacttaaatctctttcatctgtttcagaaattgatcttgcaattgatggtgctgatgaagttaatcccaaatttcaattaatcaaaggaggaggagcttgtcatgtgcaggaaaaacttgttgctgctttagctaaaaaatttatagttgttgttgactcaactaaacttgttgaaaaattgaaccttgatttcaaattacctgtagaggttcttccttctgcttggaaacaagtacaaaaaacattaataaatcttggaggagaagggaatctaaggatggctcagaaaaaggctggacctatagttactgatcagggaaacttgatactggatttaacctttaggaacggtattgataaacctgaactattggaaagtcaaattaataatattcccggtgtccttgaaaatggactttttgtaaacctgactgatgaagtattggttgggaaagtagaaagtgatgttgttggtgttgaatcacttaaaaagatttag

SEQ ID NO: 41160 - protein, 236 aa, Prochlorococcus marinus str. NATL2A
MDLQNQMKKAVAQAAVDQIQNGMILGLGSGSTAALMIEALAIKIKSGEIKDVVGVTTSFQGEVLASELGIPLKSLSSVSEIDLAIDGADEVNPKFQLIKGGGACHVQEKLVAALAKKFIVVVDSTKLVEKLNLDFKLPVEVLPSAWKQVQKTLINLGGEGNLRMAQKKAGPIVTDQGNLILDLTFRNGIDKPELLESQINNIPGVLENGLFVNLTDEVLVGKVESDVVGVESLKKI

SEQ ID NO: 41161 - DNA, 699 bp, Methanosarcina barkeri str. Fusaro
  CDS (1)..(699): transl_table=11
atgacagaaagaaatatatctaccgattccccggaaaaacgtgcggctggcatcgctgcatctcggatggtagaatcgggaatggttgtgggacttggaacgggctcaacagttgcatatacgataaaagaactcggcaggcgggtcagggacgaaggtctcgaaattctgggtgttgttacctcataccagtctgaaacgcttgccatcgaagccggcatccctctgaccacccttgcccagcattcggaactggacatcgccattgatggagcagaccaggtcgattcgaagctgcacgcaatcaaaggtgggggagctgcccatacaagggaaaagatagtatcggcgtctgcaagacgttttctggtcgtagctgacgaatcaaaaacgagcacccagcttgataaacctataccggttgaggttcttccctttgcaaaaactcttgtgattaaaaaaataaagcaattgggaggaaagcctgagccgaggttagctctgagaaaagacggccctgtgataactgataatggaaactttgtacttgatgcaaatttcggcgtaataaacgatccagaaggtctggcccttcaactatcttcaattcctggagttgttgagcatggaatattttccaatgtggacgaactctatatcgggaaaaaagatggatcagtggagatagtcaagaagtga

SEQ ID NO: 41162 - protein, 232 aa, Methanosarcina barkeri str. Fusaro
MTERNISTDSPEKRAAGIAASRMVESGMVVGLGTGSTVAYTIKELGRRVRDEGLEILGVVTSYQSETLAIEAGIPLTTLAQHSELDIAIDGADQVDSKLHAIKGGGAAHTREKIVSASARRFLVVADESKTSTQLDKPIPVEVLPFAKTLVIKKIKQLGGKPEPRLALRKDGPVITDNGNFVLDANFGVINDPEGLALQLSSIPGVVEHGIFSNVDELYIGKKDGSVEIVKK

SEQ ID NO: 41163 - DNA, 657 bp, Thiobacillus denitrificans ATCC 25259
  CDS (1)..(657): transl_table=11
atgacccaagacgaaatgaagcgagccgtagcgcgtgctgcggtggattatgccaagggcggcatcatcggcgtaggaaccggctcgaccgcgaaccatttcatcgacgccctggccgaagtcaaggggcgcatcgagggcacggtggcgagttccgaggcgacggcggcgcggctgaaaagccacggcatacaggtgctcgacctcaacagcgtcggagagctcgaggtctacgtcgatggggctgacgagatcacgcagcatttcgcgatgatcaagggcggcggcggcgcgctgacgcgggaaaagatcgttgcggcgtgcagcaagcaattcgtctgtatcgccgacgacagcaagctcgtcgacgttctcggcaaattcccgctgccggtcgaggtgatcccgatggcccgctcgcacgtcgcgcgggagctcgtgaagctcggcggccagccccgcctgcgcgagggcttcacgaccgacaacggcaacgtgatcctcgacgtgcacaacctttcgatcatcgacccggtatcgctcgagaccgcgatcaaccagatcgtcggcgtggtcaccaacggcctcttcgcccggcgcggcgccgacgtgctgttgctcggcacgtcgaccggggtcaagaccttcacgagatag

SEQ ID NO: 41164 - protein, 218 aa, Thiobacillus denitrificans ATCC 25259
MTQDEMKRAVARAAVDYAKGGIIGVGTGSTANHFIDALAEVKGRIEGTVASSEATAARLKSHGIQVLDLNSVGELEVYVDGADEITQHFAMIKGGGGALTREKIVAACSKQFVCIADDSKLVDVLGKFPLPVEVIPMARSHVARELVKLGGQPRLREGFTTDNGNVILDVHNLSIIDPVSLETAINQIVGVVTNGLFARRGADVLLLGTSTGVKTFTR

SEQ ID NO: 41165 - DNA, 711 bp, Anabaena variabilis ATCC 29413
  CDS (1)..(711): transl_table=11
atgaccgttacagcagaccccgtgactttgatgaagcaagaagtgggcaaagccgccgccgccttggtaaagtccggctcgattgtaggcttaggtacagggtcaactacagcttacacaattcaatatttaggcgatcgcctcaagtcgggtgaactaaccgatattgttgggattccgacctcatttcagtcagaagttttatccaagcaatacggcgttcctctcacaaccttagacgctgtagatcatattgatatcgctattgatggggctgatgaagttgacccccagaaaaacctgattaaaggtggtggtgcagcccatacccgcgaaaaagtagttgattacttagctaatcaattcatcgttgtagtagacagtggtaaattagtagaccgcttgggttcggtttttgccgtaccagtagaagtcatcccaatggcaatcacccccgttaccaatgccattaagcagctaggtggcaaaccagaattgcggatgggtgtaaaaaaagcagggccagtcatcactgaccagggcaactttgtcttagatgtcagatttgattccattgacgacccagttaacctcgaaaaaatattgaataatattcctggggttctggagaatggtatctttgtcaactgtgcagacatagttttagttggtgaagtcaaagacggccagccactagtcagacaactataa

SEQ ID NO: 41166 - protein, 236 aa, Anabaena variabilis ATCC 29413
MTVTADPVTLMKQEVGKAAAALVKSGSIVGLGTGSTTAYTIQYLGDRLKSGELTDIVGIPTSFQSEVLSKQYGVPLTTLDAVDHIDIAIDGADEVDPQKNLIKGGGAAHTREKVVDYLANQFIVVVDSGKLVDRLGSVFAVPVEVIPMAITPVTNAIKQLGGKPELRMGVKKAGPVITDQGNFVLDVRFDSIDDPVNLEKILNNIPGVLENGIFVNCADIVLVGEVKDGQPLVRQL

SEQ ID NO: 41167 - DNA, 789 bp, Rhodobacter sphaeroides 2.4.1
  CDS (1)..(789): transl_table=11
atgcctgcagaactatccccgatcgacaccgccaaattcgccgccgcacgccgcgcggtggatctcgtgcaggacggcatgaagctgggcctcggcaccggctcgaccgccgcctggatggtgcgctgcctggccgagcgcgtgcgcgaggaggggctgcgggttcagggcgtcccgacctcgacccgcacggccgagctcgcccgcgctctgggcatccaggtggtgacgctggacgaggcgaagtggctcgacctgaccatcgacggggcggacgaattcgacgccgacttcaatctcatcaagggcggaggggccgctctgctgcaggagaagatcgtggcgaccgcctcggaccggatggtggtgatcgccgatgccgccaaggaagtggcgcatctgggcgcctttccgctgccggtcgaggtcatccccttcggctggcagagcacgaagatgctgatcgaggaaacgctcgagggcatggatgtgctgggccgcgaggtgacgctgcgcctctccggcgatgcgccgcttctgaccgacgagaagaactacatcctcgatctgcatctcaagcgcatcggcgagccgcgtccgctcgcgctggcgctgaaccagatcgcgggcgtcgtggaaaacggcctcttcatcgacatctgcgatacggtcgtggtcggccatggcgacgggcgggtgagcctgcgcgacctgcagtcggggcaggccgaggaaggatccatcgacatggaccgcgcccgcaacatcttcgccgatctgggagactga

SEQ ID NO: 41168 - protein, 262 aa, Rhodobacter sphaeroides 2.4.1
MPAELSPIDTAKFAAARRAVDLVQDGMKLGLGTGSTAAWMVRCLAERVREEGLRVQGVPTSTRTAELARALGIQVVTLDEAKWLDLTIDGADEFDADFNLIKGGGAALLQEKIVATASDRMVVIADAAKEVAHLGAFPLPVEVIPFGWQSTKMLIEETLEGMDVLGREVTLRLSGDAPLLTDEKNYILDLHLKRIGEPRPLALALNQIAGVVENGLFIDICDTVVVGHGDGRVSLRDLQSGQAEEGSIDMDRARNIFADLGD

SEQ ID NO: 41169 - DNA, 714 bp, Prochlorococcus marinus str. MIT 9312
  CDS (1)..(714): transl_table=11
ttgaattcacaaactcaaatgaaacaaatagttgctgaagcagcaattgaggaagtaaagagtgacatgattctcggattaggatctggttctacagctgtgcttatgataaaaagccttgctgatgcaattcgttctggaaaactgcaaaatataaaaggtgttgcaacttcctttcaatcagaagttttagcgctcgaactggatatcccacttattgatttggcttctgtttctcaaatcgatttagctattgatggagcagatgaagttgatccgggttttcaattaattaaagggggaggagcatgtcatgttagagaaaagttagtggcatctaaagctaatcaattgttgattgttgttgacgaaacgaaactcgtacgaaaattaaatcaatcttttcctttacctgtagaagttcttccaaatgcttggaaacaagttcaggaagtgatttcagaaatgaatggcatttctactttaagaatggcgactaaaaaagctggcccagttgttactgatcagggcaatctaatcctagatgtattgtttaatgatggtattaagaatccaaaagatattgaaaagagtattaataatattccaggagtattagaaaatggattattcattgaccttacagacaaagtattggttggtaaaattgaaaacaatattcctgttgcttactctcccgcaaaagttggctaa

SEQ ID NO: 41170 - protein, 237 aa, Prochlorococcus marinus str. MIT 9312
MNSQTQMKQIVAEAAIEEVKSDMILGLGSGSTAVLMIKSLADAIRSGKLQNIKGVATSFQSEVLALELDIPLIDLASVSQIDLAIDGADEVDPGFQLIKGGGACHVREKLVASKANQLLIVVDETKLVRKLNQSFPLPVEVLPNAWKQVQEVISEMNGISTLRMATKKAGPVVTDQGNLILDVLFNDGIKNPKDIEKSINNIPGVLENGLFIDLTDKVLVGKIENNIPVAYSPAKVG

SEQ ID NO: 41171 - DNA, 681 bp, Saccharophagus degradans 2-40
  CDS (1)..(681): transl_table=11
atgactcaagacgaattgaaacaagctgttgctcaagcggcgctagactatattttaccgcacctagaagacgacatgattttgggcataggtaccggctctacagcgcgcctttttatcgatttacttgccgcgcacaagggcaagtttgacggcgcggtttctagctcagaggcttccagcgagcaattaaaggggcacggcatacccgtttacgacctaaacagcgtagatagcctacctttttatatagatggtgccgacgaggccaacgcccaactgcaccttattaaaggcggtggcgcggcccttactcgcgaaaaaattattaccgccgtagccgacaaatttatctgcattgccgatgccagcaaagatgtagacgtattgggcaagttcccattacctgtagaagtgattccaatggcgcgcgcgcatgttgctagagaaatagtgaaattgggtggcaacccagtacaccgccaagattgcgttaccgataacggttgtcaaatactggatgtatacgacctcgccatccacgacgcaccagcacttgaagctaaactaaataacattgccggtgtggtcaccaatgggctatttgccctcaggccagccgatgtattgcttttgggcacaacgaacggggtagaaacccgatttgccgccaagccgtaa

SEQ ID NO: 41172 - protein, 226 aa, Saccharophagus degradans 2-40
MTQDELKQAVAQAALDYILPHLEDDMILGIGTGSTARLFIDLLAAHKGKFDGAVSSSEASSEQLKGHGIPVYDLNSVDSLPFYIDGADEANAQLHLIKGGGAALTREKIITAVADKFICIADASKDVDVLGKFPLPVEVIPMARAHVAREIVKLGGNPVHRQDCVTDNGCQILDVYDLAIHDAPALEAKLNNIAGVVTNGLFALRPADVLLLGTTNGVETRFAAKP

SEQ ID NO: 41173 - DNA, 660 bp, Methylobacillus flagellatus KT
  CDS (1)..(660): transl_table=11
atggctacacaagacgaattgaagcaacaggtcgccaaggcggccattgagtatgtaaagggcggcatcatcggtgtgggaacgggctccacagccaatttcttcattgatgagcttgccaaggtcaaagatcgcatcgatggtgctgtcgccagttccgaagcaacggcgcaacgcctacgcggccatggtatcaaagtattcgacctcaatgatgttgacggcatggaaatctatgtggatggtgcagatgagatcaccgagaagctgcatatgctcaagggcggcggcggagcattgacccgtgaaaagatcgtagcggcctgtgccaaggatttcatctgcatctgcgaccagaccaagctggtgccggtgcttggtaagttcccgctgcccgtagaggtcattccgatggcacgcgaatatgttgcgcgcgagttggtcaaattgggcggccagcccaagttgcgtgacttcaccactgacaacggtaacgtgatcctggatgtgcacggcctgaccattacggatccggtggcgctcgagtccaggatcaatgaaatcgtcggcgtggtgaccaacggcctgttcgcttcccgtccagccaatgtcctgctgctggcaaccgccgacggtgtcaagacattgacggccaggtag

SEQ ID NO: 41174 - protein, 219 aa, Methylobacillus flagellatus KT
MATQDELKQQVAKAAIEYVKGGIIGVGTGSTANFFIDELAKVKDRIDGAVASSEATAQRLRGHGIKVFDLNDVDGMEIYVDGADEITEKLHMLKGGGGALTREKIVAACAKDFICICDQTKLVPVLGKFPLPVEVIPMAREYVARELVKLGGQPKLRDFTTDNGNVILDVHGLTITDPVALESRINEIVGVVTNGLFASRPANVLLLATADGVKTLTAR

SEQ ID NO: 41175 - DNA, 693 bp, Methylobacillus flagellatus KT
  CDS (1)..(693): transl_table=11
atgaacgacaagcaactcgtcgccatacaggcggcacagcacgtgcaggacggcatggtggttggcctgggcaccggctcgaccgccaattacttcatcgaggaactggcccggcgccaccgcgacgaaggtctgcatatcaccgcagccgcgagctccgtagccagcaccatccaggcgcagactcatggcttgccgttggtggcgctcgagcatcttggtaggctcgacctctacgtggatggcgccgatgaggtcaccaccaacctagccctgctcaaggggcgcggctacgacctcgtgcgcgaaaagctgctggcccgcgccagcgagcgcttcatcgtgctggtcgacaaaagcaagctggtgggccacctgggcgaaaaattccccatcccgctagaagtcatcccgttcgcatggcaactggtccaggcctcattacaacaactgggcatcgcaagcagcctgcggcaaaatgccgccaaggatggctgggccatcacctcccacggcagcctggtactggagctcacgctgccgaaaaccttcaagagcgatgagctcaaccggctgctgaacgacatcccgggcattgtcgagcatggcgtgttcgacgagcttgccgatgccgtattcgtggccgacaacggccaggtggaagaaatctggaagaggcctggaaatatttaa

SEQ ID NO: 41176 - protein, 230 aa, Methylobacillus flagellatus KT
MNDKQLVAIQAAQHVQDGMVVGLGTGSTANYFIEELARRHRDEGLHITAAASSVASTIQAQTHGLPLVALEHLGRLDLYVDGADEVTTNLALLKGRGYDLVREKLLARASERFIVLVDKSKLVGHLGEKFPIPLEVIPFAWQLVQASLQQLGIASSLRQNAAKDGWAITSHGSLVLELTLPKTFKSDELNRLLNDIPGIVEHGVFDELADAVFVADNGQVEEIWKRPGNI

SEQ ID NO: 41177 - DNA, 696 bp, Methanococcoides burtonii DSM 6242
  CDS (1)..(696): transl_table=11
atgaaagaaagaaatgcaaatgcatcaagctctgaaaaagaagctgcaggcaatgccgctgccagtcttgtggaagatggtatgataatcggtcttggtaccggttcaacaacggctttcgcaattgcagaagttggcagacgtgtacgtgaagaaggattgaatgtattagctgttgtcacctcatatcaggctgaaatgcttgccattgaagctggagtgccactgacaagccttgcagagcatccggttcttgatcttgcgatagatggtgctgaccaggtggatgcaaaactgaacgtcatcaaaggcggaggagctgcacatacacatgaaaaggttgttgcccattcagcaaaacgcttcattgtagtcgtagatgaatcaaagataagcgaagaacttgatcacttcgtaccaattgaagtgcttccatatgcaagggaacttgcaaagaaacaattcatcgaacttggtggtaaaccacagatacgcctggcttcccgcaaggatggtcctgtgatctccgataacggtaatgtcatcattgatgtcgaattcggtgtgatcgaagatgctgctgagctctcacaaaagctttccacttgcgtgggtgttgtagaacatggtatcttcctgaataccgacgaggtctatgttggtatgaaagacggttcagttaagataattaactga

SEQ ID NO: 41178 - protein, 231 aa, Methanococcoides burtonii DSM 6242
MKERNANASSSEKEAAGNAAASLVEDGMIIGLGTGSTTAFAIAEVGRRVREEGLNVLAVVTSYQAEMLAIEAGVPLTSLAEHPVLDLAIDGADQVDAKLNVIKGGGAAHTHEKVVAHSAKRFIVVVDESKISEELDHFVPIEVLPYARELAKKQFIELGGKPQIRLASRKDGPVISDNGNVIIDVEFGVIEDAAELSQKLSTCVGVVEHGIFLNTDEVYVGMKDGSVKIIN

SEQ ID NO: 41179 - DNA, 711 bp, Myxococcus xanthus DK 1622
  CDS (1)..(711): transl_table=11
atgagccagcagggcgacggcgcggcgacggcccgctacaaacaagcggccgccgaatgggcggtggacggcttcctccagccgggcatggtggtgggcctgggcacgggcagcaccgcggccttcgccgtccagcggctggccgcgctgcgcgcgcagggacggcttctggacatcgtgggcgtgcccacctcgcgcgccacggaggcgctggctcgctcgctgggcgtgcccgtgtcgacgttggacgcgcaccccgtgctggacgtcaccctcgacggcgcggacgaagtggcgccggacctgtcgctcatcaagggcggaggtggcgcgctgctgcgcgagaagatcgtcgcgcaagcaagccggcgcgtcgtcatcgtggtggacgcgggaaagctctcccccgtgctgggcacgcactggccggtgccggtggaggtgatgtccttcggttggcgctcccaggcgcggttcctcgaatcgcttggcgcgcgcgtcaccgtccggcagggcgctggcggcgagcccttcctcacggaccagggcaacctcgtgctcgactgcgccttcggccccatcgacgcgcccgcggcgctggccgcgagcctgggcgcgcgcgcgggaatcatgggccacggcttgttcctgaacctcgccacggacctggtggtggcggggccggagggcgtggagcaccgcgcgcgctga

SEQ ID NO: 41180 - protein, 236 aa, Myxococcus xanthus DK 1622
MSQQGDGAATARYKQAAAEWAVDGFLQPGMVVGLGTGSTAAFAVQRLAALRAQGRLLDIVGVPTSRATEALARSLGVPVSTLDAHPVLDVTLDGADEVAPDLSLIKGGGGALLREKIVAQASRRVVIVVDAGKLSPVLGTHWPVPVEVMSFGWRSQARFLESLGARVTVRQGAGGEPFLTDQGNLVLDCAFGPIDAPAALAASLGARAGIMGHGLFLNLATDLVVAGPEGVEHRAR

SEQ ID NO: 41181 - DNA, 696 bp, Rubrobacter xylanophilus DSM 9941
  CDS (1)..(696): transl_table=11
gtgagcccggacgggatggagcggctcaagcgggccgccgcccgggaggcggtggaccgctacgtggagagcgggatggtggtggggctcgggaccgggacgaccgcctcctgggcggtccgcaggatcggggagcggctgctggaggggagcctgagcggggtgcggggggtgcccacctcggagtacacggcggcgctggcccgggagtgcggggtgccgctggtctccctctcggagcgccgcccggagctgaccatcgacggggcggacgagatcgccccggacctcagcgtgataaagggccggggcggggcgctgctgcgggagaagatcgtggcggccgcctcgcggcggggcgtggtgatcgtggcggacggctccaagcaggtgtcgctgctgggcaacgggccgctgccggtggaggtggagcccttcgggtgggaggccaccgcggaggcgctggccgcgctggggtgcgagccggagctgcgccgggtcaagacccagccgttcgtcacggacggcgggcactacacgctggactgccgctttccgggcatcccggacccccccgggctggcctgcaagataaagcgggtgcccggggcgctggagtgcgggctcttcgtggggctggcgcgggccgcggtgatcgcgcgcccggagggggtggaggtgctggaggccgcctag

SEQ ID NO: 41182 - protein, 231 aa, Rubrobacter xylanophilus DSM 9941
MSPDGMERLKRAAAREAVDRYVESGMVVGLGTGTTASWAVRRIGERLLEGSLSGVRGVPTSEYTAALARECGVPLVSLSERRPELTIDGADEIAPDLSVIKGRGGALLREKIVAAASRRGVVIVADGSKQVSLLGNGPLPVEVEPFGWEATAEALAALGCEPELRRVKTQPFVTDGGHYTLDCRFPGIPDPPGLACKIKRVPGALECGLFVGLARAAVIARPEGVEVLEAA

SEQ ID NO: 41183 - DNA, 708 bp, Mesorhizobium sp. BNC1
  CDS (1)..(708): transl_table=11
gtgacggacgcaaagacgcttaagattgaagccgccagggtggcgctgggctatgtcgaagatggcatgaagcttggaatcggcacgggctcgaccgccgaggagttcgtgcggctgcttgcgacgcgcgttagctcggggatgaagatcgtcggcgttcccacctccgagcgcacggctgccctttgccgcgagctgtcggttcccctttcgacgctggatgagacgccggaacttgatctgacggtggacggcgcggacgaagtggggccggacctcacgctgatcaagggcggcggcggtgcgctgcttcgcgagaaaatcgttgccgcggcttcacgccggatgatcgtgattgccgatgagagcaaggtcgttgatgtgcttggcacctttccgctgcccatcgaggtgaatccctttggccttcgcgccaccaggatcgccattgaggccgccgccgcgcgcctcggtcttgccggcgagatgaggacacgtatggccggccaggagccgttcgtaacggacggtggacatttcataatcgatgcatcttttggccgtattcaagcgccaagagcactggcggaggcgctgaatgcaattcccggtgttgtggaacacggtctcttcatcggactggctggcgcggcgattattgcaggcaggaacggtgtcaggacgctcgacgccggcagccgaatctag

SEQ ID NO: 41184 - protein, 235 aa, Mesorhizobium sp. BNC1
MTDAKTLKIEAARVALGYVEDGMKLGIGTGSTAEEFVRLLATRVSSGMKIVGVPTSERTAALCRELSVPLSTLDETPELDLTVDGADEVGPDLTLIKGGGGALLREKIVAAASRRMIVIADESKVVDVLGTFPLPIEVNPFGLRATRIAIEAAAARLGLAGEMRTRMAGQEPFVTDGGHFIIDASFGRIQAPRALAEALNAIPGVVEHGLFIGLAGAAIIAGRNGVRTLDAGSRI

SEQ ID NO: 41185 - DNA, 759 bp, Rhodococcus sp. RHA1
  CDS (1)..(759): transl_table=11
atgtacacgaccgaaaccccccaggacgcggcgaaatacgccgtcggccgggccgcggtggagcgctacgcgcacgacggcgcccaactcggactcggctccggaacgacgtccgcgtggttcgtgcgcgccctcggcgagaaggtcgccgacggcctcgacgtcgtcggtgtccccacctccaccgcaacccgcgacctggccctgtcggtcggtatcaccctcgtcgatctcaacgacctcgaccgcccactcgatgtgacgctggacggacccgacgaggtcgaccacgacggcgacatgatcaagggtggcggcgcctgcctgctgtgggagcgcatggtcgccgaggcctcgtcgaagatggtgtgcatcgcagacgacaccaaactggtcgagcaactcggctccttcccacttccgatcgaggtcatcccgttcgggtggaaggcgactcggcgatcgatctccgcgctgctgaccgacctcggttacaccgatgtcaagatcattcagcgacaccggaacgggcagcctgtcgtcaccgacagcggcaacttcatcctcgacgcccacatggtcgcgatcaccgacaaagccctgctcgacacgaacctcaactggatcgccggcgtcgtggagaacgggctgttcaccggaatcgcccacgaaatcctcatcgcttccccggacggggcggcgaaactcatcgaactgccgcaccggaatgccgccaggatcccggagtggcgcaaatga

SEQ ID NO: 41186 - protein, 252 aa, Rhodococcus sp. RHA1
MYTTETPQDAAKYAVGRAAVERYAHDGAQLGLGSGTTSAWFVRALGEKVADGLDVVGVPTSTATRDLALSVGITLVDLNDLDRPLDVTLDGPDEVDHDGDMIKGGGACLLWERMVAEASSKMVCIADDTKLVEQLGSFPLPIEVIPFGWKATRRSISALLTDLGYTDVKIIQRHRNGQPVVTDSGNFILDAHMVAITDKALLDTNLNWIAGVVENGLFTGIAHEILIASPDGAAKLIELPHRNAARIPEWRK

SEQ ID NO: 41187 - DNA, 660 bp, Haemophilus somnus 129PT
  CDS (1)..(660): transl_table=11
atggatcagttaagcatgaaaaaaatggctgctcaagctgcactgcaatatgttaagcctgatagcattattggcgtaggaagcggttcaactgtcaactgttttattgaagtattaggtacaataaaagaaacaatcaaaggtgctgtcgcagcttcaaaagcatcagaagaattattactccgacaaggtatcgaggtattcagtgcaaatgatgtatccggtttagatatttatgtcgatggtgcagatgaaattaatccgcaaaaaatgatgattaaaggtggcggagcagcattgacacgtgaaaaaattgtagctgcattggcaaaaaaattcatatgtatagtagacagttctaaacaagtggatgtattaggctcaacgttcgctttgccgatagaggtgattccaatggctcgctctcaagttgcacgcaaattagtggcgttgggcggttcacctgaatatcgtgaaaatgtggttacagataatggtaatgttattttagatgtatataactttaaaattatgaatccgatagaaatggaaaaagaattgaataatgtggccggcgtggtaacaaatgggatttttgctttacgttctgcagatattgttattgtaggtacgccggagggtacaaaaattattgaataa

SEQ ID NO: 41188 - protein, 219 aa, Haemophilus somnus 129PT
MDQLSMKKMAAQAALQYVKPDSIIGVGSGSTVNCFIEVLGTIKETIKGAVAASKASEELLLRQGIEVFSANDVSGLDIYVDGADEINPQKMMIKGGGAALTREKIVAALAKKFICIVDSSKQVDVLGSTFALPIEVIPMARSQVARKLVALGGSPEYRENVVTDNGNVILDVYNFKIMNPIEMEKELNNVAGVVTNGIFALRSADIVIVGTPEGTKIIE

SEQ ID NO: 41189 - DNA, 714 bp, Trichodesmium erythraeum IMS101
  CDS (1)..(714): transl_table=11
atggtaacagaacaagacccgaccacgttaatgaaacagcaagtcggcaaagctgctgctgaggaagtaaaatctggtatgatagtaggtttaggcacaggttcaactactgcctacatgattcaatttttaggagaactcctccaaagaggtgaactcaaagatatcaaaggtatccctacctccttccagtcaaccgtattagctaaaaagtatggtgtaccattaacaacccttgatgaagttgattatatggatattgccattgatggggcagatgaagttgacccacaaaaaaatctgattaaaggtggtggagccgctcatactcgtgagaaaattgtagactgtttagcagaaaagtttgttgtcgtagtagatagttctaaactagtagataaattgggttctacttttttattgcccgtagaagttatacccatggcaatgaatcctgtaattcgggcgatcgaaaaattgggtggtcaaccagaagtacggatgggagtgaaaaaggccggacctatagtcacagatcaaggtaatttggttattgatgtcaagtttgattccattgataaccctggggagctagaaaaaagtttaaataatattcctggagttttggaaaatggcttatttgtaggggttgcagatgtaattttagtaggagaaattgacaatggaaaaccaatagttaggacaatttcttaa

SEQ ID NO: 41190 - protein, 237 aa, Trichodesmium erythraeum IMS101
MVTEQDPTTLMKQQVGKAAAEEVKSGMIVGLGTGSTTAYMIQFLGELLQRGELKDIKGIPTSFQSTVLAKKYGVPLTTLDEVDYMDIAIDGADEVDPQKNLIKGGGAAHTREKIVDCLAEKFVVVVDSSKLVDKLGSTFLLPVEVIPMAMNPVIRAIEKLGGQPEVRMGVKKAGPIVTDQGNLVIDVKFDSIDNPGELEKSLNNIPGVLENGLFVGVADVILVGEIDNGKPIVRTIS

SEQ ID NO: 41191 - DNA, 660 bp, Shewanella sp. MR-4
  CDS (1)..(660): transl_table=11
atgactcaagatgaaatgaaaaaagccgctggctgggctgctctcaaatacgttgagaaagacagcattgtgggtgtaggcactggctcaaccgtcaatcactttatcgatgccctcgccaccatgaaggccgatattgaaggtgcggtatcaagctcagaagcctcaacccaaaaaatgaaagcccttggcatcccagtttatgacttaaacagcgtcgataaattatctgtgtatgtcgatggtgccgatgaaatcaacggccatatggacatgatcaaaggcggcggcgcggcattaacccgcgagaaaatcgttgcggctgtggctgaaaagtttgtctgtatcgtggataacactaaacaagtggatattttgggtgaattcccactgcccgttgaagtgatcccaatggcgcgttcttacgtggcccgtgaactcgtcaaactcggcggcgacccagtgtaccgtgaaggcgttgtgactgataacggcaacgtaatcctcgacgtttacaaccttaagatcatcaatcctaaggaattagaagagaagatcaacgccatcgtcggcgtagtgactaacggtttgttcgcgaaacgcggcgccgatgtgttactggttggcacccctgaaggcgtgaaaacctttaccgcttaa

SEQ ID NO: 41192 - protein, 219 aa, Shewanella sp. MR-4
MTQDEMKKAAGWAALKYVEKDSIVGVGTGSTVNHFIDALATMKADIEGAVSSSEASTQKMKALGIPVYDLNSVDKLSVYVDGADEINGHMDMIKGGGAALTREKIVAAVAEKFVCIVDNTKQVDILGEFPLPVEVIPMARSYVARELVKLGGDPVYREGVVTDNGNVILDVYNLKIINPKELEEKINAIVGVVTNGLFAKRGADVLLVGTPEGVKTFTA

SEQ ID NO: 41193 - DNA, 666 bp, Alkalilimnicola ehrlichei MLHE-1
  CDS (1)..(666): transl_table=11
atgatgagcgctgaccagggcaagcgcatggcggccgaggcggccatggagtacgtggaagagaacaccgtgatcggggtgggcaccggctccaccgtcaatttctttatcgacgccctggccgacatgaaggcccgcatcgacggcaccgtgtccagctccgaggcgagcaccgcccggctacgccagtacggcatcccggtgctggacctcaacgaggtgggcaccatgcccatttacgtggacggcgccgatgaatccaaccgcttcctgcagctgatcaagggcggcggtggcgcgctcacccgcgagaagatcgtggccgcggccgccgaacgcttcgtctgcgtggcggacgagtccaagctggtggacgtgctgggcgagttcccgctgccggtggaggtcatccccatggcccgcagctacgtcgcccgtgagctggtcaaactgggcggccggccgcaactgcgctccggtttcaccaccgacaacggcaacgtcatcctggacgtgcgcggcctcaagatcatggagccgatcaagctcgagcagcagatcaacaacatccccggcgtggtcaccaacgggctgttcgccctgcgccccgccgacgtcctgctgctcggcaccgccgagggcgtgcgcaaactcaccgcggagtaa

SEQ ID NO: 41194 - protein, 221 aa, Alkalilimnicola ehrlichei MLHE-1
MMSADQGKRMAAEAAMEYVEENTVIGVGTGSTVNFFIDALADMKARIDGTVSSSEASTARLRQYGIPVLDLNEVGTMPIYVDGADESNRFLQLIKGGGGALTREKIVAAAAERFVCVADESKLVDVLGEFPLPVEVIPMARSYVARELVKLGGRPQLRSGFTTDNGNVILDVRGLKIMEPIKLEQQINNIPGVVTNGLFALRPADVLLLGTAEGVRKLTAE

SEQ ID NO: 41195 - DNA, 711 bp, Hyphomonas neptunium ATCC 15444
  CDS (1)..(711): transl_table=11
ttgccggacatggctagcgacaccgaaaagcagaatgcggccgccgccgcgatggactttgttgaagagggcatgacgattggcctcggcaccggctcaacggcgaaattcttcgtcgagatgctggccgacgagatcgctgatggcctgatcgtgcggtgcatcgaaaccagcaaccagacgcgcgaactggcgcgcagcctcggtgtgccgctgatcccgttcgagcaggtggaccgtatccatctcaccgttgatggcgccgatgaagtcggccccggcggcgtgctgatcaagggcggcggcgccgcgctgctgcgcgaaaagatcatcgccaacgcctccgatcatatggtcgtgattgccgacagctcgaaggaagtgccccatctcggcgcgtttccgctgccggtcgaagtcacgccgttcggctacacgattacggccaagaaggtgcatgacgcgctggtcgcctccggcgtggagcgcccgcgtatcgagctgcgcaaggccgccggcagcactgatcttctggtcacggatggcggaaatcatattctggactgccattgcggccgcattccagaccccgccaagacaggtgcctatctctccggtgtgcccggcgttgtcgagcatggcctgttcatcggcatcgcccgcacggtgatcatcggcgaggaaaatggcgcccatatcattgaatactga

SEQ ID NO: 41196 - protein, 236 aa, Hyphomonas neptunium ATCC 15444
MPDMASDTEKQNAAAAAMDFVEEGMTIGLGTGSTAKFFVEMLADEIADGLIVRCIETSNQTRELARSLGVPLIPFEQVDRIHLTVDGADEVGPGGVLIKGGGAALLREKIIANASDHMVVIADSSKEVPHLGAFPLPVEVTPFGYTITAKKVHDALVASGVERPRIELRKAAGSTDLLVTDGGNHILDCHCGRIPDPAKTGAYLSGVPGVVEHGLFIGIARTVIIGEENGAHIIEY

SEQ ID NO: 41197 - DNA, 699 bp, Rhizobium leguminosarum bv. viciae 3841
  CDS (1)..(699): transl_table=11
atggatgcccgcgaaatgaagatcaaggccgccgaggccgcactcgcccatgtggaaagcgggatgcgtctcgggatcggcaccggcagcacggcggaagaattcgttcgcctgctggcggagaaggtcgcgggcggcttcagggtcgaaggcgttccgacgtccgaacgaaccgcgcggctctgcgtcgaactcggcgtgccgctgaagtcgctcgacgaactgccggcactcgacctgacgatcgatggcgccgacgaggtcgatcaggcgctcaggctgatcaagggcggcggcggcgcgctgttgcgcgaaaaaatcgtcgcggccgcctccgagcgaatgatcgtcattgccgacgagagcaagctggtggaaacgctcggcgctttcgcgctgccgatcgaggtcaatccgttcgggctcgtctcgacgcggatcgcgatcgaaaaggtcgcggcccggctaggtctttccggtgaactcgatctgcgccagtcgggtgacggagagtttaccacggatggcggccatcacatcatcgatgcatcttttggccgcattcctgatgcagaggcgctttcgagcgagctgaattccatacccggcgtcgttgaacacgggctctttatcaatatggcggcacttgcgatcattgccggtcctgcgggtgcgcgcacgctgcaggcaaacagataa

SEQ ID NO: 41198 - protein, 232 aa, Rhizobium leguminosarum bv. viciae 3841
MDAREMKIKAAEAALAHVESGMRLGIGTGSTAEEFVRLLAEKVAGGFRVEGVPTSERTARLCVELGVPLKSLDELPALDLTIDGADEVDQALRLIKGGGGALLREKIVAAASERMIVIADESKLVETLGAFALPIEVNPFGLVSTRIAIEKVAARLGLSGELDLRQSGDGEFTTDGGHHIIDASFGRIPDAEALSSELNSIPGVVEHGLFINMAALAIIAGPAGARTLQANR

SEQ ID NO: 41199 - DNA, 687 bp, Pediococcus pentosaceus ATCC 25745
  CDS (1)..(687): transl_table=11
atggatcaaaacgaattaaaaaaactagttggcgaagaagccgttaaatttattgaagatgggatgactgtgggtttaggtaccggttctactgttaaatttatggtggacgctcttggtgaacgcgttaaaaatgaaaatttaaatatcgttggggtcccaacttccgatcgtacagctgaacaagcccgttcattgggcattaatgttaaatctgttgacgaggttgatcatattgatttaaccattgatggagctgatgaaatcagttctgacttccaaggtatcaaaggtggcggtgccgctcacttgtttgaaaaaattgttgccacaaactcaaaaaaagtaatgtggattgtagatgaatctaaaatggttgatcacttaggggccttcccactccctctagaagtaattccatatggtagcaaacaagtcttcaagaagcttgaaaaagaaggccttcatcctgaatttaggaaaaatgatgctggcgaatatgttttaaccgattctaaaaactacgtaattgatcttcatcttggtgaaattaaacacccgcatcaattagcagattatctaatcaaacaagttggtattgtagaacaaggattgttccttgacatggttaatactgtcattgttggacgccaaaatggtccagaagttttgactgctcgaccataa

SEQ ID NO: 41200 - protein, 228 aa, Pediococcus pentosaceus ATCC 25745
MDQNELKKLVGEEAVKFIEDGMTVGLGTGSTVKFMVDALGERVKNENLNIVGVPTSDRTAEQARSLGINVKSVDEVDHIDLTIDGADEISSDFQGIKGGGAAHLFEKIVATNSKKVMWIVDESKMVDHLGAFPLPLEVIPYGSKQVFKKLEKEGLHPEFRKNDAGEYVLTDSKNYVIDLHLGEIKHPHQLADYLIKQVGIVEQGLFLDMVNTVIVGRQNGPEVLTARP

SEQ ID NO: 41201 - DNA, 699 bp, Oenococcus oeni PSU-1
  CDS (1)..(699): transl_table=11
atggagaaaaatttacagaacgaacttaaaaaagaagccgccattcgggcagctgaatttgttgaaaacgatactgttgttggcctaggtactggatcaacagtcaagtttttggttgatgagttgggacggaaggttagagaagaaaatttatcctttaccggagtgactacttctaagagaactgcttctcaagcggagtctttgggaattaagattgtcagtcttgattcaattccacggattgatctgacgatcgatggagccgatcaggttgataataatttcaatgggatcaagggtgggggagccgctttgctgtgggaaaaaatcgttgccacaaattctaaaaaaaatatctggattgtcgaccaatccaagctggtcgacagaattggaagttttccgcttccggttgaagttattccctttggtgctttacatgtcttaaataaattcgaagagctcaatctcaatccggctttgagattgacggaaaatggaaagaaagtcatgactgattcccaaaattatattatcgatttgcatttaaatcagattattgatccggccaagctttccaatcaattgattaatacagttggcgtggttgagcatggattattcttaaatgtagtcgataaggttgttgttggcaaaaaaggccaacccctcattctggaaaatcccgataaataa

SEQ ID NO: 41202 - protein, 232 aa, Oenococcus oeni PSU-1
MEKNLQNELKKEAAIRAAEFVENDTVVGLGTGSTVKFLVDELGRKVREENLSFTGVTTSKRTASQAESLGIKIVSLDSIPRIDLTIDGADQVDNNFNGIKGGGAALLWEKIVATNSKKNIWIVDQSKLVDRIGSFPLPVEVIPFGALHVLNKFEELNLNPALRLTENGKKVMTDSQNYIIDLHLNQIIDPAKLSNQLINTVGVVEHGLFLNVVDKVVVGKKGQPLILENPDK

SEQ ID NO: 41203 - DNA, 696 bp, Leuconostoc mesenteroides subsp. mesenteroides ATCC 8293
  CDS (1)..(696): transl_table=11
atgaatgaaaaaaatttccaaaaaaaacaagcagccctcgccgctttaaattatatccagaccgatatgattatcggactaggaactggttcaactgtttcttattttttagatgctttagctgcttctcaatataacgtcatcggcgtgaccacttcaacaattactagtcagcgatgcgcagaattaaatattccaattgtcgacattgatgccattgaccatattgatgttacagttgatggtgcagatgaagtcgattcctaccttaacggtataaaaggtggcggagctgccctactgatggagaaaatagtagctaaaaactcaaagaaaaatatctggatcgttgatcgcagtaaagtgcacaacacgctaggttctttcccgctgcccgtagaggttatcccctacggtagcggtcagttgttacgacaatttgccaataaaggtctgttcccaaagctacgtcgtcatcccggaaataaccagcccgttatcactgatgctggtcactacattattgattgccatatgaccacaattaacaatccatatgccctcgccgaatatcttgaaagccaagttggcgttgttgagcacggtttgtttttaaatatttgtgatcgaataattattggcgataacacagtagaaattaaagaacgacagcaagctcatgtggagataaactga

SEQ ID NO: 41204 - protein, 231 aa, Leuconostoc mesenteroides subsp. mesenteroides ATCC 8293
MNEKNFQKKQAALAALNYIQTDMIIGLGTGSTVSYFLDALAASQYNVIGVTTSTITSQRCAELNIPIVDIDAIDHIDVTVDGADEVDSYLNGIKGGGAALLMEKIVAKNSKKNIWIVDRSKVHNTLGSFPLPVEVIPYGSGQLLRQFANKGLFPKLRRHPGNNQPVITDAGHYIIDCHMTTINNPYALAEYLESQVGVVEHGLFLNICDRIIIGDNTVEIKERQQAHVEIN

SEQ ID NO: 41205 - DNA, 669 bp, Azoarcus sp. BH72
  CDS (1)..(669): transl_table=11
atgacccaggacgaactcaagaaagccgccgccctcgccgcactcgactatgtggaggacggaatgatcgtcggcgtcggcaccggctcgacggtgaaccacttcatcgacgggctggccggcatcaagcaccgtatccgcggcgccgtctccagttccgaggccagctccaaacgccttgccgcgcatggcattgcgctgctcgacctcaacgacgtggacgaactgccggtgtatatcgacggcgcggacgaaatcgaccacggcttcgcgatgatcaagggcggcggcggcgcgctcacgcgcgagaagatcgtcgctgcggtcgcacgccgctttgtctgcatctgcgacgaatccaagcgggtggacgtactgggccgctttccgctgccgatcgaggtcatcccgatggcgcgcagccaggtgatgcgtgcggcggcagcgctgggcgcgacgccgcggctgcgcgagggcttcgtgaccgacaacggcaacctgatcatcgacctccatggcctgtcgatcaccgacccgtgcgcaaccgagcaggccctgaacgcggtcgtgggcgtggtcaccaacggcctgttcgcggcgcgcggtgccgacaccctgctgctggccagcgcccaaggcgtgcgccggttcgagcgttccgcaacataa

SEQ ID NO: 41206 - protein, 222 aa, Azoarcus sp. BH72
MTQDELKKAAALAALDYVEDGMIVGVGTGSTVNHFIDGLAGIKHRIRGAVSSSEASSKRLAAHGIALLDLNDVDELPVYIDGADEIDHGFAMIKGGGGALTREKIVAAVARRFVCICDESKRVDVLGRFPLPIEVIPMARSQVMRAAAALGATPRLREGFVTDNGNLIIDLHGLSITDPCATEQALNAVVGVVTNGLFAARGADTLLLASAQGVRRFERSAT

SEQ ID NO: 41207 - DNA, 690 bp, Acidovorax sp. JS42
  CDS (1)..(690): transl_table=11
atgactgcacccacatccctttcccaagacgaactcaagaccctggtcggccaagctgcactgcaatatgtggtgccgggcgaactggtgggcgtggggaccggctctaccgtcaacaagttcattgacgcgctggcatctatcaaggacagcatccgcggcgcggtttccagctccgaagccagtacggcgcggctgaaggcgctgggcatccccgtgctggacgccaacgatgtgcgctcgctgtcggtgtacatcgatggcgccgacgagatcgacggcaacggctacatggtcaagggcggaggggcggccctcacgcgcgagaagatcgtcgccgcgctggcacggcgctttgtgtgcatagcggacgagtccaagctggtgaacgtgctgggcgcgttcccgctgccggtggaggtcattccgatggccgccgcgtacatcgcgcggcgcttcgagtcgctgggggggcaggcgacgctgcgtctcaaggatggccaaccgctcgtgaccgacaacggccaacacatactggatgtgcgcggcctcaccatcagcgatccgctggcgttcgagaccgaggtgaatcaatggccgggggtggtgacggtgggcgtgtttgcgctgcagaaggccaacgtctgcctgctgggcacggcacagggcgtgcgtacgctgtccctgtaa

SEQ ID NO: 41208 - protein, 229 aa, Acidovorax sp. JS42
MTAPTSLSQDELKTLVGQAALQYVVPGELVGVGTGSTVNKFIDALASIKDSIRGAVSSSEASTARLKALGIPVLDANDVRSLSVYIDGADEIDGNGYMVKGGGAALTREKIVAALARRFVCIADESKLVNVLGAFPLPVEVIPMAAAYIARRFESLGGQATLRLKDGQPLVTDNGQHILDVRGLTISDPLAFETEVNQWPGVVTVGVFALQKANVCLLGTAQGVRTLSL

SEQ ID NO: 41209 - DNA, 699 bp, Bifidobacterium longum DJO10A
  CDS (1)..(699): transl_table=11
atggataaggcacagcaggatgcgctgaagaaggcggccggcatcgaagccgccaagctcgttgaaaacggcatgatcgcaggcctcggcactggttcgaccgtgaagttcctggtggacgagctcggccgccgtcatcaggaggaaggtcttgagttcactggcgtaaccacgtctcgccgcacgcaggtccaggctgaaagctacggcatcaagatcgtggacatcgacgacgtggaccacatcgacgtgaccattgacggcgccgacgaagtcgacaagaacttcaacggtatcaagggcggtggcgctgctctgctgtgggagaagatcgtggccaccaactccaaccagatcgtgtggattgtggacgagtccaaggttgtggacaccatcggcaagttcccgctgccggtcgaggtcattccgttcggtgccggccaagtcatcaagaagttcgaggcccgcggctacaagccggtgcttcgtcttgacgccgacggcaaggaagtgcgcaccgacgagaacaacttcgtggtggacctgcacctggagcgcatcgatcacccgcaggagctggccgaagacctcatcaacacggtcggcgtggtggagcacggcctgttcctcaacatggtcgacaaggtcatcgtcggcgacccgaacggcccgcgcgtgatgaccaacgccaacaagtga

SEQ ID NO: 41210 - protein, 232 aa, Bifidobacterium longum DJO10A
MDKAQQDALKKAAGIEAAKLVENGMIAGLGTGSTVKFLVDELGRRHQEEGLEFTGVTTSRRTQVQAESYGIKIVDIDDVDHIDVTIDGADEVDKNFNGIKGGGAALLWEKIVATNSNQIVWIVDESKVVDTIGKFPLPVEVIPFGAGQVIKKFEARGYKPVLRLDADGKEVRTDENNFVVDLHLERIDHPQELAEDLINTVGVVEHGLFLNMVDKVIVGDPNGPRVMTNANK

SEQ ID NO: 41211 - DNA, 660 bp, Haemophilus influenzae R2866
  CDS (1)..(660): transl_table=11
atgaatcaattagaaatgaaaaaactcgccgcacaagctgcattacaatatgtaaaagcagatacgattgttggggtgggaagtggctccacggtgaactgctttattgaagctttaggtacaatcaaagataaaattcaaggtgccgttgcggcttcaaaagaatcagaagaattattacgtaagcaaggtatcgaagtatttaatgcaaatgatgtatctagcttagatatttatgtggatggtgcggatgaaatcaatccacaaaaaatgatgattaaaggcggcggcgcagcactcactcgtgaaaaaatagtcgctgcattagcgaaaaaatttatttgtattgtggattcaagtaagcaagtggatgtgttgggttcaactttcccattaccagttgaagtgattcctatggcacgctcacaagtaggcagaaaattagccgcacttggtggctcacctgaatatcgtgaaggcgtggtgactgacaacggcaatgtgattttagatgtgcacaacttcagtattttaaatccagtcgaaatggaaaaagaattaaacaacgttgctggtgtcgtcactaacggcatctttgcgttgcgtggtgcagatgttgtgatcgtcgggacgcctgagggtgccaaagttattgactaa

SEQ ID NO: 41212 - protein, 219 aa, Haemophilus influenzae R2866
MNQLEMKKLAAQAALQYVKADTIVGVGSGSTVNCFIEALGTIKDKIQGAVAASKESEELLRKQGIEVFNANDVSSLDIYVDGADEINPQKMMIKGGGAALTREKIVAALAKKFICIVDSSKQVDVLGSTFPLPVEVIPMARSQVGRKLAALGGSPEYREGVVTDNGNVILDVHNFSILNPVEMEKELNNVAGVVTNGIFALRGADVVIVGTPEGAKVID

SEQ ID NO: 41213 - DNA, 618 bp, Listeria monocytogenes str. 4b H7858
  CDS (1)..(618): transl_table=11
atggttgtgggccttggaacgggcagtacagtctattacacgattgaaaagcttggagaaatggtaaataatggtttgcatattacaggggtggcaacttctgaagaaacaagcaaacaagcacaaaatttaggaatacctttgaaatcgctaaatgacgtagcggaaatagatattactattgatggtgctgatgaaattgatacggattttcaaggaataaaaggtggaggaggagcactattacgtgaaaaaatggtagcaagtgcgagtttgaaaaacatttgggttgtcagtgaggagaagcttgtaagaaacttagggaagtttcctttgcctatagaagtaataccttttggttggaagcaaattgagagaacacttgaaaaagagcatgttcaaacaattttacggagacaatcttcaggagaaatctatgtgacaaataacgggaactatattttggatatagtaaatcaaacttttagggatgcagaaatgtggcaagaaaaattagcgcaaattccagggattgtggagcatggattatttcttcattatgtggatataattgtttgtgcgaaggcaaatggcgaaatagagctaataaaaaaatag

SEQ ID NO: 41214 - protein, 205 aa, Listeria monocytogenes str. 4b H7858
MVVGLGTGSTVYYTIEKLGEMVNNGLHITGVATSEETSKQAQNLGIPLKSLNDVAEIDITIDGADEIDTDFQGIKGGGGALLREKMVASASLKNIWVVSEEKLVRNLGKFPLPIEVIPFGWKQIERTLEKEHVQTILRRQSSGEIYVTNNGNYILDIVNQTFRDAEMWQEKLAQIPGIVEHGLFLHYVDIIVCAKANGEIELIKK

SEQ ID NO: 41215 - DNA, 702 bp, Crocosphaera watsonii WH 8501
  CDS (1)..(702): transl_table=11
atgtcagatccggttgtcatgatgaaacaagaggtgggtaaagcagccgcagcccgcgttaagtcagattcgattgtgggtttaggcacaggctcaaccactgcctatgccatacaatatatcggtgaacgattacaatcgggagacttaaaaaatattattggtgttaccacctcgtttcaagcagaagtcttggcgagaaagtataatattcctttaagcaccctagatgtggtcgatcgcatcgatatagccatcgatggagccgatgaggttgatcctcagaagaatttaattaagggtggtggtgcagcacatacccaagaaaaaattgtcgatagtttagcagaacagtttattgttgtggttgatggcggtaaactggtggataagttgggttcaactttcctcttgccggtggaagtgattcccaaagccgttgttcctgtgatgcgcaagttggaacaattgggcggtaaaccagatttacgcatgggagttaaaaaagctggcccagtagttacggatcaaggcaacttggtggttgacgtgaagtttgacagtatcgatgaccctgctaccttagaaaaaaccattaataacattcctggtgtcctagaaaatggtttatttgttggggtcactgatgtggtattggtgggcgagattattgataataagcctgttgttcgagaaatttaa

SEQ ID NO: 41216 - protein, 233 aa, Crocosphaera watsonii WH 8501
MSDPVVMMKQEVGKAAAARVKSDSIVGLGTGSTTAYAIQYIGERLQSGDLKNIIGVTTSFQAEVLARKYNIPLSTLDVVDRIDIAIDGADEVDPQKNLIKGGGAAHTQEKIVDSLAEQFIVVVDGGKLVDKLGSTFLLPVEVIPKAVVPVMRKLEQLGGKPDLRMGVKKAGPVVTDQGNLVVDVKFDSIDDPATLEKTINNIPGVLENGLFVGVTDVVLVGEIIDNKPVVREI

SEQ ID NO: 41217 - DNA, 699 bp, Exiguobacterium sibiricum 255-15
  CDS (1)..(699): transl_table=11
atgtatgagcaagagaagaagatgctggcggaagcggcaatcaagcaggtcaagaacggtatgatccttggtctcgggaccggttcgacgacccggagtttcatcgatgccttgggtgaatgggtcaaagcgggcggcgaggtgcaaggggtcgcaacatccaacgagacggttgaacaagcgaaacgattgaacattcccctcctgtcactcgaagaagcaacccatatcgatctcgtcatcgacggcatcgatcagatcgatccacggttccgagtgctcaagggcgggggcggcgcgttattccgggaaaaagtcgtcgcgctgatgagccgggaaatcctctacttagcggacgcctcgaaattcgtgcaccacttgaccggaccgttaccggtcgaaatcgatgcgtttgcgagaccgtatgtcgagcgttatctgcgggacaagcagctggacgtgacattgcgggaacacgatggtcaaccgttcgtgacggatggcggacatttgattctggatgtggatctcgagcgggttcaggatgtccgtcattttgcccaggaactaaaaagtttgacgggggtgctcgaaaccggttatttcgaacggcaaccggatcacgttctgaccgtcgaacagggaaaagtccgacagttggcccacccgaacctccgggacgggggaggacttgtctaa

SEQ ID NO: 41218 - protein, 232 aa, Exiguobacterium sibiricum 255-15
MYEQEKKMLAEAAIKQVKNGMILGLGTGSTTRSFIDALGEWVKAGGEVQGVATSNETVEQAKRLNIPLLSLEEATHIDLVIDGIDQIDPRFRVLKGGGGALFREKVVALMSREILYLADASKFVHHLTGPLPVEIDAFARPYVERYLRDKQLDVTLREHDGQPFVTDGGHLILDVDLERVQDVRHFAQELKSLTGVLETGYFERQPDHVLTVEQGKVRQLAHPNLRDGGGLV

SEQ ID NO: 41219 - DNA, 648 bp, Xylella fastidiosa Ann-1
  CDS (1)..(648): transl_table=11
atgagcgaagcaaaacggcgcgccgccgaaaaggccatcgaatacgtcgagaacgatatgattatcggcgtcggcaccggctcaacagtcgcctacttcatcgacgcactaggacacacccccaaacgcatcaaaggtgcagtatccagctccgaacagagcacagcacatttaaaacaacacggaattgaagtcctggaactcaatcataccggcacactcccactctatgtggacggtgcagacgagtgcgacccgtacaaacgccttatcaaaggaggcggcgcatcattaacacgcgagaagatcatcgctgaagcaagcaaacaattcatttgtatcatcgacccaaacaaacaggtagcaacactaggcaaattcccactacccatcgaagtgatcccaatggcacgcagcttggttgcaaggcaaatcatgacacttaccgacggtcaaccagtatggcgtgaaggggtcattaccgataacggcaacgttatcctggatgtacatcacttatgcatcaccgacccggtaaagctagagcaagaactcaatcaaatcccaggggtcgtctgcgtcggcctgttcgcccgtcgctgtgcggacctagttatcatcggcagcgaaccgccgcacatactctga

SEQ ID NO: 41220 - protein, 215 aa, Xylella fastidiosa Ann-1
MSEAKRRAAEKAIEYVENDMIIGVGTGSTVAYFIDALGHTPKRIKGAVSSSEQSTAHLKQHGIEVLELNHTGTLPLYVDGADECDPYKRLIKGGGASLTREKIIAEASKQFICIIDPNKQVATLGKFPLPIEVIPMARSLVARQIMTLTDGQPVWREGVITDNGNVILDVHHLCITDPVKLEQELNQIPGVVCVGLFARRCADLVIIGSEPPHIL

SEQ ID NO: 41221 - DNA, 675 bp, Streptococcus suis 89/1591
  CDS (1)..(675): transl_table=11
  misc_feature (562)..(562): n is a, g, c or t
atgacaaacctaaaagagcaggttgggattaaggcggcggagtttgtgacggacggtatgattgttgggctggggactggttcgacggcatactatttcgtgcaggagattggccgccgggttgcagaagaagggttacaaatcacaggcgtaacgacctctcatgctacggcagaacatgctgcgtcccttgggattcccctaaaaaatatcgacgaagtcgaatatgtggacttgacggtggatggagcagatgaggttgatggtgacttcaatgggattaaaggcggtggcgcagcgcttctcatggagaaagtggtagcagtcaatagcaaggactgcatctggattgtggatgagtctaaggtggttcaaaccctaggagccttcaagttgccggtggaagttgtacagtacggtgcggaaaatcttttccgactatttgagaaaaaagggtatcgtccaagttttcgtatgcgtaatggagaaaaacatatcacggatatgcagaactttatcattgaccttgatttgcgcagaatagaagacacatatgcattgncggaagaattggatcggaccgtcggtgttgtagaacacggtctctttattggattgatttccaaggtaattgttggtacaccagaaggaccgaacatcatcgaaaagaaataa

SEQ ID NO: 41222 - protein, 224 aa, Streptococcus suis 89/1591
  misc_feature (188)..(188): The Xaa at location 188 stands for Ala, Pro, Ser, or Thr.
MTNLKEQVGIKAAEFVTDGMIVGLGTGSTAYYFVQEIGRRVAEEGLQITGVTTSHATAEHAASLGIPLKNIDEVEYVDLTVDGADEVDGDFNGIKGGGAALLMEKVVAVNSKDCIWIVDESKVVQTLGAFKLPVEVVQYGAENLFRLFEKKGYRPSFRMRNGEKHITDMQNFIIDLDLRRIEDTYALXEELDRTVGVVEHGLFIGLISKVIVGTPEGPNIIEKK

SEQ ID NO: 41223 - DNA, 789 bp, Roseovarius nubinhibens ISM
  CDS (1)..(789): transl_table=11
atgtcaggggaattgtcgcccatcgatcaggccaaattcgtcgccgcgaagaaggcggtggaatatgtcgaggacggcatgcgcgtcgggctcggcactggcagcacggcggcctggatggtgcgatgccttggcgaaatggtgcgcgaggacgggctgcgcatcaagggcgtgccgacctcgacccggaccgccgcgctggcgcaggagttgggcatcgacgtggtcagtctcgacgaggccaaatggctcgacctgacgattgacggggcggatgagttcgatggcgagctgaacctgatcaagggcggcggcggcgcgctcttgcaagaaaagatcgtggccaccgccagcgaccagatgatcgtgatcgccgatgtcggcaaggaggtcgaaagcctcgggcatttcccgctgcccatcgaagtgatcccctttggctggcagacgacccgggcgctggtcgaagaaatgctggtctcgatggatgtgctgggccgcgacgtgacgctgcggatgagcggcgaccggccctatgtgaccgatgagggcaatcacattctcgacctgcatctcggccggatcggcaacccgcgacaattgtcgatggtgctcaatcaagtgccgggggtcgttgaaaacgggctattcattgatatctgtgacattgtctgcgtgggctatggcgatggccgcgtggaagtgcgggacatcaatgacggcacggtgcgccaggaccggctcgatttcgtggaaagcgacaatctgttctcggacctgtcggactga

SEQ ID NO: 41224 - protein, 262 aa, Roseovarius nubinhibens ISM
MSGELSPIDQAKFVAAKKAVEYVEDGMRVGLGTGSTAAWMVRCLGEMVREDGLRIKGVPTSTRTAALAQELGIDVVSLDEAKWLDLTIDGADEFDGELNLIKGGGGALLQEKIVATASDQMIVIADVGKEVESLGHFPLPIEVIPFGWQTTRALVEEMLVSMDVLGRDVTLRMSGDRPYVTDEGNHILDLHLGRIGNPRQLSMVLNQVPGVVENGLFIDICDIVCVGYGDGRVEVRDINDGTVRQDRLDFVESDNLFSDLSD

SEQ ID NO: 41225 - DNA, 789 bp, Oceanicola batsensis HTCC2597
  CDS (1)..(789): transl_table=11
atgtccggagagctgtcgccaatcgacaaggcaaaattcgttgccgccaagcggtccgtcgactttgtcgaggacgggatgcgcgtcggcctcggcaccgggtcgaccgccgcctggatggtccgctgtctcggcgaactggtgcgcgaggacgggctgaggatcaagggcgtgccgacgtccacccgcacggcgcagctggcgcgggaggtgggcatcgaggtgatctcgctcgacgaggcgaagtggctcgacctgacgatcgacggcgcggacgagttcgacagcagcctgaacctgatcaagggcggtggcggcgcgctgctgcaggaaaagatcgtcgcgaccgccagcgaccagatgatcgtgatcgcggatatcggcaagcaggtcgatgcgctcggcgccttcccgctgccgatcgaggtcatccccttcggctggcagacgacccaggcgctggtcgaggagacgctgatctcgatggacgttctgggccgcaactcgaccctgcggatgaacggtcagcgtcccttcgtgacggacgagggcaactacatcctcgatctgcacctcaaccgcatcggcgatgcccgccagctcgccatggtgctgaaccagatgccgggggtggtcgagaacgggctcttcatcgacatctgcgactgcgtcatcgtgggcttcggcgacggccgggtcgaggtgcgcgacatcaatgccggcacggtcgaggagagccggctcgatttcctcgaggacgacaacctgttctcggacctcagcgactga

SEQ ID NO: 41226 - protein, 262 aa, Oceanicola batsensis HTCC2597
MSGELSPIDKAKFVAAKRSVDFVEDGMRVGLGTGSTAAWMVRCLGELVREDGLRIKGVPTSTRTAQLAREVGIEVISLDEAKWLDLTIDGADEFDSSLNLIKGGGGALLQEKIVATASDQMIVIADIGKQVDALGAFPLPIEVIPFGWQTTQALVEETLISMDVLGRNSTLRMNGQRPFVTDEGNYILDLHLNRIGDARQLAMVLNQMPGVVENGLFIDICDCVIVGFGDGRVEVRDINAGTVEESRLDFLEDDNLFSDLSD

SEQ ID NO: 41227 - DNA, 657 bp, Pseudoalteromonas tunicata D2
  CDS (1)..(657): transl_table=11
atgacacaagatgaaatgaaaaaagccgccgcgtgggctgcactcgaatacgtagaaaaagacagcattataggtgtaggcacaggctcaacagtgaaccactttattgatgcccttggcacaataaaaggtgatattcgtggtgcagtatctagctcagaagcctcaaccgaaaaattaaaagcgcttggcattgagatatttgagctcaatgatgttgatggcttaagtgtttatgttgacggtgccgatgaaattaatcccgccaatgaaatgattaaaggcggtggcgctgcactgactcgcgaaaaaattgtcgcagcagtcgctaaaaagtttgtttgtattgttgatagcagcaaacaagtagacgtattaggtaatttcccattaccggttgaagtcattcctatggcacgcagctatgttgccagagaattagttaagttaggtggtgacccaatgtatcgccaaggtgtagtcactgataacggtaatgtcatcttagatgtgtttaatctacagatcagtcaagccaaacaattagagcaacaaattaatcaaatcgtcggtgttgttaccaatggcctgttcgccgctcgtggtgcagacgttgttattgtcggcacccccgatggaccaaaaatactgaaataa

SEQ ID NO: 41228 - protein, 218 aa, Pseudoalteromonas tunicata D2
MTQDEMKKAAAWAALEYVEKDSIIGVGTGSTVNHFIDALGTIKGDIRGAVSSSEASTEKLKALGIEIFELNDVDGLSVYVDGADEINPANEMIKGGGAALTREKIVAAVAKKFVCIVDSSKQVDVLGNFPLPVEVIPMARSYVARELVKLGGDPMYRQGVVTDNGNVILDVFNLQISQAKQLEQQINQIVGVVTNGLFAARGADVVIVGTPDGPKILK

SEQ ID NO: 41229 - DNA, 660 bp, Photobacterium sp. SKA34
  CDS (1)..(660): transl_table=11
atgacacaagatgaaatgaaaaaagcagcaggttgggcagcacttgaatacgtacagaaaggaacaattgtaggtgtaggtactggctctacggttaatcacttcatcgatgccttagcaactcgcaaagaagaaattaaaggtgctgtttcaagttcagtcgcttcaactgaacgtcttgaacaactaggcattactgtatttgatgcgaatgaagttgcttcacttgatatttatgtcgatggtgctgatgaaattaacgcagactacgacatgattaaaggcggtggtgcggcgcttactcgtgaaaaaatcgtggcagccatcgcgaaaaaatttatctgtatcgttgatgacaccaagcaagttgacgtattgggccaattcccgcttccagttgaagtaatccctatggggcgctctttcattggtcgtgagttggtaaaacttggtggcgatccggcttaccgtgaaggcgttgtgaccgataacggtaatatgatccttgatgtctacaacatgaagatcacagatcctaaaacaatggaagataagatcaacgccctacctggtgtggtaactgttggtctatttgctcaccgtggcgctgatgtattattggttggctcacctgacggtgtaaaaaaattcgagaaataa

SEQ ID NO: 41230 - protein, 219 aa, Photobacterium sp. SKA34
MTQDEMKKAAGWAALEYVQKGTIVGVGTGSTVNHFIDALATRKEEIKGAVSSSVASTERLEQLGITVFDANEVASLDIYVDGADEINADYDMIKGGGAALTREKIVAAIAKKFICIVDDTKQVDVLGQFPLPVEVIPMGRSFIGRELVKLGGDPAYREGVVTDNGNMILDVYNMKITDPKTMEDKINALPGVVTVGLFAHRGADVLLVGSPDGVKKFEK

SEQ ID NO: 41231 - DNA, 762 bp, Xanthobacter autotrophicus Py2
  CDS (1)..(762): transl_table=11
atgccccacgccgcgccggttggccgcgcgaggggcaccggaacggaaactcccatggtgcacgccgaagatccgaagcgccgcgcggccgctcacgccctcacctacgtgaccgacggcatgcgcctcggcctcggcaccggctccaccgcccgccatttcgtggagctgttggccgagaaggtccatgccggcctcaacattctcggcgtgcccacctcagagcagactttgtcgcaggcggtctccctcggcgttccgatcgcgacgctcgacgaggccggtccgctcgacctgtgcatcgacggggcggacgaggtcggccccggccttgccctgatcaagggcggcggcggagcgctactgcgggagaagatcgtcgccagcgccgcgcgcgagatggtggtgatcgccgactcgagcaagaaggtggcgatgctcggccgcttcccgctgcccatcgaggtggtggatttcggcgtcgcctccatcgagcgccatgtggccgatgcggtgcgcaaggccggctgcgaaggcccggtgaagctgcgccgcgacggcgatggtcatcctttcgtcaccgatcagggccacctcatcctcgacgtccatctcggccgcatcccggacccggccgcgctcgcccgcgcggtggaggaagtcgccggcgtggtcgagcacgggctgttcctcggcctcgcccgccgggtcgtgctcgcgggcgcggacggcatcaccgtgctggagcccggcagcttctga

SEQ ID NO: 41232 - protein, 253 aa, Xanthobacter autotrophicus Py2
MPHAAPVGRARGTGTETPMVHAEDPKRRAAAHALTYVTDGMRLGLGTGSTARHFVELLAEKVHAGLNILGVPTSEQTLSQAVSLGVPIATLDEAGPLDLCIDGADEVGPGLALIKGGGGALLREKIVASAAREMVVIADSSKKVAMLGRFPLPIEVVDFGVASIERHVADAVRKAGCEGPVKLRRDGDGHPFVTDQGHLILDVHLGRIPDPAALARAVEEVAGVVEHGLFLGLARRVVLAGADGITVLEPGSF

SEQ ID NO: 41233 - DNA, 681 bp, gamma proteobacterium HTCC2207
  CDS (1)..(681): transl_table=11
gtggatcagaatcaattaaaactcgcggtagctgccgctgcagtagagtacacattaagtaagatcaaccccgatagtattgttggaattggtacggggtcaaccgccaactgctttatcgacctactcgccgaacataagaatagctttcaagctgcagtggcaagctctgatgcttcagctgagcgcttgcgcggccatggaatagaggttatcgaactgaatgcagcagcagaaattaccatttatatcgatggcgccgacgaagccaacccccaccttgagctaatcaaaggtggcggtgccgcattgaccagagagaaaattgtcactgcggtggccaatgaatttgtctgcatcgccgatgaaagcaagtgggtcgactttcttggtcagttcccgctgccagtagaagttattccgatggcccgcagtcatgttgccagagaattggtcaagttgggcggcgacccagtgtggcgtgagaacgtgatcaccgacaatggcaatcaaattctcgatgtgcaccacctctatcctgttgcatctgctcaggctctggaagaaaaaattaatcaaatcaccggtgtggttaccaatggcttctttgctcttaaagcagctgatgtattatttttggcaacccagcagggtattgtcactcactacccaaaagcatag

SEQ ID NO: 41234 - protein, 226 aa, gamma proteobacterium HTCC2207
MDQNQLKLAVAAAAVEYTLSKINPDSIVGIGTGSTANCFIDLLAEHKNSFQAAVASSDASAERLRGHGIEVIELNAAAEITIYIDGADEANPHLELIKGGGAALTREKIVTAVANEFVCIADESKWVDFLGQFPLPVEVIPMARSHVARELVKLGGDPVWRENVITDNGNQILDVHHLYPVASAQALEEKINQITGVVTNGFFALKAADVLFLATQQGIVTHYPKA

SEQ ID NO: 41235 - DNA, 669 bp, Rickettsiella grylli
  CDS (1)..(669): transl_table=11
atggaaatacaaaatcttgaacgtttaaaaaaaaaactagcagaaactacattagcgtacattagccccggatccattttaggtctaggcagtggtagcaccatcaatcatctgattaccgcattagccgctattcgacataaaatcgaaggcgtcgttccagcttccttagaaactgaaaaacgattaaaagaacttcatattcctgttttagatctaaatagtgccggagaattaatgctgtatattgatagtgctgatgaagtcaatcctcatttgcaacttattaaaggaggaggaggggcattaacgcgagaaaaaattattgcttccgcaagccagaattttatgtgtattattgatgaaagtaagtatgtcggaatgcttggtcaaaaaggtttaccgcttgaagtgattccaatggcgcgtagttacgttgcgagagagatagtaaaattgggaggatttccttttcttagagataaatttattactgacaatggaaatattatattggatactcagcattgggattttactgaccctattaaacttgaacgtttactcaataatattccaggcgtagtcagtaatggattattcgcccagcgtcctgcaaataaactacttatagccaataaaaacggcatcaaaatcattgaaagttaa

SEQ ID NO: 41236 - protein, 222 aa, Rickettsiella grylli
MEIQNLERLKKKLAETTLAYISPGSILGLGSGSTINHLITALAAIRHKIEGVVPASLETEKRLKELHIPVLDLNSAGELMLYIDSADEVNPHLQLIKGGGGALTREKIIASASQNFMCIIDESKYVGMLGQKGLPLEVIPMARSYVAREIVKLGGFPFLRDKFITDNGNIILDTQHWDFTDPIKLERLLNNIPGVVSNGLFAQRPANKLLIANKNGIKIIES

SEQ ID NO: 41237 - DNA, 678 bp, Oceanobacter sp. RED65
  CDS (1)..(678): transl_table=11
atgaatcaggatcaactcaagcaagcagtcggccaagctgctgtggattacatcaagccgcatctacaaaaagatagcattattggcgtaggcacaggtagcacagcaaattgctttattgatgcccttgcagaactaaagaatgattttgatggcgccgttgccagttccgaggcgaccgctgaaagactaaaaagccatggcattcccgtctatgacttgaattcctctggcactctcgacttttacattgatggtgccgacgaaaccaacgatcacctacagttaattaaaggcggtggtggtgcactaactcgggaaaaaatcgtcgccgcctgtgctaaagaatttatctgtatcgctgatgaaagcaaatgggtcgacttattgggcacattccctttgccggttgaagtcattcccatggcccgttcatatgttgctagagagttggttgctttagggggcgacccggtttaccgccaaggcttcgtaaccgataacggtaatgtcattcttgatgtacacaatatgagtattcaaagcgccacggcattggaggagcgcattaataatattgtgggcgtggtcaccaatggtttatttgcttgtcgacctgctgatgttttattaatgggtacggcagatggtgtcaaaaccatcaaggctaagaactga

SEQ ID NO: 41238 - protein, 225 aa, Oceanobacter sp. RED65
MNQDQLKQAVGQAAVDYIKPHLQKDSIIGVGTGSTANCFIDALAELKNDFDGAVASSEATAERLKSHGIPVYDLNSSGTLDFYIDGADETNDHLQLIKGGGGALTREKIVAACAKEFICIADESKWVDLLGTFPLPVEVIPMARSYVARELVALGGDPVYRQGFVTDNGNVILDVHNMSIQSATALEERINNIVGVVTNGLFACRPADVLLMGTADGVKTIKAKN

SEQ ID NO: 41239 - DNA, 654 bp, Alteromonadales bacterium TW-7
  CDS (1)..(654): transl_table=11
atgacacaagacgaattaaaaaaagcagcagcatgggctgcactcgagtttgtaaaagaaaacacgatagtaggtgtaggcacaggctcaaccgttaatcactttattgatgcccttggcacagttaaagacactttagtaggtgcagtatcaagctctgaagcttctacagcacgtttaaaagagctcggtattgaagtgtttgagctaaacgatatcgatgtactcgatgtttacatcgacggcgcggatgaaattaacgctcaaaacgaaatgattaaaggcggtggtgctgcacttacccgtgaaaaaatagtggctgcagttgctaagcagtttgtgtgtattgttgatgacaccaaactagtagacacattgggggaatttccgcttccagttgaagttattccaatggcgcgcagctacgtagcacgtgagttattaaagttaggcggcgacccagtctaccgccaaggtgtggttaccgataacggcaacgttattttagacgtatataatttaaatattaccaatgctaagcaacttgagacagatataaatcaaattgttggcgtagttaccaatggcctatttgcgatgcgtggtgctgataaagtaattatcggcactaaaaatgggcctcaaattaaatag

SEQ ID NO: 41240 - protein, 217 aa, Alteromonadales bacterium TW-7
MTQDELKKAAAWAALEFVKENTIVGVGTGSTVNHFIDALGTVKDTLVGAVSSSEASTARLKELGIEVFELNDIDVLDVYIDGADEINAQNEMIKGGGAALTREKIVAAVAKQFVCIVDDTKLVDTLGEFPLPVEVIPMARSYVARELLKLGGDPVYRQGVVTDNGNVILDVYNLNITNAKQLETDINQIVGVVTNGLFAMRGADKVIIGTKNGPQIK

SEQ ID NO: 41241 - DNA, 675 bp, marine gamma proteobacterium HTCC2143
  CDS (1)..(675): transl_table=11
atgacacaagatgacctaaaaaaagccgttgcacgcgcagcactggactatattaagcctaaaattgaaaacgatagtgtcatcggtatcggcactggatctaccgctaactacttcattgactatctagctgagattaaaagtcatattaatgccacggttgccagctctgaggcttcggcagacagactgagaaagcatggtatacctgtattcgaactaacctcagtcaacgaaattaccgtctatgttgatggtgccgatgagtcagatccaaatctggcactgataaaaggcgggggcgcggcactaacccgggaaaaaatcgtggctgcatctgctagagaatttgtctgtatagccgacgagagtaaatgtgtagcgcaactgggtaactttccactaccggtagaggtcatcccaatggcgcgttcttttgtcgccagagagttagtgaaaatgggcggtgatccagtttatcgagagggagtagtgactgacaacggcaatattatcatcgacgtcttcaacttcatgatacccaaccccatcgaaactgaacaacatatcaacaatattactggagttgtcactaatggtattttcgcccagcgaccagccgatattctgttggtagcaactagtgaaggtataaaaacgcttcacaaggcgtaa

SEQ ID NO: 41242 - protein, 224 aa, marine gamma proteobacterium HTCC2143
MTQDDLKKAVARAALDYIKPKIENDSVIGIGTGSTANYFIDYLAEIKSHINATVASSEASADRLRKHGIPVFELTSVNEITVYVDGADESDPNLALIKGGGAALTREKIVAASAREFVCIADESKCVAQLGNFPLPVEVIPMARSFVARELVKMGGDPVYREGVVTDNGNIIIDVFNFMIPNPIETEQHINNITGVVTNGIFAQRPADILLVATSEGIKTLHKA

SEQ ID NO: 41243 - DNA, 675 bp, marine gamma proteobacterium HTCC2080
  CDS (1)..(675): transl_table=11
gtggatcagcaagggatgaaggaggccgtagcactggcggcgctcgaatgggtcaaggccctccccggtgacaatctggtattgggtattggtactggcagcacagccgagtgttttatcaggttactgcctgctattaaacagcgcatcaatatcaccgtatcaagctcacagcgctctgcagccttgttacaggaattgcaaattccattgggcgacctcaatgacgtagggcagttagatgcctatattgatggcgctgatgaagccaatcagcggctgcagctcattaagggaggaggcgccgctctgacccgtgaaaaaattattgccgctgccgcgaaacgttttttatgcattgcagatgcgtcaaagaaggtcgcaacgctgggcgcgttcccgttacctgtagaggtgattcccatggcaaggagtttcgtggcccgtgagctggtcaagctaggagggcagcctatttggcgcgacggtgtggtaaccgataacggaaatgtgattctcgacgttcatgggctttcaattgatcacgcgttggaaactgaggaggccattaatcacatcaccggtgtggtttgcagtggtctttttgcccgacggcctgcggatgtactaatgctaggtacccctcaaggcgtagaaactctgcaggctaattga

SEQ ID NO: 41244 - protein, 224 aa, marine gamma proteobacterium HTCC2080
MDQQGMKEAVALAALEWVKALPGDNLVLGIGTGSTAECFIRLLPAIKQRINITVSSSQRSAALLQELQIPLGDLNDVGQLDAYIDGADEANQRLQLIKGGGAALTREKIIAAAAKRFLCIADASKKVATLGAFPLPVEVIPMARSFVARELVKLGGQPIWRDGVVTDNGNVILDVHGLSIDHALETEEAINHITGVVCSGLFARRPADVLMLGTPQGVETLQAN

SEQ ID NO: 41245 - DNA, 675 bp, Pseudomonas putida GB-1
  CDS (1)..(675): transl_table=11
atgacccaggaccaactcaaacaggccgtcgcccaggccgctgtcgacttcattctgcccaagctggatgaaaagagcgttgtcggcgtcggtaccggttcgaccgccaacttcttcatcgacgccctggctcagcacaagaccgccttcgacggcgcagtcgccagctccgaagccactgcccagcgcctgaagggccatggcatcccggtgtacgagctgaacagcgtcagcgagcttgagttctacgtggacggcgccgacgaaagcgacgcgcacctgaacctgatcaagggcggcggcgcagccctgacccgcgagaagatcgtcgcggccgtggccaagaccttcatctgcatcgccgacggtagcaagctggtgcccgtgctgggcgccttcccgctgccggttgaagtgatcccgatggcccgcagccacgtggcgcgccagctggtcaagctgggcggcgacccggtgtaccgcgaaggcgtggtcaccgacaacggcaacgtgatcctcgacgtgcacaacctgcagatcaccaacccggtggagctggaagcgcagatcaacgccatcgttggcgtggtcaccaacggcctgttcgcggcgcgaccggcggacctgctgctgctgggcacctctgaaggtgtgaagagcctgaaggccgagtaa

SEQ ID NO: 41246 - protein, 224 aa, Pseudomonas putida GB-1
MTQDQLKQAVAQAAVDFILPKLDEKSVVGVGTGSTANFFIDALAQHKTAFDGAVASSEATAQRLKGHGIPVYELNSVSELEFYVDGADESDAHLNLIKGGGAALTREKIVAAVAKTFICIADGSKLVPVLGAFPLPVEVIPMARSHVARQLVKLGGDPVYREGVVTDNGNVILDVHNLQITNPVELEAQINAIVGVVTNGLFAARPADLLLLGTSEGVKSLKAE

SEQ ID NO: 41247 - DNA, 1134 bp, Oryza sativa subsp
  CDS (1)..(1134)
atggccgccgccaccgtctccgtccgcttccacccggccgcatccgccgcgcgctgcggcggcggctcgcgccggagcaggcgcctgtccggggtcatcagggcgcagtcggcgccggcttcggcggcggcggcggcgctgacgcaggacgacctgaagaggctggcggcggtgcgcgcggtggagcaggtggagagcgggatggtgctggggctggggaccgggtcgacggcggccttcgccgtcgcggagatcggggcgctgctggcgtccgggaagctgagcggcatcgtcggggtgcccacctccaagcgcacgttcgagcaggcgcagtcgctcggcatcccgctctccaccctcgacgaccacccccgcatcgacctcgccatcgacggcgccgacgaggtcgatccagaccttaaccttgtgaaagggagaggtggtgcccttctccgggagaagatggttgaggcagcatcagacaagttcatcgttgttgttgacgagacaaagctagttaccggcttaggagggagtggtctagccatgcctgtggaggttgtgcagttctgctggaagtacaaccaagtgagattgcaggatctgtttaacgatgaaggatgcgaggcgaagctgagattggatgaaggcggcaaaccctacgttaccgacaactcaaactacatcgttgatttatacttcaagacgccgatcaaggatgcgttggcagcagggaaggagatctcagctttggaaggcgtcgttgagcatgggctgttcctggacatggcgacttcggtgatcatcgctggaacagatggcacgccgatcaaggatgcgttggcagcagggaaggagatctcagctttggaaggcgtccttgagcatgggctgttcctggacatggcgacattcggtgatcatgcgctggaacagatggcgtcagtgtctaaaacaaacgtttgtctgctctccaaagactatctcagagttgcctcctgccgtcttgcacgatttgttggtcaagagacagcccgacagcctgcatttcctcgattggctcgaaacgtatttggctgtgttttgctgcttgtcacactattcacatctaagtttgtaaagcaaaggatgtaa

SEQ ID NO: 41248 - protein, 377 aa, Oryza sativa subsp
MAAATVSVRFHPAASAARCGGGSRRSRRLSGVIRAQSAPASAAAAALTQDDLKRLAAVRAVEQVESGMVLGLGTGSTAAFAVAEIGALLASGKLSGIVGVPTSKRTFEQAQSLGIPLSTLDDHPRIDLAIDGADEVDPDLNLVKGRGGALLREKMVEAASDKFIVVVDETKLVTGLGGSGLAMPVEVVQFCWKYNQVRLQDLFNDEGCEAKLRLDEGGKPYVTDNSNYIVDLYFKTPIKDALAAGKEISALEGVVEHGLFLDMATSVIIAGTDGTPIKDALAAGKEISALEGVLEHGLFLDMATFGDHALEQMASVSKTNVCLLSKDYLRVASCRLARFVGQETARQPAFPRLARNVFGCVLLLVTLFTSKFVKQRM

SEQ ID NO: 41249 - DNA, 897 bp, Ostreococcus tauri
  CDS (1)..(897)
atgcgcgcgacgtcgtcggtgacgcgcggtacgttcgtcccgcgcgcgcgaacgctcggaaagggtcgtggaggcgcgcgtcggacgcgatcgcgggtgatgtcgacgcgggcggcgatgacgcaggatgaattaaaaaagctcgtcggatataaatccgtggacgatcacgtcgagagcggtatggtggtcggtctcggtacgggatcgacggcgtacttcgcggtcgagcgcgtcgggcaaaagctggcgagcggggagctgaagaatgtgatctgcatcccgacgagcgagcgcacgcgcgagcaggcggaatcgctgaagattccgttgtgcacgctgaacgagaagtcggaactcgatgtcgcgatcgatggcgcggatgaggtggatccggcgttggcgttggtcaagggcggcggcggcgcgctgttgcgcgagaagatggtggaggtgatggcgaagaagtttgtcgtcatcgtcgacgagtccaagctctgcaagggactcggaccgggattcccgttgccggtggagatcacgccgttctgccacatgcacacgctgcgtacgatcgcaaagttgcccgcgctcgcgggttgcgaggccatcctccgcatgggatcctcgtcgaacaacaagatcgacggcgataacatcgcggttacggataacggcaactacatcgtcgacttgcacttcaagtccccgatcaaggatccggtcgcggccgcgagccagctcaagaactgcgtcggcgtcgttgatcacggtttgttcgtcgacatggcttaccaagtcatcgttgcgggcagcgatggcatccgcgtcgccggcacggatggcgagaagccgtggtgtttattaatacgaaataacgatgaatccacatcatag

SEQ ID NO: 41250 - protein, 298 aa, Ostreococcus tauri
MRATSSVTRGTFVPRARTLGKGRGGARRTRSRVMSTRAAMTQDELKKLVGYKSVDDHVESGMVVGLGTGSTAYFAVERVGQKLASGELKNVICIPTSERTREQAESLKIPLCTLNEKSELDVAIDGADEVDPALALVKGGGGALLREKMVEVMAKKFVVIVDESKLCKGLGPGFPLPVEITPFCHMHTLRTIAKLPALAGCEAILRMGSSSNNKIDGDNIAVTDNGNYIVDLHFKSPIKDPVAAASQLKNCVGVVDHGLFVDMAYQVIVAGSDGIRVAGTDGEKPWCLLIRNNDESTS

SEQ ID NO: 41251 - DNA, 816 bp, Aedes aegypti
  CDS (1)..(816)
atgttccaacgtttcttcgggacagtttcgctattctctggttctagatctataaaccctctattaagcagtatcgtcgccagccgtgcttcctcgtctgccgcagcaaaaatgagtctggatctggccaaaaagattgccgccttcaaagccgtcgacgagtacgtgcgggataacacggtggtcggagtgggcagcggttccaccgtggtctacgccgtgcaacgcctggccgagcgggttaaaaccgaaggattgaagctggtatgcattcccactagcttccaggcgcgccagttgattatcgaaagcggcctagtgctgggcgacttggagcaacacccgaagatccattgtgccatcgatggggccgatgaagtggacgctgacatggtcctgatcaaaggtggtggaggctgtctgctgcaggagaagattgtggcatcctgtgcggatcagctggtggtcattgctgattatacgaagaattccaagaaactaggagagcagtacaaaaaaggcattccaatcgaggtggttccaatggcgtacgttccgatcaggaacaaagtggcggccaaatatggaggaagtctgaagctacggatggccgtggcgaaagctggtcctgtcgtcactgacaacggtaactttattctggattggcacttcccggaagaaaagttcgattgggacgtcgtcaatcgtgacataatgatgattcctggagtagtggagacggggctgtttgtaaaaatggcaacgaaagcctattttggccttgccgatggatctgtgactgaaagaagcgcctag

SEQ ID NO: 41252 - protein, 271 aa, Aedes aegypti
MFQRFFGTVSLFSGSRSINPLLSSIVASRASSSAAAKMSLDLAKKIAAFKAVDEYVRDNTVVGVGSGSTVVYAVQRLAERVKTEGLKLVCIPTSFQARQLIIESGLVLGDLEQHPKIHCAIDGADEVDADMVLIKGGGGCLLQEKIVASCADQLVVIADYTKNSKKLGEQYKKGIPIEVVPMAYVPIRNKVAAKYGGSLKLRMAVAKAGPVVTDNGNFILDWHFPEEKFDWDVVNRDIMMIPGVVETGLFVKMATKAYFGLADGSVTERSA

SEQ ID NO: 41253 - DNA, 837 bp, Aspergillus oryzae
  CDS (1)..(837)
atggccgatcttatcgaatccgcaaagcgcgcagccggtcaggctgctgtaaagaaccactaccctaaggatgccaagtatgtgggcattggcagtggttccaccattgtctacgttgttgaggccatcaaggagtccggtgtcgacacctcccaaacaaaatacgtacccacaggctatctttccaagcagctcatcgtctccaacggcctgacagccgttgacttcgactctctccccgaaggaaccgtgctggacattgccttcgatggagcggatgaggtcgatgatgacctcaacctgatcaagggcggtggtgcctgtttgttccaggagaagattgtcgccctccaggctaaagaattcgtttgcgttgctgactcccgcaaacttcaatctcgtctcctttcgaactggaagtacattcccatcgaagtggcccccattgctgctagccgtgtccttggagagcttagggaactcggtagcatctcgcctgctcttcgcttgaacactactgctccggaaggcgcacccaagccaacccctttgaagaccgaccaggcctttaacatcattgatgctcccttcaagtctcttcttaccaaggcagacattgcagccggacaagatggcactggaaaggatggagtttgggaagtcgaagccctttctcgggccatcaagcagattcccggtgtcctggatgttggtatcttctccggtgaaactggtccccaggcgcaggctcgtggaggtactggtggtcagaagcctatcgccgcatacttcggtatgcctgacggctccgtgtccgttagaaaggcttctgcttaa

SEQ ID NO: 41254 - protein, 278 aa, Aspergillus oryzae
MADLIESAKRAAGQAAVKNHYPKDAKYVGIGSGSTIVYVVEAIKESGVDTSQTKYVPTGYLSKQLIVSNGLTAVDFDSLPEGTVLDIAFDGADEVDDDLNLIKGGGACLFQEKIVALQAKEFVCVADSRKLQSRLLSNWKYIPIEVAPIAASRVLGELRELGSISPALRLNTTAPEGAPKPTPLKTDQAFNIIDAPFKSLLTKADIAAGQDGTGKDGVWEVEALSRAIKQIPGVLDVGIFSGETGPQAQARGGTGGQKPIAAYFGMPDGSVSVRKASA

SEQ ID NO: 41255 - DNA, 720 bp, uncultured archaeon GZfos1D1
  CDS (1)..(720): transl_table=11
atgaaggatcgaagcagccacgacaccgacggcagcaagagccgcgagaaggaggcgtctgccctatcagcagtaacgctggttgcagacgggatgattgtcggcatcggcacgggttcgaccgcggggtatgcgatagtagaactcgggcggctggttgcccgcgggattgatatcctgtgcgtgccgacctcgtaccagtcagagatgcttgcagcgcagcagaagataccgatcacgacgctttcagagcacccaaagctcgacatcgtgctcgatggtgcggaccagatcgaccgaaatctcgttgcgatcaagggagggggtgctgcgcacacgagagaaaaggtgatcgcgcacgctgcatcgagagtggtgctgatggcagatcacgaaaaagtcgtccccggactcgatcacgcggttccgatcgaggttctgccgtacgcaagaacgcttgtggaacgcgaggtgcgggcactcggcgggatacctgagcttcggatggcagcccggaaggacggtcccgtggtcaccgacaacggaaacttcgtaatcgacgccgactttggcgcgatcgacgatcccgcgcgattgagcggtgagttgagcgcactcgttggtgcaatcgagcacgggatattcttaaatgtggacgaggtgcatatcggcaccgcggatggggtcaaagtgctgaagcggcaagggttacgcaagtaa

SEQ ID NO: 41256 - protein, 239 aa, uncultured archaeon GZfos1D1
MKDRSSHDTDGSKSREKEASALSAVTLVADGMIVGIGTGSTAGYAIVELGRLVARGIDILCVPTSYQSEMLAAQQKIPITTLSEHPKLDIVLDGADQIDRNLVAIKGGGAAHTREKVIAHAASRVVLMADHEKVVPGLDHAVPIEVLPYARTLVEREVRALGGIPELRMAARKDGPVVTDNGNFVIDADFGAIDDPARLSGELSALVGAIEHGIFLNVDEVHIGTADGVKVLKRQGLRK

SEQ ID NO: 41257 - DNA, 777 bp, Oryza sativa subsp
  CDS (1)..(777)
atggccgccgccaccgtctccgtccgcttccacccggccgcatccgccgcgcgttcggcggcggcggcggcgctgacgcaggacgacctgaagaggctggcggcggtgcgcgcggtggagcaggtggagagcgggatggtgctggggctggggaccgggtcgacggcggccttcgccgtcgcggagatcggggcgctgctggcgtccgggaagctgagcggcatcgtcggggtgcccacctccaagcgcacgttcgagcaggcgcagtcgctcggcatcccgctctccaccctcgacgaccacccccgcatcgacctcgccatcgacggcgccgacgaggtcgatccagaccttaaccttgtgaaagggagaggtggtgcccttctccgggagaagatggttgaggcagcatcagacaagttcatcgttgttgttgacgagacaaagctagttaccggcttaggagggagtggtctagccatgcctgtggaggttgtgcagttctgctggaagtacaaccaagtgagattgcaggatctgtttaacgatgaaggatgcgaggcgaagctgagattggatgaaggcggcaaaccctacgttaccgacaactcaaactacatcgttgatttatacttcaagacgccgatcaaggatgcgttggcagcagggaaggagatctcagctttggaaggcgtcgttgagcatgggctgttcctggacatggcgacttcggtgatcatcgctggaacagatggcgtcagtgtcaaaacaaagtga

SEQ ID NO: 41258 - protein, 258 aa, Oryza sativa subsp
MAAATVSVRFHPAASAARSAAAAALTQDDLKRLAAVRAVEQVESGMVLGLGTGSTAAFAVAEIGALLASGKLSGIVGVPTSKRTFEQAQSLGIPLSTLDDHPRIDLAIDGADEVDPDLNLVKGRGGALLREKMVEAASDKFIVVVDETKLVTGLGGSGLAMPVEVVQFCWKYNQVRLQDLFNDEGCEAKLRLDEGGKPYVTDNSNYIVDLYFKTPIKDALAAGKEISALEGVVEHGLFLDMATSVIIAGTDGVSVKTK

SEQ ID NO: 41259 - DNA, 681 bp, Thermoproteus tenax
  CDS (1)..(681): transl_table=11
atgaagcacttactagcgcgtaaagcagcggagtatataagggaggggagcatagtcggcttgggctctggctccacggctaaggcgtttatagaggagctggcgaagagagtgcgcgaggatggcctcaccgtgactctcgtgtccacgagcgtagacagcgagttaaaggccgcagaggtcgggttggataaatatcttgccccactatgggccgtcgataggatcgatatagccgtcgacggcgcggatgagctgaccagagataggctcttcctcaaggggggtggcggcgctatgttccgcgaaaaggtggtggactatagagcatccacgttgataataatagcggagtcgcacaagcttgtggacaggataccggcgcgacatccaatccctattgaggtgcttccggcggcttggagacttgtggcagacgatattgtgaagaggtggggagggaaggctgtgctgagggtgtgccagtgcgggggaaagctgggccccctcgtgacagacaacgggaactatatactcgattgggcccctcctggccccatcgatcccgctctggaggacgaacttagggggatacctggcgtcatagagagcggtatattctcaaagagacgcgacgcggtagtgttgttggccgatgagcggggagtcttcgagctatag

SEQ ID NO: 41260 - protein, 226 aa, Thermoproteus tenax
MKHLLARKAAEYIREGSIVGLGSGSTAKAFIEELAKRVREDGLTVTLVSTSVDSELKAAEVGLDKYLAPLWAVDRIDIAVDGADELTRDRLFLKGGGGAMFREKVVDYRASTLIIIAESHKLVDRIPARHPIPIEVLPAAWRLVADDIVKRWGGKAVLRVCQCGGKLGPLVTDNGNYILDWAPPGPIDPALEDELRGIPGVIESGIFSKRRDAVVLLADERGVFEL

SEQ ID NO: 41261 - DNA, 831 bp, Arabidopsis thaliana
  CDS (1)..(831)
atggcttccttatccttcgtttcctcttctcaccttacgctacgcactccttctattgccctacgcagcactggctcttctcctcgaacctccgtttcattctccgtcaaggctcaatccgtcgcgctttcacaggacgatttgaagaagctcgcggcggagaaagctgtggaggcaattaaacctgggatggttctagggctcggaaccggatccaccgcagctttcgctgttgatcagatcgggaaactactctcttccggtgaactctacgatattgtcggtatcccaacgtcgaaacgaacggaggaacaagcacggtcgttagggattcctcttgttgggttagatacacatccgagaatcgatctcgctattgacggagcagacgaggtagatccgaatcttgatttagtcaaaggtcgtggaggtgctcttctccgtgagaaaatggtggaagctgtggctgacaagtttattgttgtggctgatgataccaaactcgttacaggactcggtggaagtggattagctatgccggtggaagttgttcaattctgctggaactttaatttgattagattgcaagagctcttcaaggaatttggatgtgaatcaaagcttagagttgatggtgatggcaagccttatgtgactgataacagtaattacattattgatttgtattttaagactcctttgaaggatggattcgctgcggctaaagagattgggaagtttcaaggagtggtggagcatggtctgtttctcggaatggctacttctgtcattatcgctggaaagaatggcgttgaagttatgaccaagtga

SEQ ID NO: 41262 - protein, 276 aa, Arabidopsis thaliana
MASLSFVSSSHLTLRTPSIALRSTGSSPRTSVSFSVKAQSVALSQDDLKKLAAEKAVEAIKPGMVLGLGTGSTAAFAVDQIGKLLSSGELYDIVGIPTSKRTEEQARSLGIPLVGLDTHPRIDLAIDGADEVDPNLDLVKGRGGALLREKMVEAVADKFIVVADDTKLVTGLGGSGLAMPVEVVQFCWNFNLIRLQELFKEFGCESKLRVDGDGKPYVTDNSNYIIDLYFKTPLKDGFAAAKEIGKFQGVVEHGLFLGMATSVIIAGKNGVEVMTK

SEQ ID NO: 41263 - DNA, 804 bp, Arabidopsis thaliana
  CDS (1)..(804)
atgggttctgcattcgatccccttgtcacggccactgaggatctcgccgccgtcaactcggcgccgccactctcaaacctcacgcaagaagaactcaagaaaatcgccgcttataaagccgtcgaattcgtcgaatctggaatggttatcggtctcggcactggctccaccgcgaaacacgccgtggctcgtatcagcgagcttctccgagaaggaaaactcaaggatataatcggaatccctacttcaaccacaacgcatgagcaagcggtgtctctagggataccattatccgatctagattcgcatccggtggtggatctatcaatcgatggcgccgacgaagtcgatccggctcttaatctggtgaaaggacgcggcggatcgttattgagagagaagatgattgaaggagcatctaagaagttcgttgtgattgttgatgaatcgaagcttgtcaagtatatcggaggaagcggactcgctgttccggtggaggttgttccgttctgctgcgatttcacaagggggaaactggaagagctatttagagattcgggatgtgttgcgaagctgaggatgaaaatcggatctaacggcgaagaggcggcgccggctgtgacggataatgggaattatgtggtggatttgtatttggagagagatattggagatttagaggtggcgagtgaggcgatattgaggtttcctggagtagtggagcatgggatgtttctgggaatggcgactacgttgatcgtcgccggaaaatttggtgttaccgtcaaggataggtttggataa

SEQ ID NO: 41264 - protein, 267 aa, Arabidopsis thaliana
MGSAFDPLVTATEDLAAVNSAPPLSNLTQEELKKIAAYKAVEFVESGMVIGLGTGSTAKHAVARISELLREGKLKDIIGIPTSTTTHEQAVSLGIPLSDLDSHPVVDLSIDGADEVDPALNLVKGRGGSLLREKMIEGASKKFVVIVDESKLVKYIGGSGLAVPVEVVPFCCDFTRGKLEELFRDSGCVAKLRMKIGSNGEEAAPAVTDNGNYVVDLYLERDIGDLEVASEAILRFPGVVEHGMFLGMATTLIVAGKFGVTVKDRFG

SEQ ID NO: 41265 - DNA, 1118 bp, Spinacia oleracea
  CDS (25)..(894)
ccgctctcaaactcaaactctccaatggcttccgccgctttctctctcctcccctccacctcctccaccacctttaaccgccatgccaccaccaaactcctcaacctcaaattcctccacaaccaccgtaacaaacccttcttcaccaccacaatcaaatctctctcttctccctccccaacaccagtcttaactcaagacgatctcaagaaactcgccgccgaaaaagccgtcgactccgtcaaatccggcatggttctcggtctcggaaccggaagtactgccgcatttgctgtctcgcgaatcggcgagcttctctctgccggaaaactgaccaacatcgttggaattcctacctcgaagcggaccgcagagcaggcggcgtctcttggaattccgctctccgttctcgatgatcatcctcgaattgacctcgccattgatggcgccgatgaggttgatcctgatcttaatctggttaaggggcgcggtggggcgctcttgagagaaaagatggttgaagctgctagtgataaatttattgttgttgttgatgatactaagcttgttgatggtttgggtggtagtcgtcttgctatgcctgttgaagttgttcaattttgctggaaatataatctcaagagattacaggagatctttaaggagctgggttgtgaggcaaaattgagaatggaaggggatagcagtccttatgtgactgacaactcgaattacatcgtggatttatacttcccgacctcgattaaggatgctgaagctgcagggagagaaatttcggccttggaaggcgtagtagaacatgggttgttcttgggtatggctagcgaagtcatcattgctgggaaaactggagttagtgtgaaaaccaagtgatttttgttggtttgattggttgacttccgggtatggaatagtctccctctccccagaatacctacttgttttcattttatatatgttctctctcacttcatgtaatgtttagatgagtttctggggtctggtttgatatttttgcatctgttgtatctgtttattgttttgattttagctaattgtgttatgaagtgtagatgaggaatcaatggcgagagcgg

SEQ ID NO: 41266 - protein, 289 aa, Spinacia oleracea
MASAAFSLLPSTSSTTFNRHATTKLLNLKFLHNHRNKPFFTTTIKSLSSPSPTPVLTQDDLKKLAAEKAVDSVKSGMVLGLGTGSTAAFAVSRIGELLSAGKLTNIVGIPTSKRTAEQAASLGIPLSVLDDHPRIDLAIDGADEVDPDLNLVKGRGGALLREKMVEAASDKFIVVVDDTKLVDGLGGSRLAMPVEVVQFCWKYNLKRLQEIFKELGCEAKLRMEGDSSPYVTDNSNYIVDLYFPTSIKDAEAAGREISALEGVVEHGLFLGMASEVIIAGKTGVSVKTK

SEQ ID NO: 41267 - DNA, 804 bp, Arabidopsis thaliana
  CDS (1)..(804)
atgggttctgcattcgatccccttgtcacggccactgaggatctcgccgccgtcaactcggcgccgccactctcaaacctcacgcaagaagaactcaagaaaatcgccgcttataaagccgtcgaattcgtcgaatctggaatggttatcggtctcggcactggctccaccgcgaaacacgccgtggctcgtatcagcgagcttctccgagaaggaaaactcaaggatataatcggaatccctacttcaaccacaacgcatgagcaagcggtgtctctagggataccattatccgatctagattcgcatccggtggtggatctatcaatcgatggcgccgacgaagtcgatccggctcttaatctggtgaaaggacgcggcggatcgttattgagagagaagatgattgaaggagcatctaagaagttcgttgtgattgttgatgaatcgaagcttgtcaagtatatcggaggaagcggactcgctgttccggtggaggttgttccgttctgctgcgatttcacaagggggaaactggaagagctatttagagattcgggatgtgttgcgaagctgaggatgaaaatcggatctaacggcgaagaggcggcgccggctgtgacggataataggaattatgtggtggatttgtatttggagagagatattggagatttagaggtggcgagtgaggcgatattgaggtttcctggagtagtgaagcatgggatgtttctgggaatggcgactacgttgatcgtcgccggcaaatttggtgttaccgtcaaggataggtttggataa

SEQ ID NO: 41268 - protein, 267 aa, Arabidopsis thaliana
MGSAFDPLVTATEDLAAVNSAPPLSNLTQEELKKIAAYKAVEFVESGMVIGLGTGSTAKHAVARISELLREGKLKDIIGIPTSTTTHEQAVSLGIPLSDLDSHPVVDLSIDGADEVDPALNLVKGRGGSLLREKMIEGASKKFVVIVDESKLVKYIGGSGLAVPVEVVPFCCDFTRGKLEELFRDSGCVAKLRMKIGSNGEEAAPAVTDNRNYVVDLYLERDIGDLEVASEAILRFPGVVKHGMFLGMATTLIVAGKFGVTVKDRFG

SEQ ID NO: 41269 - DNA, 675 bp, Oceanobacillus iheyensis
  CDS (1)..(675): transl_table=11
gtgaatgagcaagataaattaaaaaaagcagttggggaaaaagcggcaactatggtgaaggacggaatgaaagttggattaggatcaggatccactgtatattggatgattcgttcattgggtgaacgtattcaacaagatggcttgaaaattgaaggcattccatcttcaaatcaaacagcaacatgggcagaagaagctggtattccgttaacagatttctcgaatgtgaaagaattagatataacgattgatggggcggatgaagtagatgctaataatcatttgattaagggtgggggagctgcgctttttcgtgaaaaaataattgctcaagctgctaaagagtttgtcataattgtcgatcaatcaaaagtagtagagactctaggagaattttctcttcctgttgaggttctgccattttcatggcaacgaactgcaaatgaaatatctaaattaggttgtgttcctacggttcgtgttcatgaggaggagccactagttaccgataatgggaattatattttagattgtccttttaaagttattccgcatccggataaattaaataaagagattaaatcaattgtaggagtaattgaaacgggcttatttattgatatggctactacggtaattgttggagaaaaagataatatttatataaaataa

SEQ ID NO: 41270 - protein, 224 aa, Oceanobacillus iheyensis
MNEQDKLKKAVGEKAATMVKDGMKVGLGSGSTVYWMIRSLGERIQQDGLKIEGIPSSNQTATWAEEAGIPLTDFSNVKELDITIDGADEVDANNHLIKGGGAALFREKIIAQAAKEFVIIVDQSKVVETLGEFSLPVEVLPFSWQRTANEISKLGCVPTVRVHEEEPLVTDNGNYILDCPFKVIPHPDKLNKEIKSIVGVIETGLFIDMATTVIVGEKDNIYIK

SEQ ID NO: 41271 - DNA, 657 bp, Yersinia pestis
  CDS (1)..(657): transl_table=11
atgactcaggatgaacttaaaaaagcggtgggctgggcagcattagattacgttaaacccggtacgattgtgggtgtcggcacgggttcaactgcggcgcattttattgacgcgctaggctcgattaaacatcagatcgaaggggctgtttccagttctgatgcttcaaccgccaagctgaaaagctatggtatcccagtatttgattgtaatgacgttgatgtattggatatctatgttgatggtgctgacgaaattaacggccaaatgcagatgattaaaggcggtggcgcagcactgacccgagagaagattattgcggctatcgcccggaagtttatctgtattgctgatgaatccaaacaagttggtgtgctgggtaaattccccctgccagtcgaagtgatcccgatggcccgctcttatgtggcgcgtgagctgattaaattgggtggtttgcctgaataccgtcagaatgtcctgaccgataacggtaacgttattctggatgtccacaacttgagtattttggatgctatcgctttagagaaccaaattaatggcattgccggtgtcgtaacggtggggctatttgcgaatcgcggtgctgatgtggccctgattggtacggccaatggcgttaaagtgattggctaa

SEQ ID NO: 41272 - protein, 218 aa, Yersinia pestis
MTQDELKKAVGWAALDYVKPGTIVGVGTGSTAAHFIDALGSIKHQIEGAVSSSDASTAKLKSYGIPVFDCNDVDVLDIYVDGADEINGQMQMIKGGGAALTREKIIAAIARKFICIADESKQVGVLGKFPLPVEVIPMARSYVARELIKLGGLPEYRQNVLTDNGNVILDVHNLSILDAIALENQINGIAGVVTVGLFANRGADVALIGTANGVKVIG

SEQ ID NO: 41273 - DNA, 672 bp, Acinetobacter sp
  CDS (1)..(672): transl_table=11
atgagtctatatgctacccaagatgagaaaaaacaagcagcggcaaaagctgctttaaaacacttaccaaaaggggggattttgggggtaggaacaggaagtaccgtcaattttctgattgaacttttacctgaattacagcttgaagcggcggttgctagctcggaagcaacagctaaacgcctaaaagaattgggtatcgaagtggttgatatgaaccatgtgggtggattggatgcttatgtcgatggtgcagatgaaattgaccgtcatatgcatatgattaaaggggggggggcggcactcacacgtgaaaaaattgtggcatcgattgcaaagaaatttgtgtgtattgttgatgattcaaaatgggtagagcagttaggtcgcgattttccattgccagttgaagtgattccaatggcgcgttctgctgttgcacgcaaacttgtgagtttaggtggagatcccgtatatcgcgaaggcgtggttacagacaacggaaacgtaattttagacgtttataacctgaatattttaaacgcacttgagcttgaaaaaaccattaatgatattcctggtgtagtgaccaatggtatttttgcattaaacgcagcatccattgccattgttgcgaccaataatggtattgaagagcgtacagcagtttaa

SEQ ID NO: 41274 - protein, 223 aa, Acinetobacter sp
MSLYATQDEKKQAAAKAALKHLPKGGILGVGTGSTVNFLIELLPELQLEAAVASSEATAKRLKELGIEVVDMNHVGGLDAYVDGADEIDRHMHMIKGGGAALTREKIVASIAKKFVCIVDDSKWVEQLGRDFPLPVEVIPMARSAVARKLVSLGGDPVYREGVVTDNGNVILDVYNLNILNALELEKTINDIPGVVTNGIFALNAASIAIVATNNGIEERTAV

SEQ ID NO: 41275 - DNA, 714 bp, Aeropyrum pernix
  CDS (1)..(714): transl_table=11
gtgggtggttgtgatcctatggatgaggccgcccggggagcgctcgaccttctaggcaggattggcggggagctcggcgttctcggcgtgggtactggtaggactgtgatgaggtttctccgcgaggccagcgcccgtggggtggagccgggggtggctgtgcccagtagtttcgagactgctgttgagctggctggtttggggtggagtgtgggtgacccccgtgtataccggggggttaacgtttatgttgacggggcggacgaggcagagcccgggagagggtatatggtgaaggggggcgggggggctctgcttggcgagaagatactttcctccaggtcgaagctaaacatattcatagtcggcgaggacaggctcgtggggaggctgggggagaagacgcccgttcctgtggaggtagagcccgggttcgtctcgatggttctcgcaagcctggaggagctgggccttaacccgcgggtgaggacctcgccgggtaaaagggggcctgtggtcagcgactggggcggggttatagtggacctactcacaggccccctggaggaccctcgggggttggagtctatgctcaggaatgtgcctggcgtgagggagacgggcctgttcctcgggctggctgactatattgtcgtggggctgtccagctgcggctacagggttctaggcccctacagggggagggcggtctag

SEQ ID NO: 41276 - protein, 237 aa, Aeropyrum pernix
MGGCDPMDEAARGALDLLGRIGGELGVLGVGTGRTVMRFLREASARGVEPGVAVPSSFETAVELAGLGWSVGDPRVYRGVNVYVDGADEAEPGRGYMVKGGGGALLGEKILSSRSKLNIFIVGEDRLVGRLGEKTPVPVEVEPGFVSMVLASLEELGLNPRVRTSPGKRGPVVSDWGGVIVDLLTGPLEDPRGLESMLRNVPGVRETGLFLGLADYIVVGLSSCGYRVLGPYRGRAV

SEQ ID NO: 41277 - DNA, 696 bp, Agrobacterium tumefaciens
  CDS (1)..(696): transl_table=11
atggatgcccgccagatgaagatcaaggccgccgaggccgcattgtcccatgtgcaggacggcatgcggctgggtatcggcaccggttcgacggccgaggaattcgtccgtcttctggcggagaaggttgcggccggcctgaaggtcgagggcgttcccacatccgagcgtaccgcacgtctgtgcgtcgagcttggcgtgccgctgaaatccctcgatgaattgccggaactggatctgaccatcgacggcgccgacgaagttgatcatgtactacgtctcgtcaagggcggcggcggcgcgctgctgcgcgaaaagatcgtggcggcagcatccggccgcatgatcgtcatcgccgaccagagcaaggtcgtcgagacgctgggcgcctttccgcttcccatcgagatcaatcccttcggccaggtggcgacacgcatcgccattgaaaaactggcggctcggtcgggtctttcgggcgaactgacgatgcgttcttccggcgacggcgccttcatgacggatggcggacacctgatcctcgacgcatcttttggccgtattcctgatgcagaagcactggcacgcgagctgaacactatccccggtgttgttgagcacggacttttcataaatttggcatcgcttgccatcatcgcgggccctgaaggcgcccgcatgatgcaggcagtataa

SEQ ID NO: 41278 - protein, 231 aa, Agrobacterium tumefaciens
MDARQMKIKAAEAALSHVQDGMRLGIGTGSTAEEFVRLLAEKVAAGLKVEGVPTSERTARLCVELGVPLKSLDELPELDLTIDGADEVDHVLRLVKGGGGALLREKIVAAASGRMIVIADQSKVVETLGAFPLPIEINPFGQVATRIAIEKLAARSGLSGELTMRSSGDGAFMTDGGHLILDASFGRIPDAEALARELNTIPGVVEHGLFINLASLAIIAGPEGARMMQAV

SEQ ID NO: 41279 - DNA, 711 bp, Anabaena sp
  CDS (1)..(711): transl_table=11
atgaccgttacagcagaccccgtgactttgatgaagcaagaagtaggcaaagccgccgccgccttggtaaagtccggctcaattgtaggcttaggtacagggtcaactacagcttacacaattcaatatttaggcgatcgcctcaagtctggtgaactaaccgatattgttggtattccgacctcatttcagtcagaagttttgtccaagcaatatggtgttcctctcacaaccttagacgctgtagatcatattgatatcgctattgatggggctgatgaagttgacccccacaaaaacttgattaaaggtggtggtgcagcccatacccgtgaaaaagtggttgattacttagccaatcaattcatcgtcgtagtagatagtggtaaattagtagaccgcttaggttcggtttttgctgtaccagtagaagtcatcccaatggcaatcacccccgtcaccaatgccattaagcaactaggtggcaaaccagaactgcgtatgggtgtaaaaaaagccgggccagtgatcaccgaccaaggtaactttgtcttagatgtccgatttgactctattgacgacccagttaacctcgaaaaaatattgaataatattcctggggttctagagaatggtatcttcgtcaactgtgcagacatagttttagttggtgaagtcaaagacggtcagccactagtcagacgactatag

SEQ ID NO: 41280 - protein, 236 aa, Anabaena sp
MTVTADPVTLMKQEVGKAAAALVKSGSIVGLGTGSTTAYTIQYLGDRLKSGELTDIVGIPTSFQSEVLSKQYGVPLTTLDAVDHIDIAIDGADEVDPHKNLIKGGGAAHTREKVVDYLANQFIVVVDSGKLVDRLGSVFAVPVEVIPMAITPVTNAIKQLGGKPELRMGVKKAGPVITDQGNFVLDVRFDSIDDPVNLEKILNNIPGVLENGIFVNCADIVLVGEVKDGQPLVRRL

SEQ ID NO: 41281 - DNA, 798 bp, Arabidopsis thaliana
  CDS (1)..(798)
atggcgcttgcgtatgatcctctcttcattacatcggacaaatctttgtccgcctttgatgttgcctcttcaccgcctcagcccatgaatttaacacaagacgagctcaaacgtatcgccgcttacaaagccgtggaattcgtcgagtccggcatggttctcggtctcggaaccggctccaccgccaaacacgccgtcgaccgaatcggcgagcttctccgtcaaggcaaactcgagaacatcgttggtataccaacgtctaagaagacgcaggagcaggctctgtctctcggcatccctctctctgatctcgacgcacaccctgtcatcgatctctccatcgacggcgcagacgaggtcgacccttttctcaacctggtaaaaggcagaggagggtctctgcttcgagagaagatgatcgaaggagcttctaagaagtttgtggtgattgttgacgactccaagatggtgaagcatattggtggaagcaagcttgctcttccggtggagatagtgcccttttgctggaagttcacggcggagaagctccggagtctgctggaaggatacgggtgtgaagcgaatcttcggttgggagagaaagggaaggcctttgtgacagacaatgggaattacatagtggatatgcatgtggaagaggatatgggagatttgggagcagtgagtgatgcgattctgaggctaccgggagtagtggaacatgggatgtttctggatatggcttctactgttatcattgcaggtgagcttggtgttaagatcaagaacaaacactga

SEQ ID NO: 41282 - protein, 265 aa, Arabidopsis thaliana
MALAYDPLFITSDKSLSAFDVASSPPQPMNLTQDELKRIAAYKAVEFVESGMVLGLGTGSTAKHAVDRIGELLRQGKLENIVGIPTSKKTQEQALSLGIPLSDLDAHPVIDLSIDGADEVDPFLNLVKGRGGSLLREKMIEGASKKFVVIVDDSKMVKHIGGSKLALPVEIVPFCWKFTAEKLRSLLEGYGCEANLRLGEKGKAFVTDNGNYIVDMHVEEDMGDLGAVSDAILRLPGVVEHGMFLDMASTVIIAGELGVKIKNKH

SEQ ID NO: 41283 - DNA, 678 bp, Archaeoglobus fulgidus
  CDS (1)..(678): transl_table=11
atggactcgagtgggaagtataacgccgcaaagcttgctcttgagcttgtaaaggatggcatggttctcggaatagggagtggttctacagttgaggtgtttctgaacctgctcggagacaaaataagggaggagggactggaaatctacggaattccatcatcataccagtcctacttcgctgcgatcaggaatggggttgaaattgttgacctggttgagttcgagccggacctgtgcattgacggggctgatcaggtagatgccaagctgaactgcataaagggcggcgggggagcgatgacgagggaaaaaatcgttgccaaggcgagcaggaaggttgtgataatcgtggacgagagcaagcttgtggaaaaactgtcaatgcctgtgccggttgaagtgctgcccttcgcttacggatgggttctgagggagattgagaaaatgggatgcaaggcaaggctgagggaaggaaagggaaagattgggccggtgataacggataacggaaattttgttgtggactgcgactttggtgttatagaagaggatagggttgagggtttggagggtgagataaagctgattagcggggttgtcgagaacggtatcttttcgaaagagctgatagatgctgtaattgctgggtcaagtcgatctgcaagatttctttaa

SEQ ID NO: 41284 - protein, 225 aa, Archaeoglobus fulgidus
MDSSGKYNAAKLALELVKDGMVLGIGSGSTVEVFLNLLGDKIREEGLEIYGIPSSYQSYFAAIRNGVEIVDLVEFEPDLCIDGADQVDAKLNCIKGGGGAMTREKIVAKASRKVVIIVDESKLVEKLSMPVPVEVLPFAYGWVLREIEKMGCKARLREGKGKIGPVITDNGNFVVDCDFGVIEEDRVEGLEGEIKLISGVVENGIFSKELIDAVIAGSSRSARFL

SEQ ID NO: 41285 - DNA, 663 bp, Azoarcus sp
  CDS (1)..(663): transl_table=11
atgacccaggacgaactcaagaaggcagccgcgatcgcggcactcgactacgtcgaaaacggaatgatcgtcggcgtcggcaccggctcgaccgtcaatcatttcatcgacggtctggccggcatcaagggccggatcgcgggagcggtgtccagttcggaagccagcgcacgccgcctgcaggcccacggcatcccggttctggatctgaacgacatcaccgacctgccggtgtacgtggatggagccgacgagatcgatggcgggttttgcatgatcaagggcggaggcggcgcgctgacccgcgaaaagatcgtcgcggcggttgcgcgccggttcatctgcatctgcgacgcgagcaagaaggtcgcctgtctcggccgctttccgctgccggtcgagatcattccgatggcccgcgcctacgtcgaacgcgaactggtccggatcggcggtcggcccgaactgcgcgagggattcgtcaccgacaacggcaacctgatcgtggacgtgcacggcttgatgattacctcaccgcgcgcgctcgagaccgagctgaaccagattgtcggggtggtcaccaatggcctgttcgcgcgccgcggcgcggacgtgctgctgctggcaacgctcgccggggtcgagcgacaggttgcaaactga

SEQ ID NO: 41286 - protein, 220 aa, Azoarcus sp
MTQDELKKAAAIAALDYVENGMIVGVGTGSTVNHFIDGLAGIKGRIAGAVSSSEASARRLQAHGIPVLDLNDITDLPVYVDGADEIDGGFCMIKGGGGALTREKIVAAVARRFICICDASKKVACLGRFPLPVEIIPMARAYVERELVRIGGRPELREGFVTDNGNLIVDVHGLMITSPRALETELNQIVGVVTNGLFARRGADVLLLATLAGVERQVAN

SEQ ID NO: 41287 - DNA, 663 bp, Bacillus anthracis
  CDS (1)..(663): transl_table=11
atggatttaaaacagatagctggtgaatatgctgcaaccttcgtaaaagatggtatgaagattggtcttggtacaggatcaaccgcatactggacgatacaaaaattaggtcaacgtgtaaaagagggattatcaattcaagctgtcccgacatcaaaggaaacggaagcattggcacagcagctaaatattccgttgatttcgttaaacgacgtacaaagtcttgatcttacaattgatggagctgatgaaattgattctaatttacagcttattaaaggaggtggtggtgcattacttcgcgagaaaattgtagcctcctcctcgaaagaacttatcattatcgttgatgaatcaaaagttgtgacgcgtttagggacttttccattacctattgaaatcataccttttgcatggaaacaaaccgaaagtaaaattcaatctttaggatgtcaaacaacgttacgcttaaaaaataatgaaacgtttatcaccgataataataacatgattatcgattgtatattccctaatcatatacctactccttccgatttacacaaaagattaaaaatgattactggtgtagttgaaaccggattgtttgttaatatgactagtaaggcgattattggaacaaaaaacgggatacaggaattataa

SEQ ID NO: 41288 - protein, 220 aa, Bacillus anthracis
MDLKQIAGEYAATFVKDGMKIGLGTGSTAYWTIQKLGQRVKEGLSIQAVPTSKETEALAQQLNIPLISLNDVQSLDLTIDGADEIDSNLQLIKGGGGALLREKIVASSSKELIIIVDESKVVTRLGTFPLPIEIIPFAWKQTESKIQSLGCQTTLRLKNNETFITDNNNMIIDCIFPNHIPTPSDLHKRLKMITGVVETGLFVNMTSKAIIGTKNGIQEL

SEQ ID NO: 41289 - DNA, 663 bp, Bacillus cereus
  CDS (1)..(663): transl_table=11
atgaatttaaaacagctcgctggcgaatatgctgctaactttgtaaacgatggcatgaaaattgggcttggtacaggttctactgtatattggacaatacaaaaattaggtgagcgtgtaaaagaaggattatcatttcaagctgtaccaacatcaaaggaaactgaagcattagcacagcaactaaatatccccctaatttcgttaaacgacgtacaaagtcttgatcttacaattgatggagcggatgaaattgattcaaatttacaacttataaaaggcggtggcggtgcattacttcgtgaaaaaatcgttgcctcttcctctaaaaaactaattatcattgctgatgaatcgaaacttgtaacacatttaggtacttttccattacctattgaaatcatccctttttcatggaaacaaaccgaaaataaaattcagtctttaggatgtcaaacaacattacgtttgaaaaacaatgaaacctatataaccgataacaataacatgattatcgattgtatattccctaatcatatttctaatcctgtccatttacacacccaattaaaaatgattactggtgtagttgaaacagggttgtttataagtatgacgagtacagcaattattggtactaaaaatgggataaagaaattgtaa

SEQ ID NO: 41290 - protein, 220 aa, Bacillus cereus
MNLKQLAGEYAANFVNDGMKIGLGTGSTVYWTIQKLGERVKEGLSFQAVPTSKETEALAQQLNIPLISLNDVQSLDLTIDGADEIDSNLQLIKGGGGALLREKIVASSSKKLIIIADESKLVTHLGTFPLPIEIIPFSWKQTENKIQSLGCQTTLRLKNNETYITDNNNMIIDCIFPNHISNPVHLHTQLKMITGVVETGLFISMTSTAIIGTKNGIKKL

SEQ ID NO: 41291 - DNA, 663 bp, Bacillus thuringiensis subsp
  CDS (1)..(663): transl_table=11
atggatttaaaacagatagctggtgaatacgctgcaaccttcgtaaaagatggtatgaaggttggtcttggtacaggatcaaccgcatactggacgatacaaaaattaggtcaacgtgtaaaagagggattatcaattcaagctgtcccgacatcaaaggaaacggaagcattggcacagcagctaaatattccgttgatttcgttaaacgacgtacaaagtcttgatcttacaattgatggagctgatgaaattgattctaatttacagcttattaaaggaggcggtggtgcattacttcgcgagaaaattgtagcctcctcctcgaaagaacttatcattatcgttgatgaatcaaaagttgtgacacgtttagggacttttccattacctattgaaatcataccttttgcatggaaacaaaccgaaagtaaaattcaatctttaggatgtcaaacaacgttacgcttaaaaaataatgaaacgtttataaccgataataataacatgattgtcgattgtatattccctaatcatatacctactccttccgatttacacaaacgattaaaaatgattactggtgtagttgaaactggattgtttgttaatatgactagtaaggcgattattggaacaaaaaacgggatacaggaattataa

SEQ ID NO: 41292 - protein, 220 aa, Bacillus thuringiensis subsp
MDLKQIAGEYAATFVKDGMKVGLGTGSTAYWTIQKLGQRVKEGLSIQAVPTSKETEALAQQLNIPLISLNDVQSLDLTIDGADEIDSNLQLIKGGGGALLREKIVASSSKELIIIVDESKVVTRLGTFPLPIEIIPFAWKQTESKIQSLGCQTTLRLKNNETFITDNNNMIVDCIFPNHIPTPSDLHKRLKMITGVVETGLFVNMTSKAIIGTKNGIQEL

SEQ ID NO: 41293 - DNA, 687 bp, Bacillus clausii
  CDS (1)..(687): transl_table=11
ttggatcagctgaaaagaatggcggcggaagctgctgcagagtatgtgaaagatggcatgaagatcgggctaggttctggttcaacggtgtttgaatttgtccgtgtgttaggagaaaaagcaaaagaagggctgaacatacaagctgtggcggcctcacggaaaacggaagcacttgctaaagcatgtggcatacacatcatcgattttccaacaatggaaaagctagaggtcgcttttgacggagctgatgaaattgcccctggccttatgttattaaaagggggcggcgggtcgcttttacgagaaaaactggtagcggcagcagcgaagcgtctcgtcgtacttgccgatgaaagcaagcttgtagaggagttgggcgctttcaaactaccagtcgagatcattccatttgggtgggaaacaacagccatgcggattgaagcgctaggcggtgtagcgagtttgcggcaaacgggcaaaagcccatttgtttcagataaccataattggatacttgactgtgattttggcaacattcgcgatccttatagcttgcatgaaaaggtgaaaaaacttgttggcgtcgtagaaacaggcctatttttggacatggcttgcgaagccattgtagcaagcaaaaacggtatccatcatataacaaaaggagacgaattcaatgtttga

SEQ ID NO: 41294 - protein, 228 aa, Bacillus clausii
MDQLKRMAAEAAAEYVKDGMKIGLGSGSTVFEFVRVLGEKAKEGLNIQAVAASRKTEALAKACGIHIIDFPTMEKLEVAFDGADEIAPGLMLLKGGGGSLLREKLVAAAAKRLVVLADESKLVEELGAFKLPVEIIPFGWETTAMRIEALGGVASLRQTGKSPFVSDNHNWILDCDFGNIRDPYSLHEKVKKLVGVVETGLFLDMACEAIVASKNGIHHITKGDEFNV

SEQ ID NO: 41295 - DNA, 705 bp, Bartonella quintana
  CDS (1)..(705): transl_table=11
atgaatgttcagcagttaaaaaaaagggcagctgctaaagcacttgagtttgttcaagatgatatgcggcttggtataggaactggttctacagcaaatgaatttattcgccttcttggggagcgtgttgcagatggtttgcgcgtgactggtgttgctacctcacagtattctgagcaactctgtcggaaatttggggtgcctgttactactttggaacaaatgcctgaacttgaccttgatattgatggggcagatgagatcggcccagagatgactctcattaaaggggggggaggagccttatggcgtgaaaaaattgtagcggcggcatctcgggcgatgcttgtcatcgcagatgaaacaaaggtggtaaagacgcttggtgcttttgcattgccaattgaagtcaatccgtttggtatgcctgctacacgcagactcattgaaaaagtagctgatgatttagggctttcaggggaaattatattacgaatgaatggagagaatccttttaaaacagatggtggtcacttcatttttgatgcattttgggggtgcattttacagccaagattattatcggaggcactccttgcaattcctggtgttgtcgagcatggtcttttttggggattggcttcgcgtgcaattgtagcgatggcagatggtcaaataaaagttttagaatcgtctgatttttaa

SEQ ID NO: 41296 - protein, 234 aa, Bartonella quintana
MNVQQLKKRAAAKALEFVQDDMRLGIGTGSTANEFIRLLGERVADGLRVTGVATSQYSEQLCRKFGVPVTTLEQMPELDLDIDGADEIGPEMTLIKGGGGALWREKIVAAASRAMLVIADETKVVKTLGAFALPIEVNPFGMPATRRLIEKVADDLGLSGEIILRMNGENPFKTDGGHFIFDAFWGCILQPRLLSEALLAIPGVVEHGLFWGLASRAIVAMADGQIKVLESSDF

SEQ ID NO: 41297 - DNA, 699 bp, Bifidobacterium longum
  CDS (1)..(699): transl_table=11
atggataaggcacagcaggatgcgctgaagaaggcggccggcatcgaagccgccaagctcgttgaaaacggcatgatcgcaggcctcggcactggttcgaccgtgaagttcctggtggacgagctcggccgccgtcatcaggaggaaggtcttgagttcactggcgtgaccacgtctcgccgcacgcaggcccaggccgagagctacggcatcaagatcgtggacatcgacgacgtggaccacatcgacgtgaccattgacggcgccgacgaagtcgacaagaacttcaacggcatcaagggcggcggcgctgctctgctgtgggagaagatcgtggccaccaactccaaccagatcgtgtggatcgtggacgagtccaaggttgtggacaccatcggcaagttcccgctgccggtcgaggtcattccgttcggtgccggccaagtcatcaagaagttcgaggcccgcggctacaagccggtgcttcgtcttgacgccgacggcaaggaagtgcgcaccgacgagaacaacttcgtggtggacctgcacctggagcgcatcgatcacccgcaggagctggccgaagacctcatcaacacggtcggcgtggtggagcacggcctgttcctcaacatggtcgacaaggtcatcgtcggcgacccgaacggcccgcgcgtgatgaccaacgccaacaagtga

SEQ ID NO: 41298 - protein, 232 aa, Bifidobacterium longum
MDKAQQDALKKAAGIEAAKLVENGMIAGLGTGSTVKFLVDELGRRHQEEGLEFTGVTTSRRTQAQAESYGIKIVDIDDVDHIDVTIDGADEVDKNFNGIKGGGAALLWEKIVATNSNQIVWIVDESKVVDTIGKFPLPVEVIPFGAGQVIKKFEARGYKPVLRLDADGKEVRTDENNFVVDLHLERIDHPQELAEDLINTVGVVEHGLFLNMVDKVIVGDPNGPRVMTNANK

SEQ ID NO: 41299 - DNA, 669 bp, Blochmannia floridanus
  CDS (1)..(669): transl_table=11
atgatatcaaaagataaattaaagaaattagtaggttgggaagctttgaaatatattaaatctaacacaattataggagtaggaactggttctactgttaattattttattgaagctttgagtagtattaaacaacaaatagagggcgtagtatcaagttcgcagcattcatcaaatcagttaaaaaaattaggtattccattatataatttaaataatttaaatgatcttgagatatatattgatagtgcagatgaaattgacttgcatatgcaaatgattaaaggtggaggaggagcgttaacaaaagagaaaattattgcttttgctgctaaaaaatttatttgtattgttgatgatagtaagcaagtaaatatattgggccgtaagggaccgattcctgtagaagttattcctatggctcgttctgtggtatctaaatcattgatttgtttaggagggttacctgaatatcgtaatggagttattacagataatggtaacagtattttagatgtgtacaatatgaatataacggatgcatctttattagaacaaagaattaataatattccaggagtggtaagtgttgggctttttgctcaacgaaaagcagatattgcattaataggtactcaaaaaggaataaaaatattaaatagtaattaa

SEQ ID NO: 41300 - protein, 222 aa, Blochmannia floridanus
MISKDKLKKLVGWEALKYIKSNTIIGVGTGSTVNYFIEALSSIKQQIEGVVSSSQHSSNQLKKLGIPLYNLNNLNDLEIYIDSADEIDLHMQMIKGGGGALTKEKIIAFAAKKFICIVDDSKQVNILGRKGPIPVEVIPMARSVVSKSLICLGGLPEYRNGVITDNGNSILDVYNMNITDASLLEQRINNIPGVVSVGLFAQRKADIALIGTQKGIKILNSN

SEQ ID NO: 41301 - DNA, 681 bp, Bordetella bronchiseptica
  CDS (1)..(681): transl_table=11
atgcttactcagcaagaactcaagcaacaagccgccgaagcggccctcgaattggtcgaacaggtagccgggccggacgtgatcatcggcgtgggcaccggctcgaccgccgatctgttcatcgatggcctggctcgcttcaagggcaggctgcgcggcacggtggccagttccgagcgcagcgcggcgcggctggccggccacggcctggcggtgctggacctcaacgatgtccagagcatgccgatctacgtggacggcgccgacgagatcgatcccaacctgcacatgatcaagggcggcggcggcgcgctgacgcgcgagaagatcgtggcctcggtggcccggcgctacatctgcatcgccgacgagtccaagctggtcgagcggctgggccgctttccgctgccggtggaggtcattcccatggcgcgcaacgccgtggcgcgcggcttgagccggctgggcggccagccggcgctgcgcgaaggcttcgttaccgacaatggcaacatcatcctggacgtggccggcctgtcgatcgccgacgcgccggggctggagaagaccatcaacgacattccgggcgtggtgacctgcggcctgttcgccctggccggcgccgatgtggcgctgctggccacccaggacggcatccgccgcctggagcgccgcggctga

SEQ ID NO: 41302 - protein, 226 aa, Bordetella bronchiseptica
MLTQQELKQQAAEAALELVEQVAGPDVIIGVGTGSTADLFIDGLARFKGRLRGTVASSERSAARLAGHGLAVLDLNDVQSMPIYVDGADEIDPNLHMIKGGGGALTREKIVASVARRYICIADESKLVERLGRFPLPVEVIPMARNAVARGLSRLGGQPALREGFVTDNGNIILDVAGLSIADAPGLEKTINDIPGVVTCGLFALAGADVALLATQDGIRRLERRG

SEQ ID NO: 41303 - DNA, 681 bp, Bordetella pertussis
  CDS (1)..(681): transl_table=11
atgcttactcagcaagaactcaagcaacaagccgccgacgcagccctcgaattggtcgaacaggtagccgggccggacgtgatcatcggcgtgggcaccggctcgaccgccgatctgttcatcgatggcctggcttgcttcaagggcaggctgcgcggcacggtggccagttccgagcgcagcgcggcgcggctggccggccacggcctggcggtgctggacctcaacgatgtccagagcatgccgatctacgtggacggcgccgacgagatcgatcccaacctgcacatgatcaagggcggcggcggcgcgctgacgcgcgagaagatcgtggcctcggtggcccggcgctacatctgcatcgccgacgagtccaagctggtcgagcggctgggccgctttccgctgccggtggaggtcattcccatggcgcgcaacgccgtggcgcgcggcttgagccggctgggcggccagccggcgctgcgcgaaggcttcgttaccgacaatggcaacatcatcctggacgtggccggcctgtcgatcgccgacgcgccggggctggagaagaccatcaacgacattccgggcgtggtgacctgcggcctgttcgccctggccggcgccgatgtggcgctgctggccacccaggacggcatccgccgcctggagcgccgcggctga

SEQ ID NO: 41304 - protein, 226 aa, Bordetella pertussis
MLTQQELKQQAADAALELVEQVAGPDVIIGVGTGSTADLFIDGLACFKGRLRGTVASSERSAARLAGHGLAVLDLNDVQSMPIYVDGADEIDPNLHMIKGGGGALTREKIVASVARRYICIADESKLVERLGRFPLPVEVIPMARNAVARGLSRLGGQPALREGFVTDNGNIILDVAGLSIADAPGLEKTINDIPGVVTCGLFALAGADVALLATQDGIRRLERRG

SEQ ID NO: 41305 - DNA, 726 bp, Bradyrhizobium japonicum
  CDS (1)..(726): transl_table=11
gtgaacatggaccagttgaagcggcaggctgcggcgcgcgccctcgaggaggtgcgtgacggcatgcaactcgggctcggcaccggctcgaccgccaagcatttcgtcgagctgctcggcgagcgcgtcgcggccggactcaaggtgatcggcgtgccgacctccgaggcgacgcgcctcgatgcgacgcgctgcggcgtgccgctgaccacgctcgacgagatcgatcatctcgacatcaccgttgacggcgccgacgagatcgatcccgagctcaacctgatcaagggcggtggcggcgcgctgctgcgcgagaagatcgtggcggccgcatcggatcgcatgatcgtgattgccgacgacaccaaatgggtgccgacgctcggccgctttccgctgccgatcgaggtcatcccgttcgggctcggggcgacgcgccgggcgatcgagacggcatttgcgcagtgcggcgtttccgggcaaatggcggtccgcaaggccaagggtggggacaaggatggccacgttttcgtcaccgatggcggccactggatcctcgatgcccagctcggacggatcgtggatccgcccagcctcgccaaggcgttgagcgccatccccggcgtggtcgagcatgggttgttcatcggcttggccagctcggctgttctggcgggtggcgagggaattcgcgtgattgaacggcgaaagccgaaaggagactag

SEQ ID NO: 41306 - protein, 241 aa, Bradyrhizobium japonicum
MNMDQLKRQAAARALEEVRDGMQLGLGTGSTAKHFVELLGERVAAGLKVIGVPTSEATRLDATRCGVPLTTLDEIDHLDITVDGADEIDPELNLIKGGGGALLREKIVAAASDRMIVIADDTKWVPTLGRFPLPIEVIPFGLGATRRAIETAFAQCGVSGQMAVRKAKGGDKDGHVFVTDGGHWILDAQLGRIVDPPSLAKALSAIPGVVEHGLFIGLASSAVLAGGEGIRVIERRKPKGD

SEQ ID NO: 41307 - DNA, 699 bp, Brucella melitensis
  CDS (1)..(699): transl_table=11
atggatgaagcacgcaagctcaagattgcggcggcagccgaagcgctgacttatgtaaaagacggaatgcggttgggcatcggcaccggctcgacggcggaagaatttgtgcgtctgctggctgaaaaggtgaagggtggctttcgcgtcattggtgttccgacttcggagcgcacagcaaaactgtgtgaggaactgggcgttgcgctcaccacactcgaagaaacgccgcatctggacctgacaattgacggtgcggatgaagttgacggcgaactcagccttatcaagggcggaggcggcgcgctgcttcgcgagaagattgttgctgcggcttccgattccatgatcgtgattgccgaccagtctaaagttgtggaaacgctggggcgttttcccctgccgattgaagtcaaccgcttcggccttggcgcgacaatccgggcgattgaggcggcggctgtaaagtgtggtcttgcagggccgctgaacctgcggttaaaagacggttcacctttcctcaccgacggtgggcactacatcgtggatgcatcttttggccgcattcccgatccaaagacattatctgacgctctcttcgccataccgggcgtagtcgagcatggacttttcatcgaactggcgcgtgcggcgattatcgccggcaccgacggtatccgcaccatgaaccggtcttga

SEQ ID NO: 41308 - protein, 232 aa, Brucella melitensis
MDEARKLKIAAAAEALTYVKDGMRLGIGTGSTAEEFVRLLAEKVKGGFRVIGVPTSERTAKLCEELGVALTTLEETPHLDLTIDGADEVDGELSLIKGGGGALLREKIVAAASDSMIVIADQSKVVETLGRFPLPIEVNRFGLGATIRAIEAAAVKCGLAGPLNLRLKDGSPFLTDGGHYIVDASFGRIPDPKTLSDALFAIPGVVEHGLFIELARAAIIAGTDGIRTMNRS

SEQ ID NO: 41309 - DNA, 672 bp, Buchnera aphidicola subsp
  CDS (1)..(672): transl_table=11
atgaatttaaacaaactaaaaaaaaaagcagcttgggcggcactagattatattgatcctggtacgatcattggagttggaaccggtacaactattttttatttcattgaagcactcggtacgataaaaaatttgatatatggagccgtatctagttctaattcgtctactgttttattaaaaaaacacggtatagaagtttttgatttaaaaaattttagttctcttgctatttatgtcgatagtgccgatgaaatcaataatcatatgcaaatgattaaaggtggaggaggtgctttaacaagagaaaaaattattgcttcaatgtcaaaaaaatttgtttgtattattgacaaatcaaaaaaagtagatgttcttggaacatttcctctaccaattgaaattattccaatggctctttcttatatttttcgagaaatgataaaaattggtggaacgccaaaatatcgtaaaaatgttattacggacaatggaaatataattatagatgtatataatttatgtataaaagatcctatatcgatggaaaaaaaaattaattcattacccggagtagttacagttggtttatttgcttctagaagcgccgatattgttttgattggaacacaaaaaggaatacgaactattaataaaaaagaaaatagataa

SEQ ID NO: 41310 - protein, 223 aa, Buchnera aphidicola subsp
MNLNKLKKKAAWAALDYIDPGTIIGVGTGTTIFYFIEALGTIKNLIYGAVSSSNSSTVLLKKHGIEVFDLKNFSSLAIYVDSADEINNHMQMIKGGGGALTREKIIASMSKKFVCIIDKSKKVDVLGTFPLPIEIIPMALSYIFREMIKIGGTPKYRKNVITDNGNIIIDVYNLCIKDPISMEKKINSLPGVVTVGLFASRSADIVLIGTQKGIRTINKKENR

SEQ ID NO: 41311 - DNA, 660 bp, Buchnera aphidicola subsp
  CDS (1)..(660): transl_table=11
atgaatttaaatgaattaaagaaaaaagcggcatgggctgcgctagattatatctatcctggaactgttataggagtaggaacaggtagtactgttttttattttattcaagctttaagtacagtaaaacatttaatatctggagctgtttctagttctaattcttctacggttttattgaaaaaaaacgggataagggtattagatttaaatacctttgacttcttagaaatttatgtagacagtgcagatgaaattaataatgacatgcaaatgattaaaggtggtggagcagccttgacaaaagaaaaaatcattgctgcgatgtcaaaaaaatttgtttgtattattgatgaatcaaaaaaagtaaatattttaggcacttttccattgcctattgaaattattcctatagcattttcttatatttcaaaagaaatattaaaaataggaggacagccaaaattaagagaaaatattataacagataatggtaatgtaattatagatgtttacaatttatttataaatgatcctatatcagtagaaaaaaaaataaattcactacctggagtagttagcgttggtttatttgcttcgagagttgcagatgttgttttaataggtactcaaaaaggagttgagattatcaaaaattaa

SEQ ID NO: 41312 - protein, 219 aa, Buchnera aphidicola subsp
MNLNELKKKAAWAALDYIYPGTVIGVGTGSTVFYFIQALSTVKHLISGAVSSSNSSTVLLKKNGIRVLDLNTFDFLEIYVDSADEINNDMQMIKGGGAALTKEKIIAAMSKKFVCIIDESKKVNILGTFPLPIEIIPIAFSYISKEILKIGGQPKLRENIITDNGNVIIDVYNLFINDPISVEKKINSLPGVVSVGLFASRVADVVLIGTQKGVEIIKN

SEQ ID NO: 41313 - DNA, 696 bp, Burkholderia mallei
  CDS (1)..(696): transl_table=11
atgacacaagacgaactcaaacgcctcgtcggcgaggccgctgcccgatacgtgaccgaaaacgtgccgcagggcgcggtgatcggcgtcggcacgggctcgaccgccaactgcttcatcgatgcgctcgcggccgtcaaggatcgctatcgcggcgcggtgtcgagttcggtggcgacgaccgagcgcctgaagtcacacggcatcaaggtgttcgatctgaacgagatcgaatcgctgcaggtgtatgtcgacggcgccgacgagatcgacgggagcggcgcgatgatcaagggcggcggcggcgcgctcacgcgcgagaagatcgttgcttcggttgccgaaacgttcgtgtgcatcgccgatgcgagcaagcgcgtggcggtgctcggccagttcccgctgcccgtcgaggtggtgccgatggcgcgcaccgcgatcggccgccggctcgccgcgctgggcggcgtgcccgtgctgcgcgtgaagcaggacggcgcgccgtacgtgaccgacaacggcaacgagattctcgacgtgaagggcctgcggatcgacgatccgcgcgcgctcgaagcggcgatcaacggctggcccggcgtcgtgacggtcgggctgttcgcgcaacgcggcgcggatctctgcctgctcggcaccgagcgcggcgtcgagacgctccgttacgctgcgcattaa

SEQ ID NO: 41314 - protein, 231 aa, Burkholderia mallei
MTQDELKRLVGEAAARYVTENVPQGAVIGVGTGSTANCFIDALAAVKDRYRGAVSSSVATTERLKSHGIKVFDLNEIESLQVYVDGADEIDGSGAMIKGGGGALTREKIVASVAETFVCIADASKRVAVLGQFPLPVEVVPMARTAIGRRLAALGGVPVLRVKQDGAPYVTDNGNEILDVKGLRIDDPRALEAAINGWPGVVTVGLFAQRGADLCLLGTERGVETLRYAAH

SEQ ID NO: 41315 - DNA, 684 bp, Caulobacter crescentus
  CDS (1)..(684): transl_table=11
atgagcgccgacgaccagaagcgcatttcgggcgaagccgccgccgagcttgtcgagaacggcatggtggtcggcctgggcaccggctccacggccgcctggttcgtcaaggcgctggccgcgcgcggcctgaaagacattcgcggcgtgccgacctcggacgccaccgccgccctggcccgcgagctgggcatccccttggcggcgctggacgatgtgaagaccgtcgacctgaccgtggacggcgccgacgagatcggtccgggcctgtcgctgatcaagggcggcggcgcggcgctactgcgcgagaagctggtctgggaagcgtcgacccgctgtgtcgtcatcgctgacgcggccaagcgcgtgccggccttgggcaagttcccgctgcccatcgaggtggtgcgcttcggtcacgtccacaccggctatcgtctcgccgacatcgccgccgagttcgacctgccgcccccgcgcctgcgtacggccgagcgtggcatggtggtcaccgacggcggcaacctgatctacgacatggcctcgggcaagatcgaggatcccacggcgctggctgcggcgctgaagagcgtgaccggcgttgtcgaccacggcctgttccttgacctcgccgatgaggccctggtgggcacggacgagggcgtggtgcgcctgcagccctga

SEQ ID NO: 41316 - protein, 227 aa, Caulobacter crescentus
MSADDQKRISGEAAAELVENGMVVGLGTGSTAAWFVKALAARGLKDIRGVPTSDATAALARELGIPLAALDDVKTVDLTVDGADEIGPGLSLIKGGGAALLREKLVWEASTRCVVIADAAKRVPALGKFPLPIEVVRFGHVHTGYRLADIAAEFDLPPPRLRTAERGMVVTDGGNLIYDMASGKIEDPTALAAALKSVTGVVDHGLFLDLADEALVGTDEGVVRLQP

SEQ ID NO: 41317 - DNA, 720 bp, Chlamydia muridarum
  CDS (1)..(720): transl_table=11
atgtctaaacaagtagctcattctttttcttctgaagatttttcctttataaaacaaaaattagcgcgagaggctgtggctttggtagagcctggaatgcgtgtaggattgggaagtggatctacggcccgagaatttattttggccttaggggagcgtgttcggaatgagcggctagcaattacagctgttgcctcctcaagaatatcacatttgttagcccaagcgttagggattccttttctagatcctgcattatcccaggagttagatttggttgtggatggggctgatgaagtagatgctaatttgcgtatgattaaggggggaggaggagctcttttccgggaaaaaattcttctacaaagtggtaaacgaaatattattctagtagatgagcgcaagctcgtttctgtattagggacatttcctctccctatcgaaatttctccttttggttgttcatcggtggagaaagtacttaatcaacaagggtatattggagattggcgtaaaacttctcacggagaacgttttatcacagataacggcaattatatctatgatgtgagctctccagattcttatcctcatccagaagaagatctgattagattgttacaaattcgtggcattattgatgtcgggtttgttatagcaaaggccgaggtgtgggtaggttacgccgatggtactgtggttcggaaagaaattacgtaa

SEQ ID NO: 41318 - protein, 239 aa, Chlamydia muridarum
MSKQVAHSFSSEDFSFIKQKLAREAVALVEPGMRVGLGSGSTAREFILALGERVRNERLAITAVASSRISHLLAQALGIPFLDPALSQELDLVVDGADEVDANLRMIKGGGGALFREKILLQSGKRNIILVDERKLVSVLGTFPLPIEISPFGCSSVEKVLNQQGYIGDWRKTSHGERFITDNGNYIYDVSSPDSYPHPEEDLIRLLQIRGIIDVGFVIAKAEVWVGYADGTVVRKEIT

SEQ ID NO: 41319 - DNA, 729 bp, Chlamydia trachomatis
  CDS (1)..(729): transl_table=11
atgtctaaacaacccgagaactctttttcttccgacaaatttttccctatcaagcagaaactagcgctagaggcagtagctttggtggagccaggaatgtgtgtggggttagggagcggctcgacggctagagagttcattttggctttaggagatcgtgttcggacagaacgtttggtaatcacagcggtagcctcttcaaggatatctcagctattagctgaagcagtggggattcctttatcggatcattctttattgcaagatgtagacttggtcgtggatggagcggatgaagttgatccttgcttacgtatgatcaaaggaggagggggagctcttttccgagaaaaaattcttcttcagagcgggaagcgcaatgttattctagtagatgaaaggaaacttgttcccacattagggaagttttcattgcctatagagattgctccttttggttgctcttctgtacagaggatattgaataaacagggatactttggagaatggagagaaacttctgcaggagaacgttttatcacggataatggcaattatatttacgatgtgcgtacacccgattcctatgcgaatcccgaagaggatatgattagactattacaaattcgtggcattattgatgtcgggtttgttatagcaaaagccgaggtgtgggtaggttacgccgacggttctattgtccgaaaaaaagaacataatgaatattga

SEQ ID NO: 41320 - protein, 242 aa, Chlamydia trachomatis
MSKQPENSFSSDKFFPIKQKLALEAVALVEPGMCVGLGSGSTAREFILALGDRVRTERLVITAVASSRISQLLAEAVGIPLSDHSLLQDVDLVVDGADEVDPCLRMIKGGGGALFREKILLQSGKRNVILVDERKLVPTLGKFSLPIEIAPFGCSSVQRILNKQGYFGEWRETSAGERFITDNGNYIYDVRTPDSYANPEEDMIRLLQIRGIIDVGFVIAKAEVWVGYADGSIVRKKEHNEY

SEQ ID NO: 41321 - DNA, 660 bp, Chromobacterium violaceum
  CDS (1)..(660): transl_table=11
atgctgacccaggatcaactgaaactcgccgtcgccaagaaggcgctggaattcgtgccggaagacgccatcatcggcgtgggcaccggcagcaccgtcaacctgttcatcgaggaactggccggcatcaagggtcgcatcaagggcgctgtgtccagctcggaggcttccaccgcccgcctgaaggcccatcatatccaggtgttcgatctgaacgaagtggagaaactgtcggtctacatcgacggcgccgacgagatcaaccaccacctgcacatgatcaagggcggcggcgcggcgctgacgcgcgagaagatcgtcgccggcgtcgccgacgagttcatctgcatcgccgacgagaagaagtacgtgaccatgctgggcgccttcccgctgccgatcgaggtgatcccgatggcgcgcagctacgtcgcgcgcgagctggtgaagctgggcggccacccggagctgcgccagggcgtgaccaccgacaacggcaacgtgattctggacgtgcacggcctgcagatcatgaagccggtggagctggaggaaaccatcaaccacatcgccggcgtcgtcacctgcggcctgttcgcccgccgccgcgccgacgtgctgctgctgggcaagcaggacggcgtggaagtgctgcgctga

SEQ ID NO: 41322 - protein, 219 aa, Chromobacterium violaceum
MLTQDQLKLAVAKKALEFVPEDAIIGVGTGSTVNLFIEELAGIKGRIKGAVSSSEASTARLKAHHIQVFDLNEVEKLSVYIDGADEINHHLHMIKGGGAALTREKIVAGVADEFICIADEKKYVTMLGAFPLPIEVIPMARSYVARELVKLGGHPELRQGVTTDNGNVILDVHGLQIMKPVELEETINHIAGVVTCGLFARRRADVLLLGKQDGVEVLR

SEQ ID NO: 41323 - DNA, 663 bp, Coxiella burnetii
  CDS (1)..(663): transl_table=11
atgtcaaaaaacgaacttaaaaaagcagccgctatggaagcgattcaattcgttaagaacgtcaatatcgttggagtaggaaccggttccaccgtcaattatttcatcgacgccttagcggaaattaaacatcaaattgaaggggctgttgcaagctctgtagccactgaaaatcgcttaaaagagcaccgtattccagttgttgaccttaattccgtttccaacgtggatgtctacgtggatggagctgatgaatttaataaacatttttatcttaccaaaggcggcggtggcgccctcacccgtgaaaaaatcatcgcggcagccgctaaacgctttatttgtattgtcgatgaaagtaaacaagtggacgtgctaggacaattccccttgccgattgaagttatcccaatggctcgcagctttgttgcacgtgaaatcgtcaagctcaagggagacccggtttatcgacaaggattcacaacggataacggcaatgtgattttagacattcacaacctgaccatcctcaaccccgttgagttagaggccattctcaataacatcccaggcgtgatcgccaacggcctcttcgcgcagcagcccgccgatgatttgttaataggtaccccggcaggcgttcagcttcatcatagaaaatga

SEQ ID NO: 41324 - protein, 220 aa, Coxiella burnetii
MSKNELKKAAAMEAIQFVKNVNIVGVGTGSTVNYFIDALAEIKHQIEGAVASSVATENRLKEHRIPVVDLNSVSNVDVYVDGADEFNKHFYLTKGGGGALTREKIIAAAAKRFICIVDESKQVDVLGQFPLPIEVIPMARSFVAREIVKLKGDPVYRQGFTTDNGNVILDIHNLTILNPVELEAILNNIPGVIANGLFAQQPADDLLIGTPAGVQLHHRK

SEQ ID NO: 41325 - DNA, 681 bp, Deinococcus radiodurans
  CDS (1)..(681): transl_table=11
atggaccttgaagccctgaaaaaagaagccgctttgcgctccgtcgccctggtccagagcgggcagcgggtcggcctgggcaccggcagcaccgccaaatacgcgattgaagaactaggacgcaagctagcggcgggcgagctgagcggcatcgtgggcgtgtccaccagcgaggcgagcgaaaaactggcgcgcgaggtcggcattccgaccgagccgctcgacccgcgcccgctggacatcgctattgacggcgctgacgagattgcgcccaatctggacctcgtcaaggggctgggcggcgccctggtgcgcgagaagatgaccgaggtgcaggcgaagcggctgattatcatcgctgaccacaccaaactggtgacccggctgggcgagaaggcaccgctgcccatcgagattgtgcccttcggctttctctccaccatcgagcggctgcgcgaatttctgcccggtggccgtctgcggcagcccggcgcgcagccctacgtgaccgacaacggcaactacatcttcgacgcgcagttgcccgccgagtttgacgcccgcgaactggaacgccgcatcaagggcacgctcggggtggtggacaccgggttgttcctgggaatggccgagcgggccttcgtggccgcgccggacggggtgcaggagctgacgcgctga

SEQ ID NO: 41326 - protein, 226 aa, Deinococcus radiodurans
MDLEALKKEAALRSVALVQSGQRVGLGTGSTAKYAIEELGRKLAAGELSGIVGVSTSEASEKLAREVGIPTEPLDPRPLDIAIDGADEIAPNLDLVKGLGGALVREKMTEVQAKRLIIIADHTKLVTRLGEKAPLPIEIVPFGFLSTIERLREFLPGGRLRQPGAQPYVTDNGNYIFDAQLPAEFDARELERRIKGTLGVVDTGLFLGMAERAFVAAPDGVQELTR

SEQ ID NO: 41327 - DNA, 660 bp, Edwardsiella ictaluri
  CDS (1)..(660): transl_table=11
atgacgcaggatgaattgaaaaaagcagtgggctgggcagcgctgaagtatgtgcgccctgggaccattgtcggggtaggcaccggctccaccgcctcacactttattgatgcgctggcgaccatgaagggccagatcgagggtgcggtctccagctctgatgcctccaccgccaggctgaaaagcctggggatcccggtctttgacctcaatgaggtggattcgctggatatctatgtggatggggccgatgagatcaacggcgccatgcagatgatcaagggcggcggcgccgcgctgacacgtgagaagatcgtggcggcggtggccaagaagttcgtctgtatcgtcgatgcctctaaacaggtcgatattctgggtagcttcccgctaccggtcgaggtgatcccgatggcgcgcgcctatgttgcccgtgagctggtgaagctgggcgggcagccggtgtatcgtcagggcgtactgaccgacaatggcaacgtgatcctggatgtacacaacctgcagatcatggagccgtgcaaactggagaacgccattaacgccatcgccggcgtcgtgacggtggggctgtttgccaaccgcggtgccgacgttgcgctggtcggctgcgcggatggcgtcaaaacgctgaccctataa

SEQ ID NO: 41328 - protein, 219 aa, Edwardsiella ictaluri
MTQDELKKAVGWAALKYVRPGTIVGVGTGSTASHFIDALATMKGQIEGAVSSSDASTARLKSLGIPVFDLNEVDSLDIYVDGADEINGAMQMIKGGGAALTREKIVAAVAKKFVCIVDASKQVDILGSFPLPVEVIPMARAYVARELVKLGGQPVYRQGVLTDNGNVILDVHNLQIMEPCKLENAINAIAGVVTVGLFANRGADVALVGCADGVKTLTL

SEQ ID NO: 41329 - DNA, 660 bp, Enterobacter cloacae
  CDS (1)..(660): transl_table=11
atgacgcaggatgaactgaaaaaagcagtaggatgggccgctctccagtacgtgcagccgggtaccattgttggtgtcggtacgggatcaaccgcggcacactttatcgatgcgctgggcacgatgaaggggcaaatcgagggcgcggtttccagctctgatgcttccacggaaaagctgaaaagcctcggcattaccgttttcgatctcaacgaagtggatcgtctggggatttacgttgatggtgcggatgaaatcaacggccacatgcagatgatcaaaggcggcggcgcggcgctgacgcgcgagaagatcatcgcctccgttgcggacaagttcatctgcatcgcggatgcctccaagcaggtcgacattctgggtaatttcccactgccggtcgaagtgatcccaatggcgcgtagcgcggttgcccgtcagctggtgaagctgggcggtcgtccggaataccgtcagggcgtagtcaccgataacggtaacgtgatcctcgacgttcacggtctggaaattcttgacgcgattgcgctggaaaatgccatcaacgctatcccaggcgtagtgaccgtagggctattcgccaaccgtggcgcggatgtggcgctgatcggcaccgctgacggcgtgaaaaccatcgtaaaatga

SEQ ID NO: 41330 - protein, 219 aa, Enterobacter cloacae
MTQDELKKAVGWAALQYVQPGTIVGVGTGSTAAHFIDALGTMKGQIEGAVSSSDASTEKLKSLGITVFDLNEVDRLGIYVDGADEINGHMQMIKGGGAALTREKIIASVADKFICIADASKQVDILGNFPLPVEVIPMARSAVARQLVKLGGRPEYRQGVVTDNGNVILDVHGLEILDAIALENAINAIPGVVTVGLFANRGADVALIGTADGVKTIVK

SEQ ID NO: 41331 - DNA, 681 bp, Enterococcus faecalis
  CDS (1)..(681): transl_table=11
atgaatctgaaacaaatggtaggaatcgaagctgcaaaatatgtagaagacggcatgattgtcggtttgggtactggctcaacagcaaaatttatggtagacgaaattggtcgtcgcgtaaaagaagaaggattgtcaatcgtaggggttactacttcaaaagaaacagagaaacaagccttggccttgggcattcctttaaaaagtattgatgaggttccgtatgtggatcttacgattgatggcgccgatgaaatcagcgctgattttcaaggaatcaaaggcggtggcgctgccttactttttgaaaaaattgtggccacttattcaaagaaatgtatttggattgtggataaatcaaaaatggtggacgatttaggggctttcccgcttccagttgaggttgttccttatggcagccgccaactagtgcatttatttgaagaaaaaggctatcacccaacacttcgtttaaacgctgctggcgaaacattaataacagatggaggccaccatatcatcgatttgcatttagaaaaaattacagatccagaagctttgggttcttatttagacaacttggttggcgtcgttgaacacggcttatttttaaatatggtttctatggtaatcgtcggttatgaagatggaccgaaaaccttacatgttcccgcacgttaa

SEQ ID NO: 41332 - protein, 226 aa, Enterococcus faecalis
MNLKQMVGIEAAKYVEDGMIVGLGTGSTAKFMVDEIGRRVKEEGLSIVGVTTSKETEKQALALGIPLKSIDEVPYVDLTIDGADEISADFQGIKGGGAALLFEKIVATYSKKCIWIVDKSKMVDDLGAFPLPVEVVPYGSRQLVHLFEEKGYHPTLRLNAAGETLITDGGHHIIDLHLEKITDPEALGSYLDNLVGVVEHGLFLNMVSMVIVGYEDGPKTLHVPAR

SEQ ID NO: 41333 - DNA, 675 bp, Francisella tularensis subsp
  CDS (1)..(675): transl_table=11
atgttttttaataaaaaaaataaccaagatgagttaaaaaagcttgccgcaactgaagctgcaaaaagtattactacagaaattactttaggagtcggtacaggaagtactgttggatttttaatcgaagaacttgtaaactatagagacaagatcaaaactgtagtatcaagctcggaagattcaacccgcaaactcaaagcgcttggttttgatgtagttgatcttaattatgctggtgagattgatttatacattgatggtgcagatgagtgcaacaatcacaaagaactcatcaaaggtggtggtgcggctctgacacgtgagaaaatttgtgtggctgctgctaagaaatttatctgtatcattgatgaatcaaaaaaagttaatacattaggtaattttcctcttcctatagaagttatcccaatggcaagaagctatatagcacgtcaaatagtaaagcttggcggtcaaccagtatatagagaacagacaattacagataatggtaatgttattctggatgtatataatctaaaaattgataaccctctaaaacttgaaacagaactaaatcaaatcacaggcgttgtcactaatggcatcttcgctttaaaacctgctgatactgtgattatggctacaaaagatagtaatattgttgtactttaa

SEQ ID NO: 41334 - protein, 224 aa, Francisella tularensis subsp
MFFNKKNNQDELKKLAATEAAKSITTEITLGVGTGSTVGFLIEELVNYRDKIKTVVSSSEDSTRKLKALGFDVVDLNYAGEIDLYIDGADECNNHKELIKGGGAALTREKICVAAAKKFICIIDESKKVNTLGNFPLPIEVIPMARSYIARQIVKLGGQPVYREQTITDNGNVILDVYNLKIDNPLKLETELNQITGVVTNGIFALKPADTVIMATKDSNIVVL

SEQ ID NO: 41335 - DNA, 693 bp, Gloeobacter violaceus
  CDS (1)..(693): transl_table=11
gtggacctcgatatcctcaagcaaacggcggctcggcgcgctgtcgagcttgtcgaagatggcatggtggtcgggctgggcaccggctcgaccgccgcatttgcagtgagcgtcctcgccgagcgagtgcgcctggggctgcgggtggtggggatccccacctcggagcgcaccgcccgccaagctgaggcggagggtattgttctggggacactggcggagcaatccagggtcgatctcaccatcgatggggcggacgaggtggccctgggggagctggcccttatcaagggcctgggtggtgctttgttgcgcgaaaagattgtcgctgccgcgagcgagaggctgattatcatcgtcgatgccaccaagctcgtcgaacagcttggtagccacggcccgctgccggtggaggtggcgccgtttggctggcaggcgaccgcccgcgccctggagcggctcggtgccgaggtgaatctgcgagcccagcatggacaagcgtttctcaccgacggcggccactacatccttgattgtcgttttggaccgatcgcccggccggccgaactcgaagcggccatcgaccgtatcccgggggtggtggaaagcggtctgtttgtcggcatggcaagcgcggtgatcgtagccgacgaggggggtatcgaagtgctcacaccttctgcagcgccttga

SEQ ID NO: 41336 - protein, 230 aa, Gloeobacter violaceus
MDLDILKQTAARRAVELVEDGMVVGLGTGSTAAFAVSVLAERVRLGLRVVGIPTSERTARQAEAEGIVLGTLAEQSRVDLTIDGADEVALGELALIKGLGGALLREKIVAAASERLIIIVDATKLVEQLGSHGPLPVEVAPFGWQATARALERLGAEVNLRAQHGQAFLTDGGHYILDCRFGPIARPAELEAAIDRIPGVVESGLFVGMASAVIVADEGGIEVLTPSAAP

SEQ ID NO: 41337 - DNA, 696 bp, Gluconobacter oxydans
  CDS (1)..(696): transl_table=11
atgagcggtacggatatgaacgttcacaagcgtacggccgcacgtgaagccgcggatatggtcaaaagcggtatggtcgtggggctcgggaccggcagcacggcggcgtacatgatcgagcgtctgggcgagcgcgttgcggaaggcctggagatctttggcattccgacctcggatgacagcgaggacaaggcgctcaaggccggtattccgctgaccgatttcagcgcgcatcgccgcatcgatattgccattgatggcgcggacgaggtccagcgtggttcgctcaatcttatcaaggggctgggcggggcgttgctgcgtgaaaagattgtggcgcaggcagccaagcgtttcgtggtgatcgtggacggcaccaagcccgtggacctgctgggcgaacgggcgccggtgccggtggaagtcatttctttcggctgggaatgtacggcggaacgtctggcggcctgtggcgcacgcggcgtgaagccgaggacggaccgggccggatcgctgttcgtaaccgataccggcaacatgattctggactgccattttggaccgatcgaaaagcccgaggaactggctgagaaaatcgaccggatcgtgggtgtcgtggagcacggcatgtttctcaacatggcgtccgaagtcctcgtggcgacgccggacggtgtggagcactgggagccatga

SEQ ID NO: 41338 - protein, 231 aa, Gluconobacter oxydans
MSGTDMNVHKRTAAREAADMVKSGMVVGLGTGSTAAYMIERLGERVAEGLEIFGIPTSDDSEDKALKAGIPLTDFSAHRRIDIAIDGADEVQRGSLNLIKGLGGALLREKIVAQAAKRFVVIVDGTKPVDLLGERAPVPVEVISFGWECTAERLAACGARGVKPRTDRAGSLFVTDTGNMILDCHFGPIEKPEELAEKIDRIVGVVEHGMFLNMASEVLVATPDGVEHWEP

SEQ ID NO: 41339 - DNA, 687 bp, Haloarcula marismortui
  CDS (1)..(687): transl_table=11
atgaaacagggcggctccgacgcggcgaaacaggcagcgggggaatcagcggctgaagcggtcgaggacgccacggtcgttggcctcggcacggggtcaacggcagcctacgctatccgcgctatcggacaggcggtcgacgccggcctcgatgtcgtcggcgtccccacgtcgtttcagtcccgccagctggcccgtgactgtggcatcccgctggcggacctcgacgacgtgtcggtcgacctcgccatcgacggggccgacgaggtggccagcggcaacctgatcaaaggcggtggcgcggcgcacgcccgggagaagatagtcgacgcgagcgccgaccgcttcctcgtcgtcgctgatccgacgaaagaggcggccgtactctcatatcctgtccccgtcgaggtactcccgatggcccgctcgacagtcgtcacggcagtcgaagaattgggtggtgacccaacactccgccgtgcagaacgtaaggacggccccgtcgtcaccgacaacggaaatctcgtgctcgactgcgacttcaattccatccacgaccccgccgcactcgccagcgacctcgccgcgctgcccggtgttgtcgagcacgggctgttcgtcggtatggctgacgagattcacgtcggcactgctgatggcgtcaccgtccgaacgctttcgaaatag

SEQ ID NO: 41340 - protein, 228 aa, Haloarcula marismortui
MKQGGSDAAKQAAGESAAEAVEDATVVGLGTGSTAAYAIRAIGQAVDAGLDVVGVPTSFQSRQLARDCGIPLADLDDVSVDLAIDGADEVASGNLIKGGGAAHAREKIVDASADRFLVVADPTKEAAVLSYPVPVEVLPMARSTVVTAVEELGGDPTLRRAERKDGPVVTDNGNLVLDCDFNSIHDPAALASDLAALPGVVEHGLFVGMADEIHVGTADGVTVRTLSK

SEQ ID NO: 41341 - DNA, 678 bp, Halobacterium salinarium
  CDS (1)..(678): transl_table=11
atgaaacaggctggcgggagcgccgagcaaaagcggcgggccggggaggcggcggtggccgaggaagtgaccgagggggcggtcgtggggctcggaaccgggagcacggtggcgcacgcgatccgcgcgctgggtgcggaagcgtcggacgtgtcgggggtagcgacgtcgttcgagtcccgacggcgcgccgtcgacgccggagtgacggtaacgagtctagaggcggcgtcggtggacgtcgcgatcgacggcgccgatcaggtggccgacggcgtgctggtgaaaggtggcggggcggcccacacgcgcgagaaatacgtggcggccagcgccgaccgcttcgtggtggtcgccgatccgtccaaggagagcgacgtggtggacgtgccggtgccggtggcggtggtgcctgacgcctggccggtggtcgtcgatcgggttgaggcgctgggcgggacggcgacgctgcgggacgccgagcggaaggacgggccggtggttacggacaccgggagcctcgtggtggactgcgatttcggggccatcgagacccccgaggcggtggcggcgtcgctgtctgcggttccgggcgtcgtcgagcacgggctgttcgtggggatggctgacgccgtctacgtgggaaccgacgacggcgtccgcgtgcgggacccgtaa

SEQ ID NO: 41342 - protein, 225 aa, Halobacterium salinarium
MKQAGGSAEQKRRAGEAAVAEEVTEGAVVGLGTGSTVAHAIRALGAEASDVSGVATSFESRRRAVDAGVTVTSLEAASVDVAIDGADQVADGVLVKGGGAAHTREKYVAASADRFVVVADPSKESDVVDVPVPVAVVPDAWPVVVDRVEALGGTATLRDAERKDGPVVTDTGSLVVDCDFGAIETPEAVAASLSAVPGVVEHGLFVGMADAVYVGTDDGVRVRDP

SEQ ID NO: 41343 - DNA, 672 bp, Idiomarina loihiensis
  CDS (1)..(672): transl_table=11
atgtcaggcaacgctgatgcactcaaaaaagcggcagcagaagctgctatgcaatacattgaagacggcactgtggtcggagtcggcaccggctcaacggtaaacttttttatcgatgccctggccgaacgaaagcatgacatagagggtgcggtatccagctctgaagcctcaaccgagcgcctgaaatcgcacggcattgaagtgtttgagcttaactcggttgtggaggtacccatttacgtagacggggctgacgaaattactgagcacggtcaaatggttaaaggcggcggtggcgcattaacgcgcgagaaaattattgccgcagtagccaggaagtttgtttgcgttgcagatgaaagcaaaatggttggccgcctgggtcaattcccggtgccggttgaagttattcccatggcgcgttcgtacgtggcccgagaaattgtgaagctgggcggagacccggtgtggcgtcagggttttactaccgacaacggcaactggatcctcgatgtgcataacttcgatattatggagccaatgaaacttgaagctgagctgaataatattgtcggcgtggtcactaacgggctgtttgcccagcgcggcgctgatatcgctttaattgctcgtgaagacggagtacaaaccctgaaggtaagtggctaa

SEQ ID NO: 41344 - protein, 223 aa, Idiomarina loihiensis
MSGNADALKKAAAEAAMQYIEDGTVVGVGTGSTVNFFIDALAERKHDIEGAVSSSEASTERLKSHGIEVFELNSVVEVPIYVDGADEITEHGQMVKGGGGALTREKIIAAVARKFVCVADESKMVGRLGQFPVPVEVIPMARSYVAREIVKLGGDPVWRQGFTTDNGNWILDVHNFDIMEPMKLEAELNNIVGVVTNGLFAQRGADIALIAREDGVQTLKVSG

SEQ ID NO: 41345 - DNA, 693 bp, Lactobacillus acidophilus
  CDS (1)..(693): transl_table=11
atggataaaaaagaacaagatcgtttgaaaaaagaagctgctgaaaaagcagcaaatatggttcaatccggcatgatcttaggtgtaggtaccggatctactgtagcctttttcattgatgctttaggtaagcgcaaagatgaagaagatttgaagttgaaggcgatcgtgaccaccagtaatagaagtaagaagcaacttgagagtttaggctttgaagttagcgaacttgctgatattgatcaagctgatttgactgtcgatggatcagatcgtgttgctgataacttagacggaattaaaggcggtggcggtgccttaactcttgaaaagaacgttgccattaactcaaagaagatcgtttggatcgttgatgaatctaagttggttcaccgtttgagcggattccctcttcctgttgaagtattaccaatctcttgtgagcaaaacttcagacgctttgaacaagagggcttgaagccacaatggcgtacggatggtgacaagcgttacatcactcactatggcaactacatcattgatttagcagttgatccaattcctgcccctcatggtttagcagactaccttgatcatactgttggtgtagttgaacatggtttgttccttgatatgtgtgatgaagtaattattgctcatagcgatggtacgattgaagataagattaaataa

SEQ ID NO: 41346 - protein, 230 aa, Lactobacillus acidophilus
MDKKEQDRLKKEAAEKAANMVQSGMILGVGTGSTVAFFIDALGKRKDEEDLKLKAIVTTSNRSKKQLESLGFEVSELADIDQADLTVDGSDRVADNLDGIKGGGGALTLEKNVAINSKKIVWIVDESKLVHRLSGFPLPVEVLPISCEQNFRRFEQEGLKPQWRTDGDKRYITHYGNYIIDLAVDPIPAPHGLADYLDHTVGVVEHGLFLDMCDEVIIAHSDGTIEDKIK

SEQ ID NO: 41347 - DNA, 699 bp, Lactobacillus johnsonii
  CDS (1)..(699): transl_table=11
atgaataagacagagcaagatcaattaaaaaaagaagcagctactaaagcagctaagatggtagagcctaattctgttttaggagttggaacaggctcaacagttgcgttttttatcgatgcattaggtgaacgcaaagaaagagaaggttttagtttaaagcatattgttactacttctaaccgtagtaagaagcaacttgaaggactaggctttaaggttgatgagttagcagatattgatcaagctgatttaacagtagatggcgctgatcgagtagacgataatttagatggaattaaaggcggcggtggtgccttaactttagaaaaaaatgttgccatcaactcgaagaagattatttggattgttgatgaatcaaaactggttcaccatctcagcggtttcccgcttccagttgaagtattaccagtatctgctgaacaaaactttaaacgttttgaagcagaaggtttgaagcctcaatggcgtttaaatgatgagggcaagcgttatgtgacgcattatggtaattacataattgatttagctgctgatccaactcccgtaccacacggtttagctgattatttggaccacactgttggtgtagttgagcacggtttgtttttagacatgtgtgatgaagtcatcattgcacatagtgatggtacaattgaagataagaagagaaaataa

SEQ ID NO: 41348 - protein, 232 aa, Lactobacillus johnsonii
MNKTEQDQLKKEAATKAAKMVEPNSVLGVGTGSTVAFFIDALGERKEREGFSLKHIVTTSNRSKKQLEGLGFKVDELADIDQADLTVDGADRVDDNLDGIKGGGGALTLEKNVAINSKKIIWIVDESKLVHHLSGFPLPVEVLPVSAEQNFKRFEAEGLKPQWRLNDEGKRYVTHYGNYIIDLAADPTPVPHGLADYLDHTVGVVEHGLFLDMCDEVIIAHSDGTIEDKKRK

SEQ ID NO: 41349 - DNA, 675 bp, Lactococcus lactis subsp
  CDS (1)..(675): transl_table=11
atggataatttaaaaaaacaagtcggcataaaagctgctgaatttgttaaatcgggaatggtcgttggtttaggaactgggtcaacagcagcctattttgtcgaagaattgggtcgaagaattgccgaagaacaattggaaattacgggtgtaacaacgtccaatgtaacaagtagccaagccagagctcttggaattcctttagcctctattgacgaagtagattatgttgatttaacagttgatggcgcagatgaaattgattcttcactaaatggtattaaaggtggtggagcagcacttctaatggaaaaaattgttgcaacctactcaaaagactatatttggattgttgatgaaagtaaattatcagaaaatctaggatcctttaaaattcctgtagaagttattccttatggctcacaacaagtttttaaaaaattcgaagcggctggctatgctccaacttggcgtctaaatgaggaaaacgagagattgataacggatatgcatcactttattattgaccttcatatctctcaaattaaagaaccagaaaaacttgctgaagagcttgatttaatgggtggagttgttgaacacggcctctttaataacatggttaaaaaagtgattgttgctggcaacgaaggcgtaagaataataaataagtaa

SEQ ID NO: 41350 - protein, 224 aa, Lactococcus lactis subsp
MDNLKKQVGIKAAEFVKSGMVVGLGTGSTAAYFVEELGRRIAEEQLEITGVTTSNVTSSQARALGIPLASIDEVDYVDLTVDGADEIDSSLNGIKGGGAALLMEKIVATYSKDYIWIVDESKLSENLGSFKIPVEVIPYGSQQVFKKFEAAGYAPTWRLNEENERLITDMHHFIIDLHISQIKEPEKLAEELDLMGGVVEHGLFNNMVKKVIVAGNEGVRIINK

SEQ ID NO: 41351 - DNA, 684 bp, Lactobacillus plantarum
  CDS (1)..(684): transl_table=11
atgaatcaggatcagttaaaacaacttgttggtcaaaaagccgttgaatacattcaagacggcatgcaggtcggcctcggaaccggctcaaccgttaaattcatggttgatgctctgggtgaacgggtcaaaaatgaacatttaaacattgtcggcgtctcaacctccgaccgaaccgctgcccaagctaaggcgctcggtatcccgatgaaatccgttgacgaagtcgaccatctcgacttaacgatcgacggtgccgacgaaatcgccgatgatttccaaggcgttaagggtggtggcgccgccttactcttcgaaaaaatcgttgccatcaattctgataaagtcatgtggattgttgatgaaagcaaaatggtccatcaattaggtgcctttggcttacccgttgaagtgattccttacggcagccaacatgtctttgaaaaaatggctgcccggggctataacccagtattccgtaaagtcaacgatgaactcgtccggaccgattctaataatattatcatcgatttacacatcgacccaatcacggatccccacgctttagccgaagatttaattcacatggttggtgtggttgaacacggcctgttcttagacatggtcaacactgtcattgtcggtcatgccaatggtcccgaggttatcgaagcacgaccatag

SEQ ID NO: 41352 - protein, 227 aa, Lactobacillus plantarum
MNQDQLKQLVGQKAVEYIQDGMQVGLGTGSTVKFMVDALGERVKNEHLNIVGVSTSDRTAAQAKALGIPMKSVDEVDHLDLTIDGADEIADDFQGVKGGGAALLFEKIVAINSDKVMWIVDESKMVHQLGAFGLPVEVIPYGSQHVFEKMAARGYNPVFRKVNDELVRTDSNNIIIDLHIDPITDPHALAEDLIHMVGVVEHGLFLDMVNTVIVGHANGPEVIEARP

SEQ ID NO: 41353 - DNA, 651 bp, Legionella pneumophila subsp
  CDS (1)..(651): transl_table=11
gtgagtgaattaaaaatcaaagcagccaaagcagctatagcttatattgaagatgatatggttataggtgttggaacaggctctacagttaatttttttataaaagaactggcagcaatcaaacataagatagaggcttgtgtagccagttcaaaagcaaccgaggcattgcttcgggcagaaggtatccctgtaattgatttaaattcagtacaggatttacctatctatgttgatggcgctgatgaagtcaatgaacgcggtgaaatgataaaggggggcggaggagctctgactcgagagaaaattgtagcgaatgtagccacacaatttatttgtattgtcgatgaatccaaggttgtaaaacgtttaggggaatttcccgttgctgtggaagtcattccaatggcccgtagttttgttgcacgacaaattgttaaattagggggagaccctgaatacagagaaggtttcgttactgataatggtaatattattctggatgtgtttaatctgagtttctcaacacctatggccttggaagacagtcttaatgtaatcccgggtgtcgttgaaaatggagtgtttgccaaacgtttggcagataaagtgttagtggcttcagcaagtggtgtgaataatttaaaatag

SEQ ID NO: 41354 - protein, 216 aa, Legionella pneumophila subsp
MSELKIKAAKAAIAYIEDDMVIGVGTGSTVNFFIKELAAIKHKIEACVASSKATEALLRAEGIPVIDLNSVQDLPIYVDGADEVNERGEMIKGGGGALTREKIVANVATQFICIVDESKVVKRLGEFPVAVEVIPMARSFVARQIVKLGGDPEYREGFVTDNGNIILDVFNLSFSTPMALEDSLNVIPGVVENGVFAKRLADKVLVASASGVNNLK

SEQ ID NO: 41355 - DNA, 675 bp, Listeria innocua
  CDS (1)..(675): transl_table=11
atgattaatcaaaagaaaatcgcaggtgaaaaagcgtgtgaatggattgaagatggaatggttgtcggtcttggaacgggaagtaccgtttattatacgattgaaaaattaggggaaatggtgcaaaaaggcttaaacattactggggtgtctacttctatagaaacagaacaacaagctcggacattagggattccgctaaaatctttaaatgatgtaacgaaaattgatgtcacaattgatggcgctgatgaaattaatcaagcttttcaaggaataaaagggggcggaggagcacttttacgagaaaagatggttgctcaagctagttcaaagaatatttgggttgttggggaagagaagcttgtgacagagcttggaaaatttcctttgccacttgaagtgattccttttggatggaagcaaattaaacgaatgctagaaaatgacggggttgaaactactttacgcaaacagtcgtcaggagaaatatatgaaacaaataacggcaattatattttagatattataaatcagacctttactaatccagaagcctggcatgaaaagttagcgggcattcctggggtacttgagcacggcttatttcttcattatgtagatataattatttgcggcaaagcatcaggagaaatagagataataaaaaaatag

SEQ ID NO: 41356 - protein, 224 aa, Listeria innocua
MINQKKIAGEKACEWIEDGMVVGLGTGSTVYYTIEKLGEMVQKGLNITGVSTSIETEQQARTLGIPLKSLNDVTKIDVTIDGADEINQAFQGIKGGGGALLREKMVAQASSKNIWVVGEEKLVTELGKFPLPLEVIPFGWKQIKRMLENDGVETTLRKQSSGEIYETNNGNYILDIINQTFTNPEAWHEKLAGIPGVLEHGLFLHYVDIIICGKASGEIEIIKK

SEQ ID NO: 41357 - DNA, 675 bp, Listeria monocytogenes
  CDS (1)..(675): transl_table=11
atgattaatcaaaagaagattgcaggagaaaaggcttgtgaatggattaaagatggaatggttgtgggtcttggaacgggcagtacagtttattacacgattgaaaagcttggagaaatggtaaataacggtttgcacattacaggggtagcgacttctgaagaaacaaacaaacaagcacaaaatttaggaatacctttgaaatcgctaaatgacgttacggaaatagatattactattgatggtgcagatgaaattgatacggattttcaaggaataaagggtggaggaggagcactgttacgcgaaaaaatggtagcaagtgcgagtttgaaaaacatttgggttgtcagtgaggagaagcttgtaagaaacttagggaagtttcctttacctttagaagtaataccttttggttggaagcaggttgagagaaaacttgaaaaagagcatattcaaacaaatttacggaaacaatcttcaggagaagtctatgtgacaaataacgggaactatattttggatatagtaaatcaaacttttacggatgcagaaatgtggcaagaaaaattagcgcaaatcccagggattgtggagcatggattatttcttcattatgtggatataattatttgtgcgaaggcgaatggcgaaattgaactaataaaaaaatag

SEQ ID NO: 41358 - protein, 224 aa, Listeria monocytogenes
MINQKKIAGEKACEWIKDGMVVGLGTGSTVYYTIEKLGEMVNNGLHITGVATSEETNKQAQNLGIPLKSLNDVTEIDITIDGADEIDTDFQGIKGGGGALLREKMVASASLKNIWVVSEEKLVRNLGKFPLPLEVIPFGWKQVERKLEKEHIQTNLRKQSSGEVYVTNNGNYILDIVNQTFTDAEMWQEKLAQIPGIVEHGLFLHYVDIIICAKANGEIELIKK

SEQ ID NO: 41359 - DNA, 660 bp, Mannheimia succiniciproducens
  CDS (1)..(660): transl_table=11
atgaatcaactcgaaatgaaaaaagttgcggctaaagccgcattacaatttgtcaaaccggatatgattgtcggggtagggagcggttcaacggtaaattgctttattgaagaattaggtgcatttcgtgatcaaattaaaggcgcggtagcggcttctaaagcatcggaagaattattaagaaaacaaggtattgaggttttcagtgccaatgacgtatcgagtctggatatttatgtagacggcgccgatgaaatcaatccgcagaaaatgatgattaaaggcggcggtgcggcgttaacccgtgaaaaaatcgtttcgtctttggcgaaaaattttatttgcattgtcgatagcagcaaacaggtagatatactgggttccactttcccgttgccggtagaagtgattcctatggcgcgttcacaagtcgcccgtaaattggtagcgttgggcggaagccctgaatggcgtgaaggcgtgattaccgataacggtaacgtaattttggacgtgcataattttattattatgaatcctattgaaatggaaaaagaattgaataatgtcgcaggtgtggtaacaaacggtatttttgcgttaaatgcggcgcataccgtgattgtcggcacaccggacggtgctaaaattattgaataa

SEQ ID NO: 41360 - protein, 219 aa, Mannheimia succiniciproducens
MNQLEMKKVAAKAALQFVKPDMIVGVGSGSTVNCFIEELGAFRDQIKGAVAASKASEELLRKQGIEVFSANDVSSLDIYVDGADEINPQKMMIKGGGAALTREKIVSSLAKNFICIVDSSKQVDILGSTFPLPVEVIPMARSQVARKLVALGGSPEWREGVITDNGNVILDVHNFIIMNPIEMEKELNNVAGVVTNGIFALNAAHTVIVGTPDGAKIIE

SEQ ID NO: 41361 - DNA, 705 bp, Methanosarcina acetivorans
  CDS (1)..(705): transl_table=11
atgacggaaagaaatacttctactgattctccagaaaaaagggcggcaggaattgctgcagcagggcttgtcagctccgggatgcttgtaggactcgggacaggttcaaccgttgcatacacaataaaagaacttgggcgcagggtgagggaggaggggctcgatatcctgggagtcgttacctcttatcagtccgagatgcttgcaatagaggccggaatcaggctgacgacccttgcccagcatccggaactggaccttgccattgacggggctgaccagatagattccgaactccgtgcgattaagggaggaggagcggctcatacaagggaaaagatcgtttccgtttctgcaagacggtttgtggttgtagccgacgagtcgaaaacgagcaagcagcttgataaactcgtacctgtggaagtcctgccttttgcaaaagaacctgtggtaaaaaagatccgggaactgggcggaaaaccccagctcaggtctgccgtaaaaaaagacgggcccgtaataaccgacaatggaaattttgtccttgatgtcgaatttggagttataaaagaccctgaagcgctcgcccttcaactatcttcaatccctggtgtcgttgagcatgggattttttgcaatgtgagcgagctttacatagggaataaagacggggctataaagattataacccgacagaaataa

SEQ ID NO: 41362 - protein, 234 aa, Methanosarcina acetivorans
MTERNTSTDSPEKRAAGIAAAGLVSSGMLVGLGTGSTVAYTIKELGRRVREEGLDILGVVTSYQSEMLAIEAGIRLTTLAQHPELDLAIDGADQIDSELRAIKGGGAAHTREKIVSVSARRFVVVADESKTSKQLDKLVPVEVLPFAKEPVVKKIRELGGKPQLRSAVKKDGPVITDNGNFVLDVEFGVIKDPEALALQLSSIPGVVEHGIFCNVSELYIGNKDGAIKIITRQK

SEQ ID NO: 41363 - DNA, 657 bp, Methylococcus capsulatus
  CDS (1)..(657): transl_table=11
atgactcaagacgaactcaaacggaaagtcgccgaagcggcattggattatgtcaaggacgtcaccatcctgggggtgggaaccggctcgaccgtgaaccattttattgatttactggccgatctcaaaggcgggatcgaaggtgcggtgtccagctcccaggccagctccgagcgtctgaagaagatcggcatcccggtgctcgacctcaacgccgccggcaccctggatgtctacgtggacggcgccgatgaagtcaatgccgccaagcagatgatcaagggcggcggcgcggccctgacccgcgagaagatcgtggcggaggccagccgcaagttcgtctgcatcgtcgatgagaccaagtgcgtcgacgtgctgggcaagttcccgctgccggtcgaggtgatcccgatggcgcgcagcctggtcgcccgccgcctggtggaactggggggcacgccggtgtggcgggagaactgcatcaccgacaatggcaatgtgattctcgacgtgcacaacctcaccatcaccgatccggtcgagctggaacgccgaatcaacgatatccccggggtggtctgcaacggcgtgttcgcactgcggccggcggacgtcgtgctgatcggatcgcccagcggcgtgcgcacgctcccttga

SEQ ID NO: 41364 - protein, 218 aa, Methylococcus capsulatus
MTQDELKRKVAEAALDYVKDVTILGVGTGSTVNHFIDLLADLKGGIEGAVSSSQASSERLKKIGIPVLDLNAAGTLDVYVDGADEVNAAKQMIKGGGAALTREKIVAEASRKFVCIVDETKCVDVLGKFPLPVEVIPMARSLVARRLVELGGTPVWRENCITDNGNVILDVHNLTITDPVELERRINDIPGVVCNGVFALRPADVVLIGSPSGVRTLP

SEQ ID NO: 41365 - DNA, 681 bp, Methanococcus jannaschii
  CDS (1)..(681): transl_table=11
gtgtcaaatgaagatttaaaattaaaagtagctaaggaagcagtgaagttagttaaagatggaatggttattggattaggaaccggttcaacagcagctttattcatcagagaacttggaaatagaattagagaagaggagctaacagtcttcggaattccaacatcatttgaagctaaaatgctggctatgcagtatgaaattccattagttacattagatgagtacgatgttgatattgcctttgatggagctgatgaagttgaggaaacaactctctttttaataaaaggaggtggaggctgccatactcaagaaaaaatagttgattacaacgcaaatgaatttgttgttttagttgatgaaagtaaattagttaaaaaattaggggaaaagttcccaatccctgtggaagttattccttcagcttatagggttgtaataagagctttatcagaaatgggaggagaggcagtaattagattaggagacagaaaaagaggacctgttataacagacaacggaaatatgattattgatgtatttatgaacatagatgacgctatagaacttgagaaagaaattaataacattcctggagtagttgaaaatggtatctttacaaaggtagataaggttttagttggaactaaaaaaggagtaaaaacacttaaaaaataa

SEQ ID NO: 41366 - protein, 226 aa, Methanococcus jannaschii
MSNEDLKLKVAKEAVKLVKDGMVIGLGTGSTAALFIRELGNRIREEELTVFGIPTSFEAKMLAMQYEIPLVTLDEYDVDIAFDGADEVEETTLFLIKGGGGCHTQEKIVDYNANEFVVLVDESKLVKKLGEKFPIPVEVIPSAYRVVIRALSEMGGEAVIRLGDRKRGPVITDNGNMIIDVFMNIDDAIELEKEINNIPGVVENGIFTKVDKVLVGTKKGVKTLKK

SEQ ID NO: 41367 - DNA, 681 bp, Methanobacterium thermoautotrophicum
  CDS (1)..(681): transl_table=11
atggaggtatttatgaatctcaagaagatggctgctttgagggcggttgacgaaatagatgatggggatgttgtaggtcttggaacaggttcaacaacccattacttcatagaggagcttggaagacgtgtcagggaggagggactggaggttatgggtgtacctacatcctaccagtcaatgttccttgcagcggagtcagggataaaggttacaagtctcgctgaacatgatgttgatgtggctgttgacggtgcagatgaggttgacccggacctcaaccttataaagggtggtggggccgcccacacccttgagaagatagttgactcatccgccgcgagtttcatagttattgtggacgaatcaaagcttgttgaaagactgggtgccttcccactacctgttgaagtcatacccgcagcttgcaggcctgtgaagctcaaactcgagtcaatgggggcttcagtgaatataaggtcctctgagggcaaggacggtcctgttgttactgataatggtaactttgtccttgacgcggcctttggtgttattgatgatcccggagccatggagtcccggctgaacaacataccgggtgttgttgagaacggcatattcgctggaattgcagatatggttatagcaggtacctctgagggtcttaagattctcaggtga

SEQ ID NO: 41368 - protein, 226 aa, Methanobacterium thermoautotrophicum
MEVFMNLKKMAALRAVDEIDDGDVVGLGTGSTTHYFIEELGRRVREEGLEVMGVPTSYQSMFLAAESGIKVTSLAEHDVDVAVDGADEVDPDLNLIKGGGAAHTLEKIVDSSAASFIVIVDESKLVERLGAFPLPVEVIPAACRPVKLKLESMGASVNIRSSEGKDGPVVTDNGNFVLDAAFGVIDDPGAMESRLNNIPGVVENGIFAGIADMVIAGTSEGLKILR

SEQ ID NO: 41369 - DNA, 672 bp, Neisseria gonorrhoeae
  CDS (1)..(672): transl_table=11
atgacgacacaagacgaactcaagcgcatcgccgccgaaaaagcagtcgaattcgtacccgaaaacgaatacatcggcatcggtaccggttcgaccatcaatttcttcatcgaagccttgggcaaaagcggtaaaaaaatcaaaggcgcggtttcaacctccaaaaaatccggcgaactgcttgcccggtacgacattcccgtcgtgtccctgaacgaagtgtccggtttggcggtctatatcgacggtgcggacgaagtgaaccacgccctgcaaatgattaagggcggcggcggcgcgcacctcaacgaaaaaatcgtcgccagcgcatcagaaaaattcgtctgcattgcggacgaaagcaaatatgtttcccggctgggcaaattcccactgcccgtggaagccgtcgaaagcgcgcgctcccttgtttcgcgcaaactgcttgccatgggcggacagcccgaactgcgtatcggctacaccacgttttacggcaaccaaatcgtcgatgtccacggcttgaatatcgatcagccgctgacgatggaagatgaaatcaacaaaatcaccggcgtactcgaaaacggcatattcgcccgcgatgccgccgatgtgttgattttggggacggaagagggtgcgaaagtcatctatccctgccaagggtaa

SEQ ID NO: 41370 - protein, 223 aa, Neisseria gonorrhoeae
MTTQDELKRIAAEKAVEFVPENEYIGIGTGSTINFFIEALGKSGKKIKGAVSTSKKSGELLARYDIPVVSLNEVSGLAVYIDGADEVNHALQMIKGGGGAHLNEKIVASASEKFVCIADESKYVSRLGKFPLPVEAVESARSLVSRKLLAMGGQPELRIGYTTFYGNQIVDVHGLNIDQPLTMEDEINKITGVLENGIFARDAADVLILGTEEGAKVIYPCQG

SEQ ID NO: 41371 - DNA, 672 bp, Neisseria meningitidis serogroup B
  CDS (1)..(672): transl_table=11
atgacgacacaagacgaactcaagcgcatcgccgccgaaaaagcagtcgaattcgtacccgaaaatgaatatatcggcatcggtaccggctcgaccatcaactttttcatcgaagccttgggtaagagcggcaaaaaaatcaaaggcgcggtatctacttccaaaaaatccggcgaactgcttgcccagtacgatattcccgtcgtttctttgaacgaagtatcggggttggcggtctatatcgacggtgcggatgaagtgaaccacgccctgcaaatgattaaaggcggtggcggcgcgcacctcaacgaaaaaatcgtcgccagcgcgtccgaaaaattcatctgcattgcggatgaaagcaaatatgtttcacgtttgggcaaattccctctgcctgtggaagtcgtcgaaagcgcgcgctctcttgtttcgcgcaaactgctcgctatgggcggacagcccgaactgcgtatcggctacaccacgttttacggcaaccaaatcgtcgatgtccacggcttgaatatcgatcagccgctgacgatggaagacgaaatcaacaaaatcaccggcgtgctcgaaaacggcatattcgcccgcgatgccgccgatgtgttgattttggggacggaagagggtgcgaaagtcatctatccctgccaagggtaa

SEQ ID NO: 41372 - protein, 223 aa, Neisseria meningitidis serogroup B
MTTQDELKRIAAEKAVEFVPENEYIGIGTGSTINFFIEALGKSGKKIKGAVSTSKKSGELLAQYDIPVVSLNEVSGLAVYIDGADEVNHALQMIKGGGGAHLNEKIVASASEKFICIADESKYVSRLGKFPLPVEVVESARSLVSRKLLAMGGQPELRIGYTTFYGNQIVDVHGLNIDQPLTMEDEINKITGVLENGIFARDAADVLILGTEEGAKVIYPCQG

SEQ ID NO: 41373 - DNA, 660 bp, Nitrosomonas europaea
  CDS (1)..(660): transl_table=11
atgacacaagacgagcagaaacgggcagtggcacaagcagccctgcagtatgtgccgacaggtgaaatcatcggcatcggaacaggatcgaccgccaatctttttattgatgagctggctaagatcaaacacaggattgaaggcgccgtggcaagctccgaggttactgcaaaccgtctgaagcaacacggcatcgaggttctggatctcaattccgtcggcgaactcccggtgtatatcgatggtgcagatgaaatcacccggaatatgcacatgatcaaaggaggcggtggtgcgctgacacgtgaaaaaatcgtagcggctgttgcacgtaaattcatctgtattgctgaccagagcaagctggtcaaggtactgggaaaatttccactgccagtagaagtcatcccgatggcacgcagctatgtcgcccgggaaatcacattactgggtggacaaccggcctggcgtcagggatttactaccgacaacggcaatatcattctcgatgtccataacctgaatatcatgaatccggttgaactggaaactgccctcaaccagattgcaggggtggtgacgaacggtctgtttgccagacgagcggccaacgtgctgctgatgggtaccgaccagggagtggagaccattacagtatag

SEQ ID NO: 41374 - protein, 219 aa, Nitrosomonas europaea
MTQDEQKRAVAQAALQYVPTGEIIGIGTGSTANLFIDELAKIKHRIEGAVASSEVTANRLKQHGIEVLDLNSVGELPVYIDGADEITRNMHMIKGGGGALTREKIVAAVARKFICIADQSKLVKVLGKFPLPVEVIPMARSYVAREITLLGGQPAWRQGFTTDNGNIILDVHNLNIMNPVELETALNQIAGVVTNGLFARRAANVLLMGTDQGVETITV

SEQ ID NO: 41375 - DNA, 699 bp, Protochlamydia amoebophila
  CDS (1)..(699): transl_table=11
atgacacaaacaaacgattcgccatccattaaagcaaaaaaggcagctgcccttaaagctgtagaatttgttcaagatcaaatgattattggtttaggaacaggttccacaatagcctacttcattgaagctttgggtaagcgctgtcaagcaggcctaaaaataactgcaattgcctcttcagaacgatccatgcggcaggctcgattggttggcattcctattgtcgattcagacactattttagaattagatttaacaatcgatggagcggacgaaatagatcctctcaaacagatgattaaaggaggaggaggagctcttttacgagaaaaactcattgcctcagcaagtaaagaaatgatcgttgttatcgatgagactaaacttgtgaataaattaggaaaatttcccgtagctaccgagatttcaatatttacatttcgtcatatagtaaaaaaacttaaggatcacggttattgcggatcgttacgagttaatcaagatcagagtttgtatcgtacagataatggaaattatatttttgatatttgttttcctgaacctattgacaatcctatttttgaacataatcggcttaaaagttttgccggggttttagaaactggccttttttttaatttagcagggcgtgttatcattggataccaaaatggaatgactaaaattgttgcatga

SEQ ID NO: 41376 - protein, 232 aa, Protochlamydia amoebophila
MTQTNDSPSIKAKKAAALKAVEFVQDQMIIGLGTGSTIAYFIEALGKRCQAGLKITAIASSERSMRQARLVGIPIVDSDTILELDLTIDGADEIDPLKQMIKGGGGALLREKLIASASKEMIVVIDETKLVNKLGKFPVATEISIFTFRHIVKKLKDHGYCGSLRVNQDQSLYRTDNGNYIFDICFPEPIDNPIFEHNRLKSFAGVLETGLFFNLAGRVIIGYQNGMTKIVA

SEQ ID NO: 41377 - DNA, 657 bp, Picrophilus torridus
  CDS (1)..(657): transl_table=11
atgtttgaaaatgaaaaaaggatggccgccatggaggccctgaaatttgtcaggaacgatatgcgcataggtataggaacaggctcaacggcatactacttcattgagggtttatcagagcttgttaaaaatggcctgaggataaccggaattccaacatcgaagaagagcgaggaactctgcagatcattcaatataccggtcgattataatataaaggatatagacatagacttcgatggtgcagacgaattcgatccatatggaaatctaataaagggtggtggcggcgcacttgtgcgtgaaaagatcgttgcatacaacagcagggaattctacgttcttgtcgaccattcaaagtactctgaaaggcttcataagtttccgctgcccgtggaggtgcttccatttatgagtgaaaagacccttgaaaacatagagaggcttggatgcagggcatcattccgggatgataaaaaattcatcagcgacaatggcaattacataatagactgcgtttttagttatacagacccggagcttgaatcacagataaagatgatacctggagttgttgaggttggaatattcaggcatctttcaacaaagatattccagggaacaattgatggctgcagaataatagatgttaaataa

SEQ ID NO: 41378 - protein, 218 aa, Picrophilus torridus
MFENEKRMAAMEALKFVRNDMRIGIGTGSTAYYFIEGLSELVKNGLRITGIPTSKKSEELCRSFNIPVDYNIKDIDIDFDGADEFDPYGNLIKGGGGALVREKIVAYNSREFYVLVDHSKYSERLHKFPLPVEVLPFMSEKTLENIERLGCRASFRDDKKFISDNGNYIIDCVFSYTDPELESQIKMIPGVVEVGIFRHLSTKIFQGTIDGCRIIDVK

SEQ ID NO: 41379 - DNA, 672 bp, Pseudomonas aeruginosa
  CDS (1)..(672): transl_table=11
atgaaccaggatcagctcaagcaggcagtggcacaggccgccgtcgaccacattcttccgcacctcgacagcaagagcatcgtcggcgtcggcacaggctccaccgccaacttcttcatcgatgccctggcccgccacaaggccgagttcgacggcgcagtagccagttcggaggccaccgccaagcgcctgaaggagcatggcatcccggtctacgagctgaacacggtcagcgagctggagttctacgtcgacggcgccgacgaaagcaacgagcgcctggagctgatcaagggcggcggtgccgcgctgacccgcgagaagatcgtcgccgcggtggccaagaccttcatctgcatcgccgatgccagcaagctggtgcccatcctcggccagttcccgctgccggtggaggtcatcccgatggctcgcagccacgtcgcccgccaactggtgaagctcggcggcgatccggtctaccgcgaaggcgtgctgaccgacaacggcaatatcatcctcgacgtgcacaacctgcgcatcgacagcccggtggaactggaagagaagatcaacgccatcgtcggcgtggtcaccaacggcttgttcgccgcccgcccggccgacctgctgctactcggcaccgccgacggcgtcaagaccctcaaggcctga

SEQ ID NO: 41380 - protein, 223 aa, Pseudomonas aeruginosa
MNQDQLKQAVAQAAVDHILPHLDSKSIVGVGTGSTANFFIDALARHKAEFDGAVASSEATAKRLKEHGIPVYELNTVSELEFYVDGADESNERLELIKGGGAALTREKIVAAVAKTFICIADASKLVPILGQFPLPVEVIPMARSHVARQLVKLGGDPVYREGVLTDNGNIILDVHNLRIDSPVELEEKINAIVGVVTNGLFAARPADLLLLGTADGVKTLKA

SEQ ID NO: 41381 - DNA, 675 bp, Pseudomonas putida
  CDS (1)..(675): transl_table=11
atgacccaggaccaactcaaacaggccgtcgcccaggccgctgtcgacttcattctgcccaagctggatgaaaagagcgtcgtaggcgtcggtaccggttcgaccgccaacttcttcatcgatgccctggctcagcacaagaccgcgttcgacggcgcagtcgccagctccgaagccactgcccagcgcctgaagggccatggcatcccggtctacgaactgaacagcgtaagcgagcttgagttttacgtggacggtgccgacgagagcgacgcacacctgcacctgatcaagggcggcggcgcagcgctgacccgcgaaaagatcgtcgcggccgtggccaagaccttcatctgcatcgccgacggcagcaagctggtgccggtactgggggccttcccgctgccggtcgaagtgatccccatggcccgcagtcacgtggcgcgtcagctggtgaagctgggtggcgacccggtgtaccgtgaaggcgtggtcaccgacaacggcaacgtgatcctggatgtgtacaacctgcagatcaccaacccggtggagctggaagcgcagatcaacgccatcgtcggcgtggtgaccaacggcctgttcgcggcgcggccggcggatctgctgctgctgggcaccgctgaaggcgtgaagagcctgaaggccgagtaa

SEQ ID NO: 41382 - protein, 224 aa, Pseudomonas putida
MTQDQLKQAVAQAAVDFILPKLDEKSVVGVGTGSTANFFIDALAQHKTAFDGAVASSEATAQRLKGHGIPVYELNSVSELEFYVDGADESDAHLHLIKGGGAALTREKIVAAVAKTFICIADGSKLVPVLGAFPLPVEVIPMARSHVARQLVKLGGDPVYREGVVTDNGNVILDVYNLQITNPVELEAQINAIVGVVTNGLFAARPADLLLLGTAEGVKSLKAE

SEQ ID NO: 41383 - DNA, 690 bp, Pyrococcus furiosus
  CDS (1)..(690): transl_table=11
atgaatgtggaagaaatgaaaaaggccgtggcaagggcagcacttgagtttatagaggatgatatggtggttggactaggaacaggctccaccacagcatactttataagatatttaggagagatgatagaaaaaggaaaagtagaagatatctatggagtaccacctcctatcaagcaaaaattcttgcgtatggaaagtggggtgccagttctttcattggatcaagtagatgcaatagacatagcggtagatggtgctgatgaagtagatccaaatcttaacttaatcaaaggcaggggtgctgccctcacaatggaaaaaataatcgagtatagggctggaacattcatcgtgctggtggatgagtcaaagcttgtcgattatctctgccagaaaatgccagttccaattgaagttattccagctgcatggaaggcgattttagaagagttaagcatattcaatgcaaaggctgagctcaggatgggagttaaaaaggatggtccagttgttactgaaaatgggaactttatcattgatgcaaaatttccaagaatagatgatcccctcgacatggaaatcgaacttaacactatcccaggagtagttgaaaatggaatttttgccgatatagcggacatagtattagtagggacaaaagaaggagtaaaaagattagaaaggtaa

SEQ ID NO: 41384 - protein, 229 aa, Pyrococcus furiosus
MNVEEMKKAVARAALEFIEDDMVVGLGTGSTTAYFIRYLGEMIEKGKVEDIYGVPPPIKQKFLRMESGVPVLSLDQVDAIDIAVDGADEVDPNLNLIKGRGAALTMEKIIEYRAGTFIVLVDESKLVDYLCQKMPVPIEVIPAAWKAILEELSIFNAKAELRMGVKKDGPVVTENGNFIIDAKFPRIDDPLDMEIELNTIPGVVENGIFADIADIVLVGTKEGVKRLER

SEQ ID NO: 41385 - DNA, 690 bp, Pyrococcus kodakaraensis
  CDS (1)..(690): transl_table=11
atgaacgttgaagaaatgaaaaaggccgtagccaaggaggccctcaagttcattgaggatgagatggtagttgggcttgggaccggctcaacgaccgcctactttatcaattacctcggaaagctcctcatggaaggggagcttgaggacgtttacggcgttccaacttctcaccaggccagacttcttgcccttgaggcgggaattcccgttgtgagccttgacgaagtggatgcaatagacatagccgtggacggggccgatgaagttgacccgcacatgaacctgataaaggggcgcggcgctgccctcactatggaaaaaatcatcgagtatagggccgggatgttcatcgtcctggtcgatgagagcaagctcgttgagtacctgggccagaagatgcccgtgccgattgaggtcatacctgccgcgtggagggcaatcgctgaggaacttgaggtcttcaacgcgacagcggagctcagaatggcggtgaaaaaggacggcccggtcgttactgacaacggcaacttcatactggacgccaagttcgcccgcatcgaggatccgctcgacctcgaaatcgagcttaacacaatacccggtgtggttgagaacggaatattcgccgacatcgccgacataatcctcgttgggactccagaaggcgttaagagaatggagaggtga

SEQ ID NO: 41386 - protein, 229 aa, Pyrococcus kodakaraensis
MNVEEMKKAVAKEALKFIEDEMVVGLGTGSTTAYFINYLGKLLMEGELEDVYGVPTSHQARLLALEAGIPVVSLDEVDAIDIAVDGADEVDPHMNLIKGRGAALTMEKIIEYRAGMFIVLVDESKLVEYLGQKMPVPIEVIPAAWRAIAEELEVFNATAELRMAVKKDGPVVTDNGNFILDAKFARIEDPLDLEIELNTIPGVVENGIFADIADIILVGTPEGVKRMER

SEQ ID NO: 41387 - DNA, 687 bp, Ralstonia solanacearum
  CDS (1)..(687): transl_table=11
atgacgcaggatgaactgaaggcgctggtggcccaggccgccgccgactacgtattggccaacgtgcccgagggcgccgtgctgggtgtcggcaccggttcgaccgccaacctgttcatcgacgcgatggcgccgcacaaggcgcgcttcgccggcgcggtgtcgagctcggaggcgtcgacgcgccgtctgcagggccacggttttgccgtgctggatctgaacgaggtcgatacgattcccgtctacgtggacggtgccgacgagatcgatgacacgggcgccatgatcaagggcggcggcggcgcgctgacgcgcgagaagatcgtcgcgtcggtggcaggacggttcgtctgcatcgccgacggcagcaagctggtcgatgtgctcggcgctttcccgctgccggtggaagtggtgccgatggcacgcgccgcagtagcgcgccagctggcggcgctgggcggccagccgcgcctgcgcatgaccaaggaaggccagatctaccagaccgacaacggcaatgtgatcctggatgtctccggcctgcggatcggcgagccgaagacgctcgaggcgcagatcaacgatattcccggcgtggtgacggtcggcctgttcgccaagcgcggcgccgatgtgctgctgctgggcaccgaagcgggcgtgcagcgccgcgacttctga

SEQ ID NO: 41388 - protein, 228 aa, Ralstonia solanacearum
MTQDELKALVAQAAADYVLANVPEGAVLGVGTGSTANLFIDAMAPHKARFAGAVSSSEASTRRLQGHGFAVLDLNEVDTIPVYVDGADEIDDTGAMIKGGGGALTREKIVASVAGRFVCIADGSKLVDVLGAFPLPVEVVPMARAAVARQLAALGGQPRLRMTKEGQIYQTDNGNVILDVSGLRIGEPKTLEAQINDIPGVVTVGLFAKRGADVLLLGTEAGVQRRDF

SEQ ID NO: 41389 - DNA, 732 bp, Rhizobium loti
  CDS (1)..(732): transl_table=11
atggatgcaagacagttgaaagtcgaggccgcgcgggccgcccttgcccatgtcagcgacggcatgcggctcggcatcggcaccggcacgactgccgaagagttcgtgcgactgctcgccgacaaggtcgccaccggcatgaccgtcatcggtgtgccgacgtccgagcgcaccgcggcactttgccgtgagcttggcgtgccgctgtcgacattggaggaaactcccgagctcgatcttacggtcgacggcgccgatgaggtcgatccggaactgaccttgatcaagggcggcggcggcgcactgctgcgcgaaaagatcgttgccgcagcctcgcagcgcatgatcgtcatcgccgaccgctcgaagatggtcgagacgctcggccggtttccgctgccgatcgaagtcaaccagttcggcctgcgcgccaccgagatcgccatagccaagacggctgcggatctcggcctttccggtccgattacattgaggatgacgggaggccaggcttttgttacagacggcggccattttatcctcgatgcatcttttggccgcattccggatacaagagcgctttcgaatgctctccacgccattccgggcgtggtcgagcatggtcttttcatcgggctggcgtcaacggccatcatcgccggcggcgacggcatccaaaccgtccatgccgcccgaaaaccagggagttctaccaaccatgatgttgcataa

SEQ ID NO: 41390 - protein, 243 aa, Rhizobium loti
MDARQLKVEAARAALAHVSDGMRLGIGTGTTAEEFVRLLADKVATGMTVIGVPTSERTAALCRELGVPLSTLEETPELDLTVDGADEVDPELTLIKGGGGALLREKIVAAASQRMIVIADRSKMVETLGRFPLPIEVNQFGLRATEIAIAKTAADLGLSGPITLRMTGGQAFVTDGGHFILDASFGRIPDTRALSNALHAIPGVVEHGLFIGLASTAIIAGGDGIQTVHAARKPGSSTNHDVA

SEQ ID NO: 41391 - DNA, 696 bp, Rhizobium meliloti
  CDS (1)..(696): transl_table=11
atggacgcccgccagatgaagatcaaggccgccgaagcggcacttgaacatgtcgaaagcggcatgcggcttggaataggcacaggctcgacggctgaagaattcgtccgattgctggccgagaaagtggcatccggctttcagatctccggcgttccgacgtccgagcggactgcgcgcctctgcctcgagctcggtgtgcctctaaagtcgctcgacgaactgccggaactggacctgacgattgacggggccgacgaggtcgacggaaagctgcgcctgatcaagggcggcggcggtgcgttgctgcgcgagaagatcgttgcgagcgcctcgacgcggatgatcgtcattgccgacgaatcgaaggtcgtggacgtgctgggcgctttcaagctgccgatcgagatcaatcctttcggccaggtcgccacgaggctcgcgatcgagaagaccgcctcgcggctgggtctggcaggggaaatcgtcgtacgatcctccggcgatggagtcttcatgaccgatggcggacacctcattctcgatgcatcttttggccgtattcctgatgcagatgcgctcgcggtggagctgaacgccatcccgggggtcgttgagcacgggcttttcatagatgtggcgtcgatggcgatcattgccggtcctgagggagcgcgcacgcttacggcgtcttga

SEQ ID NO: 41392 - protein, 231 aa, Rhizobium meliloti
MDARQMKIKAAEAALEHVESGMRLGIGTGSTAEEFVRLLAEKVASGFQISGVPTSERTARLCLELGVPLKSLDELPELDLTIDGADEVDGKLRLIKGGGGALLREKIVASASTRMIVIADESKVVDVLGAFKLPIEINPFGQVATRLAIEKTASRLGLAGEIVVRSSGDGVFMTDGGHLILDASFGRIPDADALAVELNAIPGVVEHGLFIDVASMAIIAGPEGARTLTAS

SEQ ID NO: 41393 - DNA, 699 bp, Rhodopseudomonas palustris
  CDS (1)..(699): transl_table=11
atggacaaggaagagttgaagcggcgggctgcggcgcgggcgctggaagaggtgcggggcggcatgaagctcggcctcgggaccggctcgacggccaagcatttcgttgaactacttggcgaaagggtgcggctcgggctcgaaatcatcggcgtgccgacgtcggaagtgacgcgcgcggatgccgagcgttgcggtatccggctgacgagcctcgacgagatcgaccgactcgacatcaccatcgacggtgccgacgaggtcgaccaccatctcgacctgatcaagggcggcggcggggcgctgctgcgcgagaagatcgtcgccgcggcttcggatcgcatgatcgtgatcgcggacgaatccaagctggtcgacactcttggccgcttcccgctgccgatcgaggtgatcccgttcggcctcggcgccacccgccgggcgctgcagaatgccttcacggccgccggctgcgacggcgaattaaagctccggcccggcaaagacggccatgctttcgtcaccgatggtggccactggatcctcgacgcccagctcgggcggatacccgatgctcctcgtctggcccagttgctgtccgtgattccgggcgtagtcgagcatgggttgtttgtcgggatggcgagcaccgtcgtgctggcaggggccgacggaattcgaaccatcgaacgcgcgtga

SEQ ID NO: 41394 - protein, 232 aa, Rhodopseudomonas palustris
MDKEELKRRAAARALEEVRGGMKLGLGTGSTAKHFVELLGERVRLGLEIIGVPTSEVTRADAERCGIRLTSLDEIDRLDITIDGADEVDHHLDLIKGGGGALLREKIVAAASDRMIVIADESKLVDTLGRFPLPIEVIPFGLGATRRALQNAFTAAGCDGELKLRPGKDGHAFVTDGGHWILDAQLGRIPDAPRLAQLLSVIPGVVEHGLFVGMASTVVLAGADGIRTIERA

SEQ ID NO: 41395 - DNA, 660 bp, Salmonella paratyphi
  CDS (1)..(660): transl_table=11
atgacgcaggatgaactgaaaaaagcggtaggatgggcggcacttcagtatgtacagcccggcaccattgtgggcgttggtacaggctcaacggccgcacactttattgatgcgctgggcacaatgaaaggccagattgaaggcgcggtctccagctcggacgcctcgactgaaaaactcaaaggcctcggtattcatgtgtttgatctcaacgaagtggatagcctgggtatctatgtcgatggcgcggacgaaatcaacggtcatatgcagatgatcaaaggcggcggcgcggcattaacccgtgagaaaattattgcttccgtggcggagaaatttatctgtattgcggatgcctctaaacaggtggatattcttggcaaattcccgttgccggtcgaagtgattccgatggcgcgcagcgcggtcgctcgtcaactggtgaagctgggcgggcgtccggagtaccgtcagaacgtggtcacggataacggcaacgtgattctggatgtttatggtatggaaatccttgatcccatcgcgctggaaaacgccattaacgcgattccgggcgtcgtgaccgtggggctgttcgccaaccgtggcgccgatgtcgcactgatcggcacgccggacggggtgaaaaccatcgtaaaatga

SEQ ID NO: 41396 - protein, 219 aa, Salmonella paratyphi
MTQDELKKAVGWAALQYVQPGTIVGVGTGSTAAHFIDALGTMKGQIEGAVSSSDASTEKLKGLGIHVFDLNEVDSLGIYVDGADEINGHMQMIKGGGAALTREKIIASVAEKFICIADASKQVDILGKFPLPVEVIPMARSAVARQLVKLGGRPEYRQNVVTDNGNVILDVYGMEILDPIALENAINAIPGVVTVGLFANRGADVALIGTPDGVKTIVK

SEQ ID NO: 41397 - DNA, 660 bp, Shewanella oneidensis
  CDS (1)..(660): transl_table=11
atgactcaagatgaaatgaaaaaagctgcgggctgggctgcactcaaatacgttgagaaggacagcattgtgggtgtgggcacaggctcaaccgttaaccactttatcgatgctttggcgaccatgaaggctgatattgaaggcgcagtatcaagctctgaagcttcaacgcaaaaaatgaaggcccttggcatcccggtttatgacttaaacagcgtcgataaattatctgtctatgtcgatggtgccgatgaaatcaacggccacatggacatgatcaaaggtggtggcgcggcattaacccgcgaaaaaatcgttgcagctgtggctgaaaagtttgtctgtatcgtggataacactaagcaagtagatatcttgggtgaatttccactgcccgttgaagtgatcccgatggcgcgctcttacgtggctcgccaactggtaaaactgggtggtgatcctgtttaccgcgaaggcgttatcactgataacggtaatgtgatcctcgatgtttacaatcttaagatcctcaatccgaaagaattagaagataagatcaatgccattgtgggtgtggtcactaatggtctgttcgcaaaacgcggcgccgatgtgttactggttggtacccctgaaggcgttaaaacctttaccgcttga

SEQ ID NO: 41398 - protein, 219 aa, Shewanella oneidensis
MTQDEMKKAAGWAALKYVEKDSIVGVGTGSTVNHFIDALATMKADIEGAVSSSEASTQKMKALGIPVYDLNSVDKLSVYVDGADEINGHMDMIKGGGAALTREKIVAAVAEKFVCIVDNTKQVDILGEFPLPVEVIPMARSYVARQLVKLGGDPVYREGVITDNGNVILDVYNLKILNPKELEDKINAIVGVVTNGLFAKRGADVLLVGTPEGVKTFTA

SEQ ID NO: 41399 - DNA, 789 bp, Silicibacter pomeroyi
  CDS (1)..(789): transl_table=11
atgaccggagaactctcgcccatcgacaaggcgaaattcgttgccgccaaacgggcggccgatctggtcgaggacgggatgcgcgtgggtctgggcaccggctcgaccgccgcctggctggtgcgctgcctgggcgacatggtgcgcaaggaagggttgaagatgcgcggcgtgccgacctcgacccggaccgcgcaactggcgcgagaggtggggatcgaggtgatcacgctggatgaggcgcgttggctggatatcaccatcgacggggcagacgagttcgacggcgacctgaacctgatcaagggcggcggcggtgcgctgctgcaggaaaagatcgtggcgactgcctctgaccagatggtggtgatcgccgatctgggcaaggaggtcagccggctgggtgcttttcccctgccggttgaggtgatcccgttcggctggcagaccacccaggcgctgctggaggagacgctgatctcgatggatgtgctggggcggacggcgaccttgcggatgaatggcgacacgccgtttgtcaccgacgagggcaatcatatcctcgaccttcacctgcaacggatcggcaatgcccggcagttggcgctggtgctgaaccagatccccggcgtggtggaaaatggcctgttcatagatatctgtgataccgttgtggtgggccatggcgacgggcgggtggaaatccgcgatatcaaccagggcacggtcgaacatgaccggctcgattttgtcgaaagcgacaacctgtttaccgatctggcggattga

SEQ ID NO: 41400 - protein, 262 aa, Silicibacter pomeroyi
MTGELSPIDKAKFVAAKRAADLVEDGMRVGLGTGSTAAWLVRCLGDMVRKEGLKMRGVPTSTRTAQLAREVGIEVITLDEARWLDITIDGADEFDGDLNLIKGGGGALLQEKIVATASDQMVVIADLGKEVSRLGAFPLPVEVIPFGWQTTQALLEETLISMDVLGRTATLRMNGDTPFVTDEGNHILDLHLQRIGNARQLALVLNQIPGVVENGLFIDICDTVVVGHGDGRVEIRDINQGTVEHDRLDFVESDNLFTDLAD

SEQ ID NO: 41401 - DNA, 687 bp, Staphylococcus aureus
  CDS (1)..(687): transl_table=11
atgaaagatgtcaaagcactcaagttaatgacattaaatgatgttttaagtcaaatcaatggtgacatgacgctgggaattggtacaggaagtacaatggaattactcttacctcaaatggcgcaactaattaaagaacgtggttacaatattacaggtgtatgcacttctaataaaattgcatttttagcaaaagaattaggtattaaaatatgtgaaatcaatgatgttgatcatatcgacttagcaattgatggtgctgatgaagtagatccatctttaaatataattaaaggtggcggtggtgcgctgttcagagagaaagttatagatgaaatggcatcgcgttttgttgtggttgtcgatgaaacgaaaatagttcaatacttaggtgagacgtttaagttaccagtagaggtggataaatttaactggtatcagatattacgtaaaattgaatcatacgctgatataaaagtagaacgtcgtgtaaacgaagatgtcgcatttataactgataatggcaattatattttagattgtaagttaccaaaaggaattgacccatataagttccatgagtatttaattcatctgacaggtgtgtttgagacaggatacttcttagatatggcagatcaagttattgtaggcactcaagagggtgttaaaattttagaaaaataa

SEQ ID NO: 41402 - protein, 228 aa, Staphylococcus aureus
MKDVKALKLMTLNDVLSQINGDMTLGIGTGSTMELLLPQMAQLIKERGYNITGVCTSNKIAFLAKELGIKICEINDVDHIDLAIDGADEVDPSLNIIKGGGGALFREKVIDEMASRFVVVVDETKIVQYLGETFKLPVEVDKFNWYQILRKIESYADIKVERRVNEDVAFITDNGNYILDCKLPKGIDPYKFHEYLIHLTGVFETGYFLDMADQVIVGTQEGVKILEK

SEQ ID NO: 41403 - DNA, 693 bp, Staphylococcus epidermidis
  CDS (1)..(693): transl_table=11
atgaaagatgcaaaagagctaaaattgatgaccttagaagatgtacttagtcaaattgaaaatggtatgacaatcggaataggaacagggagcacaattgaattattaattccccaaattgctgaattaattcagcaaaagaattatacaattaccggcgtctgtacttctaataaaacagcatttttagctaaagaattagctatgaatatagttgatgtaaatgatgttgagaaaatcgacttagcaatagatggcgctgatgaagtagacagtgcgcttaaccttattaaaggcggtggtggagccttatttagggaaaaggtcatagatgaaatggctgaccgatttgtcgttgttgtagatgaaagtaaactcgtcaactatttaggagaaacatttgcattaccagttgaagtcgataaatttaattggtaccaagttgccaaaaaaattgagcgtacttatgatattcatgtaagcagaagagttaatgaagatgtaccgtttataaccgacaatggtaattacatattagattgttcattgcaaaatagaattcctgcttatgagctacacgaatttttaattcatttaactggcgttcttgaaacaggatatttcctcgatattgccgatcaagtaatagtaggaacacaagaaggcgtaaaaatattaaataaagaaacttag

SEQ ID NO: 41404 - protein, 230 aa, Staphylococcus epidermidis
MKDAKELKLMTLEDVLSQIENGMTIGIGTGSTIELLIPQIAELIQQKNYTITGVCTSNKTAFLAKELAMNIVDVNDVEKIDLAIDGADEVDSALNLIKGGGGALFREKVIDEMADRFVVVVDESKLVNYLGETFALPVEVDKFNWYQVAKKIERTYDIHVSRRVNEDVPFITDNGNYILDCSLQNRIPAYELHEFLIHLTGVLETGYFLDIADQVIVGTQEGVKILNKET

SEQ ID NO: 41405 - DNA, 672 bp, Streptococcus agalactiae serotype V
  CDS (1)..(672): transl_table=11
atggacgaactaaaaaaacttgctggagtgaccgctgcaaaatacgttaaaaacggtatgattgtaggtttagggacaggttctacagcatatttttttgttgaagaaattggacgccgtgtcaaagaagagggattgcaagtcgtaggcgttacaacgtcaaaccgtacgactgagcaggcaagaggattaggtattccgttgaaatcagcagatgatattgatgtcattgatgtcactgtggatggagcagatgaagtagaccctgattttaatggtatcaagggtggcggtggtgcgctgctcatggaaaaaatagtagctactccaactaaagaatatatctgggttgtcgatgagagcaaacttgttgaaacgttaggtgcatttaaattgcctgttgaggttgttagatatggttctgagcgtctttttcgggtttttaaatcaaaaggttattgtccttctttccgtgaaacagaaggtgaccgctttatcactgatatggggaactacattatcgacctagatttgaaaaaaatagaggatccaaagcagttagcgaatgaacttgaccatacagttggtgttgttgaacatggtttatttaatggtatggttaataaagttatagtagcaggcaaaaacggtcttgacatacttgaaaaatag

SEQ ID NO: 41406 - protein, 223 aa, Streptococcus agalactiae serotype V
MDELKKLAGVTAAKYVKNGMIVGLGTGSTAYFFVEEIGRRVKEEGLQVVGVTTSNRTTEQARGLGIPLKSADDIDVIDVTVDGADEVDPDFNGIKGGGGALLMEKIVATPTKEYIWVVDESKLVETLGAFKLPVEVVRYGSERLFRVFKSKGYCPSFRETEGDRFITDMGNYIIDLDLKKIEDPKQLANELDHTVGVVEHGLFNGMVNKVIVAGKNGLDILEK

SEQ ID NO: 41407 - DNA, 678 bp, Streptococcus mutans
  CDS (1)..(678): transl_table=11
atggaagaacttaaaaagattgctggtgttagggcagctcaatatgttgaagatggtatgattgtgggacttgggacaggttcaacagcctattattttgttgaagaagtcggtcgccgtgtgcaagaagagggcttgcaagtgattggtgtgacgacgtcaagtcggacaactgctcaagctcaagctttaggtattcctctcaaatctattgatgaggttgactctgttgatgtgacagtggatggagctgatgaggttgatcctaatttcaatggtattaaaggcggcggtggtgctctgctgatggaaaagatagtaggaacattgacaaaagactatatctgggtggttgatgaaagcaagatggttgatactttgggagcctttaggttacccgttgaagtagttcaatatggtgctgagcgtctttttcgagagtttgagaaaaaaggctataaaccttcttttcgcgaatatgatggtgttcgctttgtgactgacatgaaaaactttatcattgatttggatttgggctctatccctgatcctattgcttttggcaatatgttagatcatcaagtcggtgttgttgaacacggcctcttcaatggtatggttaatcgtgtgattgttgcaggtaaagatggtgttcgtattttggaagctaataaataa

SEQ ID NO: 41408 - protein, 225 aa, Streptococcus mutans
MEELKKIAGVRAAQYVEDGMIVGLGTGSTAYYFVEEVGRRVQEEGLQVIGVTTSSRTTAQAQALGIPLKSIDEVDSVDVTVDGADEVDPNFNGIKGGGGALLMEKIVGTLTKDYIWVVDESKMVDTLGAFRLPVEVVQYGAERLFREFEKKGYKPSFREYDGVRFVTDMKNFIIDLDLGSIPDPIAFGNMLDHQVGVVEHGLFNGMVNRVIVAGKDGVRILEANK

SEQ ID NO: 41409 - DNA, 684 bp, Streptococcus pneumoniae
  CDS (1)..(684): transl_table=11
gtggaaaatctgaagaaaatggcaggtatcacggctgctgaatttatcaaggatgggatggttgtagggctaggaacaggttctactgcctattattttgtcgaagaaatcggtcgtcgaatcaaggaagaaggcttgcagattacagctgtgacgacttctagtgtgaccagtaaacaggctgaagggctcaatatcccgctcaagtctattgaccaagtagactttgtcgatgtgacagtcgacggggcggatgaagtggatagtcagtttaatggaatcaaaggcggtggtggtgcccttctcatggaaaaggtggtcgcaacaccatcaaaagaatacatttgggtggtggatgaaagcaagctggtcgaaaaactaggtgcttttaaattgccagtagaagtggttcagtatggtgcagagcaggtctttcgtcattttgaacgagctggctacaaaccaagtttccgtgaaaaagacggccaacgttttgtgaccgatatgcagaattttatcattgacctcgccttggatgtcattgaaaatccaattgcttttggacaagaattggaccatgtcgttggtgttgtggagcatggtttattcaaccaaatggtggataaggtaatcgttgctggacgagatggagttcagatttcaacttcaaaaaaaggaaaatag

SEQ ID NO: 41410 - protein, 227 aa, Streptococcus pneumoniae
MENLKKMAGITAAEFIKDGMVVGLGTGSTAYYFVEEIGRRIKEEGLQITAVTTSSVTSKQAEGLNIPLKSIDQVDFVDVTVDGADEVDSQFNGIKGGGGALLMEKVVATPSKEYIWVVDESKLVEKLGAFKLPVEVVQYGAEQVFRHFERAGYKPSFREKDGQRFVTDMQNFIIDLALDVIENPIAFGQELDHVVGVVEHGLFNQMVDKVIVAGRDGVQISTSKKGK

SEQ ID NO: 41411 - DNA, 711 bp, Synechococcus elongatus
  CDS (1)..(711): transl_table=11
atgagtgatgatgcagtgaagcaaatgaagcaggtcgttgccaaagctgctgccgatcgcgtgcaatcaggaatggtggtgggcttgggcactggctccacaacggcctttgttattcagtttttgggcgatcgcctgcgcaagggcgaactgagcaatattgtcggtgtacccacctcatttcaagcctctgtccttgctaaaaagtacggcattcccttggtgaccctcgatgatgtggagaaactagacattgccattgatggtgctgatgaagtggaccccgccaaaaacctgatcaaagggggtggggctgcccatacccgtgaaaaaattgttgattccctagccgagcagttcttggtggtggtagacagcagcaaactggtgcagaaattgggctccaccttccctgtacctgtggaggtcttaccctttgccgtggcgccggtgactcgtgccctgaaagcgctggggggtgagcccgaactgcgcatgggcgtgaaaaaagatggcccagtggtgactgaccaaggcaacttcgtcctggatgtcagatttgatgatattcctgaccccgccgaactggagaaagcaattaacaacattcccggcgttgtcgaaaatgggctctttgtcaacgtcgccgacgtaattctcgttggggaaattgtggatggtcaaccccaggttcgggaaattttccactag

SEQ ID NO: 41412 - protein, 236 aa, Synechococcus elongatus
MSDDAVKQMKQVVAKAAADRVQSGMVVGLGTGSTTAFVIQFLGDRLRKGELSNIVGVPTSFQASVLAKKYGIPLVTLDDVEKLDIAIDGADEVDPAKNLIKGGGAAHTREKIVDSLAEQFLVVVDSSKLVQKLGSTFPVPVEVLPFAVAPVTRALKALGGEPELRMGVKKDGPVVTDQGNFVLDVRFDDIPDPAELEKAINNIPGVVENGLFVNVADVILVGEIVDGQPQVREIFH

SEQ ID NO: 41413 - DNA, 726 bp, Thermoplasma acidophilum
  CDS (1)..(726): transl_table=11
atggctgattatgaaaagcagaagatgaatgccgcaatcaaggctgctgaatatgtccgcagcggcatgatcgttgggcttggaactggcaccacctcgtactatctgataaatgaaataggaaggcgtgtcagggaagagggactgaaaatacgtgcagtatgcacctccagaaggaccgaggatcttgcgaaacagaacggcatcgaggtcattcagggcacgaaggatcagatagatctaaccatagatggcgcggatcaggtaggcatgtacggaacgctcatcaagggcggaggcggtgcacttcttcgggaaaagatagttgcctacaacagcaaggaaatgtacgttatcgtggacagcaggaagatagaagctgctcactttggaagctttccgctgcccgttgaaatagtgccctttatgcatatgagaacccttgagaatctcagagggatatgcacacagacagatctgaggatgaacgagaaaggcgaacctttcgttacggacaatggaaattacattgcagacatgcacatgggaatgatcgacgatcccatcaatcttgaaagatctctcaagtcaatacctggtgtggttgaggttggcttgttcaacggtatagcgaagaggatctttgaaggcacagacgaaggctgcaacatatacagtataacgaacagcggtatcaaaaaagaggaggtctattttgacccctga

SEQ ID NO: 41414 - protein, 241 aa, Thermoplasma acidophilum
MADYEKQKMNAAIKAAEYVRSGMIVGLGTGTTSYYLINEIGRRVREEGLKIRAVCTSRRTEDLAKQNGIEVIQGTKDQIDLTIDGADQVGMYGTLIKGGGGALLREKIVAYNSKEMYVIVDSRKIEAAHFGSFPLPVEIVPFMHMRTLENLRGICTQTDLRMNEKGEPFVTDNGNYIADMHMGMIDDPINLERSLKSIPGVVEVGLFNGIAKRIFEGTDEGCNIYSITNSGIKKEEVYFDP

SEQ ID NO: 41415 - DNA, 684 bp, Thermus thermophilus
  CDS (1)..(684): transl_table=11
atggagcgccccttggagagctacaagaaggaggcggcccacgccgccatcgcctacgtccaggacgggatggtggtgggcctgggcacgggctccacggcccgctacgccgtcctcgagctcgcccggcgccttcgggagggggagctgaagggcgtggtgggggtgcccacctcgagggccaccgaggagctcgccaagcgggagggcatccccctcgtggaccttccccctgagggggtggacctggccatagacggggcggacgagatcgccccgggccttgccctcatcaagggcatgggcggggccctcctccgggagaagatcgtggagcgcgcggccaaggagttcatcgtcatcgccgaccacaccaagaaggtgcccgtcctcggccggggcccggtgccggtggagatcgtccccttcggctaccgggcgaccctcaaggccatcgccgacctcgggggggagcccgagctccgcatggacggggacgagttctacttcaccgacggcggccacctcatcgccgactgccgcttcggccccatcggggaccccttgggcttgcaccgggccctcttggagatccccggggtggtggagacggggctcttcgtggggatggccacccgggccctggtggcggggccttttggggtggaggagcttctgccgtag

SEQ ID NO: 41416 - protein, 227 aa, Thermus thermophilus
MERPLESYKKEAAHAAIAYVQDGMVVGLGTGSTARYAVLELARRLREGELKGVVGVPTSRATEELAKREGIPLVDLPPEGVDLAIDGADEIAPGLALIKGMGGALLREKIVERAAKEFIVIADHTKKVPVLGRGPVPVEIVPFGYRATLKAIADLGGEPELRMDGDEFYFTDGGHLIADCRFGPIGDPLGLHRALLEIPGVVETGLFVGMATRALVAGPFGVEELLP

SEQ ID NO: 41417 - DNA, 720 bp, Treponema denticola
  CDS (1)..(720): transl_table=11
atggacacgtcacagttaaaagaaagagttgcctatcatgcaatagacactcttttttcggaaggaaaaatttttgacggaatgaagataggactcggcacaggctctacagctatgccggctgtacaccgtctcgcccaattattgtcgtcaggtaagttaaaaaaaatatacgccgtacctacaagttttcaaacatcaatcgaatgtgaaaaactaggcatccctatttattctttaagttctcagcaaataggaggaagcttagaccttgctatagacggagcagacgaaatcgaccccgataaaaacctaatcaagggaggcggagctgccctcctcaaagaaaaaataatagcatataattcaaaagaatttgttgtcattgccgatgaaagaaaaaaagttaaatctatgggaaaaggatttgcccttccgatagaaattataccggaagcacgtttaagtattacaaaggctcttgaagcccaaggcatagaagtatttctgcgtgagggcgtaaaaaaaatgggacctgttgttaccgacaacggaaactttataattgatgtaaaatggcctaaagcagccgatgtagatcccaaagccttggaagaaagtttaaacaagattacaggtgtagtagaaaacggtttttttacaaaaaacactccaagagtatttatcgtacaccaagatggaaatatagaagatttataa

SEQ ID NO: 41418 - protein, 239 aa, Treponema denticola
MDTSQLKERVAYHAIDTLFSEGKIFDGMKIGLGTGSTAMPAVHRLAQLLSSGKLKKIYAVPTSFQTSIECEKLGIPIYSLSSQQIGGSLDLAIDGADEIDPDKNLIKGGGAALLKEKIIAYNSKEFVVIADERKKVKSMGKGFALPIEIIPEARLSITKALEAQGIEVFLREGVKKMGPVVTDNGNFIIDVKWPKAADVDPKALEESLNKITGVVENGFFTKNTPRVFIVHQDGNIEDL

SEQ ID NO: 41419 - DNA, 657 bp, Vibrio vulnificus
  CDS (1)..(657): transl_table=11
atgactcaagatgaaatgaaaaaagccgctggttgggcagcgctcaaatatgtggaaaaaggcagcattgttggcgtaggaacaggctcaacggttaatcacttcatcgatgctcttggaaccatgagtgaagagatcaaaggtgcggtatccagctctgttgcatcaacagagaaacttgaagcgctaggtattaaaattttcgactgcaatgaagtcgcatctttagacatttatgttgatggcgcggacgaaatcaacgccgatcgtgaaatgatcaaaggcggtggcgcggcgctcactcgcgagaagatcgttgcggcgattgcggacaagtttatctgtatcgttgatggcacaaaggctgtcgatgttcttgggactttccctcttcctgttgaagtcatcccaatggctcgctcatacgttgcgcgtcaattggttaaactgggtggtgatccttgttaccgcgaaggggtgattactgacaacggtaacgtcatccttgatgtttacggtatgaagatcaccaatccaaaacagctggaagatcagatcaacggcatcccaggtgtcgtcactgtcggcctatttgctcatcgcggtgctgacgtggtcattaccggcactccagaaggcgccaaaattgaggaataa

SEQ ID NO: 41420 - protein, 218 aa, Vibrio vulnificus
MTQDEMKKAAGWAALKYVEKGSIVGVGTGSTVNHFIDALGTMSEEIKGAVSSSVASTEKLEALGIKIFDCNEVASLDIYVDGADEINADREMIKGGGAALTREKIVAAIADKFICIVDGTKAVDVLGTFPLPVEVIPMARSYVARQLVKLGGDPCYREGVITDNGNVILDVYGMKITNPKQLEDQINGIPGVVTVGLFAHRGADVVITGTPEGAKIEE

SEQ ID NO: 41421 - DNA, 657 bp, Wigglesworthia glossinidia brevipalpis
  CDS (1)..(657): transl_table=11
gtgatagaagaaaaattaaaaaaacaagctgcatgggctgcaatcaaatacattaaaccaggagatatagttggagtaggtagcggttccacagcggaatattttattgatgcgttaggatcaattaaaaacctaataaaaggtactgtatcaagttcaagaatatcttcttctaaattaaaagatttaaatattcctttatttgacttaaatgaagtaagtttattaaatatatatgtagatggagcagacgaaataaatcaaaaaaaacatatgataaaaggcaaaggggcagctttgacaagagaaaaaattattgcatctgcagcaaaaaaatttatttgtatagtagatagtagcaaattcgtacatgttttaggaagagctcctttgccaatagaagttatacctatggctagaactttagtatctaaaaaaattattgatattggaggatctccgaaatataggaaaggaataattacagaaaatggaaatgttttattagacgtacataatttaattatacttgattctttatttttagaagaaaaaattaacaatataccgggggttgtatcagtaggtctttttgctcatagagcggcagacattgctattatttcaggaaaaaatggaataaaaataatagattaa

SEQ ID NO: 41422 - protein, 218 aa, Wigglesworthia glossinidia brevipalpis
MIEEKLKKQAAWAAIKYIKPGDIVGVGSGSTAEYFIDALGSIKNLIKGTVSSSRISSSKLKDLNIPLFDLNEVSLLNIYVDGADEINQKKHMIKGKGAALTREKIIASAAKKFICIVDSSKFVHVLGRAPLPIEVIPMARTLVSKKIIDIGGSPKYRKGIITENGNVLLDVHNLIILDSLFLEEKINNIPGVVSVGLFAHRAADIAIISGKNGIKIID

SEQ ID NO: 41423 - DNA, 648 bp, Xanthomonas campestris pv
  CDS (1)..(648): transl_table=11
atgtccgaagcaaaacgcctggccgccgagaaggcgatcgattacgtggaagacggcatgatcgtcggggtcggcaccggctcgacggtggcgtatttcatcgacgcactcggccgcatcggccatcgcatcaagggtgcggtgtccagctcggaacagagcaccgcgcggctgcgccagcacggcatcgaggtgctggacctcaaccacaccggcacgctgtcgctgtatgtggatggcgccgacgagtgcgacccgaaccgctgcctgatcaagggcggcggcgcggcgctcacgcgcgagaagatcattgccgaagcgagcgagcgcttcatctgcatcgtcgacccgagcaagcaggtgccggtgctgggcaacttcccgctgccggtggaggtgatcccgatggcgcgcagcctggtggcccggcagatcctggcgctcacgggcgggcagccggtctggcgtgacggcgtggtcaccgacaacggcaacgtggtgctggatgtgcacaacctgcacatcaccgacccggtggcgctggagcgtaacttgaatcagattcccggcgtggtctgcgtgggtctgttcgcgcgccgcccggccgacgtggtgatcgtcggcggcgagacaccgcgcgtgctgtaa

SEQ ID NO: 41424 - protein, 215 aa, Xanthomonas campestris pv
MSEAKRLAAEKAIDYVEDGMIVGVGTGSTVAYFIDALGRIGHRIKGAVSSSEQSTARLRQHGIEVLDLNHTGTLSLYVDGADECDPNRCLIKGGGAALTREKIIAEASERFICIVDPSKQVPVLGNFPLPVEVIPMARSLVARQILALTGGQPVWRDGVVTDNGNVVLDVHNLHITDPVALERNLNQIPGVVCVGLFARRPADVVIVGGETPRVL

SEQ ID NO: 41425 - DNA, 738 bp, Xylella fastidiosa
  CDS (91)..(738): transl_table=11
atggaaactgctactgtcactagagtgaactcaacacagccagccaatgcctgtgcgccttcccacatcccaatcatcattaataaccccatgagcgaagcaaaacggcgcgccgccgaaaaggccatcgaatacgtcgagaacgatatgattatcggcgtcggcaccggctcaacagtcgcctacttcatcgacgcactaggacgtacccccaaacgcatcaaaggtgcagtatccagctccgaacagagcacagcacatttaaaacaacacgggatcgaggtcctggaactcaatcatactggcacactccccctctatgtagacggtgcagacgagtgcgacccgtacaaacgccttatcaaaggaggcggcgcatcattaacacgcgagaagatcatcgctgaagcaagcaaacaattcatttgtatcatcgacccaaacaaacaggtagcaacactaggcaagctccccctacccatcgaagtgatcccaatggcacgcagcttggttgcaaggcaaatcatggcacgtaccgacggtcaaccagtatggcgtgagggggtgattaccgataacggcaacgttatcctggatgtacatcacttacgcatcaccgacccggtaaagctagagcaagaactcaatcaaatcccaggggtcgtctgcgtcggcctgttcgcccgtcgctgtgcagacctagttatcatcggcagcgaaccgccgcacatactctga

SEQ ID NO: 41426 - protein, 215 aa, Xylella fastidiosa
MSEAKRRAAEKAIEYVENDMIIGVGTGSTVAYFIDALGRTPKRIKGAVSSSEQSTAHLKQHGIEVLELNHTGTLPLYVDGADECDPYKRLIKGGGASLTREKIIAEASKQFICIIDPNKQVATLGKLPLPIEVIPMARSLVARQIMARTDGQPVWREGVITDNGNVILDVHHLRITDPVKLEQELNQIPGVVCVGLFARRCADLVIIGSEPPHIL

SEQ ID NO: 41427 - DNA, 801 bp, Glycine max
  CDS (1)..(801)
atggccattccctacccccatttcatcgccaccgagaaagccgccatggacgccggcctcctccacccctcctccccctccgtcatcctcacccaagacgatttgaagaaaatcgccgcctacaaggccgtcgagtacgtggagtccggcatgatcctcggcctcggcaccggctccaccgccaagcatgccgtcgaccgcatcggcgagctcctccgccagggcaagctcaaggacatcgtcggaatccccacctccacaaaaacccacgaacaagccctctccctcgggatccccctctccgatctcgacgcccaccccgccatcgatctcgccatcgacggcgccgacgaggtcgaccccttcctcaacctcgtcaagggccgtggcggctccctcctccgagaaaaaatggtcgaaggcgcatgcaagaagttcatcgtcatcgttgatgagtccaagctcgtaaactatttggggggtagtgggttggccatgcccgttgaggttattaagttctgttggaggttcaccgcggcgaggttgcagaagctttttgaggaggctgggtgcgttgccaggctcagaacttttggggagaaggagaaggaggagccttatgtgacggataatgggaactttattgtggatttgtatttcgagaggagtattggggatttgaaggctgctagtgatgctattttgcagcttgctggggttgtggagcatggcatgtttcttgatatggctaccactgttattgttgcaggggagctcgggttgacggtcaagaacaagtag

SEQ ID NO: 41428 - protein, 266 aa, Glycine max
MAIPYPHFIATEKAAMDAGLLHPSSPSVILTQDDLKKIAAYKAVEYVESGMILGLGTGSTAKHAVDRIGELLRQGKLKDIVGIPTSTKTHEQALSLGIPLSDLDAHPAIDLAIDGADEVDPFLNLVKGRGGSLLREKMVEGACKKFIVIVDESKLVNYLGGSGLAMPVEVIKFCWRFTAARLQKLFEEAGCVARLRTFGEKEKEEPYVTDNGNFIVDLYFERSIGDLKAASDAILQLAGVVEHGMFLDMATTVIVAGELGLTVKNK

SEQ ID NO: 41429 - DNA, 798 bp, Glycine max
  CDS (1)..(798)
atggccattccctacccccatttcatcgccaccgagaaagccgccatggacgccggcctcctccacccctcctccccctcctccgtcatcctcacccaagacgacctcaagaaaatcgccgcctacaaggccgtcgagtacgtcgagtccggcatggtcctcggcctcggcaccggctccactgccaagcacgccgtcgaccgcatcggcgagctcctccgccaaggaaaactcaaagacatcgtcggaatccccacctccaccaaaacccacgaccaggccctctccctcggcatccccctctccgatctcgactcccaccccaccgtcgatctcgccatcgacggcgccgacgaggtcgatcccttcctcaacctcgtcaagggccgcggcggctccctccttcgagaaaagatggtcgagggcgcctgcaagaagttcatcgtcatcgtcgacgagtccaagctcgttaactatttggggggcagcggcttggccatgcccgttgaggttattcagttctgttggaggttcaccgcggcgaggttgcagaagctttttcaggaggctgggtgcgttgccaagcttaggactttcgcggagaaggatgaaccttatgtcacggataatgggaactttattgtggatttgtatttcgagaggagtattggggatttgaaggctgccagtgatgcaattttgcagcttgctggagttgtggagcatggcatgtttcttgatatggctaccactgttattgttgcaggggagctagggctgacggtgaagaacaagtag

SEQ ID NO: 41430 - protein, 265 aa, Glycine max
MAIPYPHFIATEKAAMDAGLLHPSSPSSVILTQDDLKKIAAYKAVEYVESGMVLGLGTGSTAKHAVDRIGELLRQGKLKDIVGIPTSTKTHDQALSLGIPLSDLDSHPTVDLAIDGADEVDPFLNLVKGRGGSLLREKMVEGACKKFIVIVDESKLVNYLGGSGLAMPVEVIQFCWRFTAARLQKLFQEAGCVAKLRTFAEKDEPYVTDNGNFIVDLYFERSIGDLKAASDAILQLAGVVEHGMFLDMATTVIVAGELGLTVKNK

SEQ ID NO: 41431 - DNA, 801 bp, Glycine max
  CDS (1)..(801)
atggccattccctatcgcgagtcgtacgacaccgagaaagccgccatggacgccggcctcctccacccctcctccccctccgtcatcctcacccaagacgatctcaagaaaatcgccgcctacaaggccgtcgagtacgtggagtccggcatggtcctcggcctcggcaccggctccaccgccaagcatgccgtcgaccgcatcggcgagctcctccgccaaggcaagctcaaggacatcgtcggaatccccacctccacaaaaacccacgaacaagccctctccctcgggatccccctctccgatctcgacgcccaccccgccatcgatctcgccatcgacggcgccgacgaggtcgaccccttcctcaacctcgtcaagggccgtggcggctccctcctccgagaaaaaatggtcgaaggcgcatgcaagaagttcatcgtcatcgttgatgagtccaagctcgtaaactatttggggggtagtgggttggccatgcccgttgaggttattaagttctgttggaggttcaccgcggcgaggttgcagaagcttcttgaggaggctgggtgcgttgccaggctcagaacttttggggagaaggagaaggaggagccttatgtgacggataatgggaactttattgtggatttgtatttcgagaggagtattggggatttgaaggctgctagtgatgctattttgcagcttgctggagttgtggagcatggcatgtttcttgatatggctaccactgttattgttgcaggggagctagggctgacggtgaagaacaagtag

SEQ ID NO: 41432 - protein, 266 aa, Glycine max
MAIPYRESYDTEKAAMDAGLLHPSSPSVILTQDDLKKIAAYKAVEYVESGMVLGLGTGSTAKHAVDRIGELLRQGKLKDIVGIPTSTKTHEQALSLGIPLSDLDAHPAIDLAIDGADEVDPFLNLVKGRGGSLLREKMVEGACKKFIVIVDESKLVNYLGGSGLAMPVEVIKFCWRFTAARLQKLLEEAGCVARLRTFGEKEKEEPYVTDNGNFIVDLYFERSIGDLKAASDAILQLAGVVEHGMFLDMATTVIVAGELGLTVKNK

SEQ ID NO: 41433 - DNA, 801 bp, Glycine max
  CDS (1)..(801)
atggccattccctatcgcgagtcgtacgacaccgagaaagccgccatggacgccggcctcctccacccctcctccccctccgtcatcctcacccaagacgatctcaagaaaatcgccgcctacaaggccgtcgagtacgtggagtccggcatggtcctcggcctcggcaccggctccaccgccaagcatgccgtcgaccgcatcggcgagctcctccgccaaggcaagctcaaggacatcgtcggaatccccacctccacaaaaacccacgaacaagccctctccctcgggatccccctctccgatctcgacgcccaccccgccatcgatctcgccatcgacggcgccgacgaggtcgaccccttcctcaacctcgtcaagggccgtggcggctccctcctccgagaaaaaatggtcgaaggcgcatgcaagaagttcatcgtcatcgttgatgagtccaagctcgtaaactatttggggggtagtgggttggccatgcccgttgaggttattaagttctgttggaggttcaccgcggcgaggttgcagaagctttttgaggaggctgggtgcgttgccaggctcagaacttttggggagaaggagaaggaggagccttatgtgacggataatgggaactttattgtggatttgtatttcgagaggagtattggggatttgaaggctgctagtgatgctattttgcagcttgctggagttgtggagcatggcatgtttcttgatatggctaccactgttattgttgcaggggagctagggctgacggtgaagaacaagtag

SEQ ID NO: 41434 - protein, 266 aa, Glycine max
MAIPYRESYDTEKAAMDAGLLHPSSPSVILTQDDLKKIAAYKAVEYVESGMVLGLGTGSTAKHAVDRIGELLRQGKLKDIVGIPTSTKTHEQALSLGIPLSDLDAHPAIDLAIDGADEVDPFLNLVKGRGGSLLREKMVEGACKKFIVIVDESKLVNYLGGSGLAMPVEVIKFCWRFTAARLQKLFEEAGCVARLRTFGEKEKEEPYVTDNGNFIVDLYFERSIGDLKAASDAILQLAGVVEHGMFLDMATTVIVAGELGLTVKNK

SEQ ID NO: 41435 - DNA, 846 bp, Glycine max
  CDS (1)..(846)
atggcttccttatccctctcctctcccccatctctctcttccgcacaccacaacgcctccacgcgccttattctacgcacccctaactcccttaaactgcgcactccaccccactccctccccgccatccgcgccatcaccctcacccaggacgacctcaagagactcgccgccgacaaggccgtggagtccgtcaagagcggcatggtcctcggcctaggcaccggctccactgctgccttcgtcgtcgccaagcttggcgcccttctcgcctccggccaactctccgacatcgtcggtgtccccacctccaaacgcacggaggagcaggcccgctccctcggcatccccctctccgtcctcgacgacaacccccgcctcgatctcgccatcgacggcgccgacgaggtcgaccccgacctcaacctcgtcaaaggccgcggcggcgccctcctccgcgagaagatggtcgaggccgcctccgacaagttcgtcgtggtcgtcgacgacaccaagctcgtggacggcctcggcggaagcgggctggccatgccggtggaggtggtccagttctgctggaagtacaatctggatcggcttcaggagcttttcaaggaagaaggtgtggaagcaaaattgagattggaggagagtgggaaaccctacgtcaccgataattccaattacatcgtggatttgtacttcaagactccaattagggatgcattggccgcaggcgctgaaatttccgctctggaaggcgtcgtcgagcatggcttgttcctcaacatggccacttctgtcatcatcgctggcaaatctggcgttgaagtcaaggccaagtga

SEQ ID NO: 41436 - protein, 281 aa, Glycine max
MASLSLSSPPSLSSAHHNASTRLILRTPNSLKLRTPPHSLPAIRAITLTQDDLKRLAADKAVESVKSGMVLGLGTGSTAAFVVAKLGALLASGQLSDIVGVPTSKRTEEQARSLGIPLSVLDDNPRLDLAIDGADEVDPDLNLVKGRGGALLREKMVEAASDKFVVVVDDTKLVDGLGGSGLAMPVEVVQFCWKYNLDRLQELFKEEGVEAKLRLEESGKPYVTDNSNYIVDLYFKTPIRDALAAGAEISALEGVVEHGLFLNMATSVIIAGKSGVEVKAK

SEQ ID NO: 41437 - DNA, 24 bp, Artificial sequence
  primer
atgacgcaggatgaattgaaaaaa

SEQ ID NO: 41438 - DNA, 27 bp, Artificial sequence
  primer
ttatttcacaatggttttgacaccgtc

SEQ ID NO: 41439 - protein, 249 aa, Artificial sequence
  consensus sequence
  Variant (2)..(7): Xaa in position 2 to 7 is any amino acid
  Variant (9)..(11): Xaa in position 9 to 11 is any amino acid
  Variant (12)..(24): Xaa in position 12 to 24 is any or no amino acid
  Variant (26)..(26): Xaa in position 26 is any amino acid
  Variant (32)..(47): Xaa in position 32 to 47 is any amino acid
  Variant (48)..(57): Xaa in position 48 to 57 is any or no amino acid
  Variant (59)..(60): Xaa in position 59 to 60 is any amino acid
  Variant (62)..(71): Xaa in position 62 to 71 is any amino acid
  Variant (73)..(86): Xaa in position 73 to 86 is any amino acid
  Variant (87)..(91): Xaa in position 87 to 91 is any or no amino acid
  Variant (97)..(102): Xaa in position 97 to 102 is any amino acid
  Variant (103)..(104): Xaa in position 103 to 104 is any or no amino acid
  Variant (110)..(110): Xaa in position 110 is any amino acid
  Variant (113)..(114): Xaa in position 113 to 114 is any amino acid
  Variant (117)..(129): Xaa in position 117 to 129 is any amino acid
  Variant (130)..(130): Xaa in position 130 is any or no amino acid
  Variant (132)..(133): Xaa in position 132 to 133 is any amino acid
  Variant (135)..(135): Xaa in position 135 is any amino acid
  Variant (137)..(143): Xaa in position 137 to 143 is any amino acid
  Variant (144)..(148): Xaa in position 144 to 148 is any or no amino acid
  Variant (150)..(150): Xaa in position 150 is any amino acid
  Variant (153)..(153): Xaa in position 153 is any amino acid
  Variant (155)..(177): Xaa in position 155 to 177 is any amino acid
  Variant (178)..(194): Xaa in position 178 to 194 is any or no amino acid
  Variant (197)..(197): Xaa in position 197 is any amino acid
  Variant (200)..(200): Xaa in position 200 is any amino acid
  Variant (202)..(202): Xaa in position 202 is any amino acid
  Variant (204)..(221): Xaa in position 204 to 221 is any amino acid
  Variant (222)..(241): Xaa in position 222 to 241 is any or no amino acid
  Variant (245)..(246): Xaa in position 245 to 246 is any amino acid
  Variant (248)..(248): Xaa in position 248 is any amino acid
KXXXXXXAXXXXXXXXXXXXXXXXGXGTGSTXXXXXXXXXXXXXXXXXXXXXXXXXXVXXSXXXXXXXXXXGXXXXXXXXXXXXXXXXXXXDGADEXXXXXXXXIKGGGXALXXEKXXXXXXXXXXXXXXDXXKXVXXXXXXXXXXXXPXEVXPXXXXXXXXXXXXXXXXXXXXXXXXXXXXXXXXXXXXXXXXTDXGNXIXDXXXXXXXXXXXXXXXXXXXXXXXXXXXXXXXXXXXXXXGVVXXGXF

SEQ ID NO: 41440 - protein, 28 aa, Artificial sequence
  protein pattern
  Variant (5)..(5): Xaa in position 5 is Ala or Gly
  Variant (6)..(6): Xaa in position 6 is Ala or Cys
  Variant (7)..(9): Xaa in position 7 to 9 is any amino acid
  Variant (12)..(12): Xaa in position 12 is any amino acid
  Variant (13)..(13): Xaa in position 13 is Ile, Leu or Val
  Variant (14)..(16): Xaa in position 14 to 16 is any amino acid
  Variant (17)..(17): Xaa in position 17 is Ala, Gly, Ser or Thr
  Variant (18)..(22): Xaa in position 18 to 22 is any amino acid
  Variant (23)..(23): Xaa in position 23 is Ile, Leu, Met or Val
  Variant (24)..(24): Xaa in position 24 is any amino acid
  Variant (25)..(25): Xaa in position 25 is Asp, Glu, Gly or Ser
  Variant (26)..(27): Xaa in position 26 to 27 is any amino acid
KGGGXXXXXEKXXXXXXXXXXXXXXXXK

SEQ ID NO: 41441 - protein, 12 aa, Artificial sequence
  protein pattern
  Variant (2)..(2): Xaa in position 2 is Ile, Leu or Val
  Variant (4)..(4): Xaa in position 4 is Ser or Thr
  Variant (8)..(8): Xaa in position 8 is Ala or Val
  Variant (9)..(11): Xaa in position 9 to 11 is any amino acid
  Variant (12)..(12): Xaa in position 12 is Ile, Leu or Val
GXGXGSTXXXXX

SEQ ID NO: 41442 - DNA, 885 bp, Escherichia coli
  CDS (1)..(885): transl_table=11
atgctcgcatgttgcgcaatctactcgcccgtccgctgcgcttttccttatactgagactgagcgtcgattcacctgcaaacggcgcatttttagaataatcctgaccttgtgcggaagagaaaacatgaaaattcgcgccttattggtagcaatgagcgtggcaacggtactgactggttgccagaatatggactccaacggactgctctcatcaggagcggaagcttttcaggcttacagtttgagtgatgcgcaggtgaaaaccctgagcgatcaggcatgtcaggagatggacagcaaggcgacgattgcgccagccaatagcgaatacgctaaacgtctgacaactattgccaatgcgctaggcaacaatatcaacggtcagccggtaaattacaaagtgtatatggcgaaggatgtgaacgcctttgcaatggctaacggctgtatccgcgtctatagcgggctgatggatatgatgacggataacgaagtcgaagcggtgatcggtcacgaaatggggcacgtggcgttaggccatgtgaaaaaaggaatgcaggtggcacttggtacaaatgccgtgcgagtagctgcggcctctgcgggcgggattgtcggaagtttatctcaatcacaacttggtaatctgggcgagaaattagtcaattcgcaattctcccagcgccaggaagcagaagccgatgattattcttacgatcttctgcgccaacgcggcatcagcccggcaggtcttgccaccagctttgaaaaactggcaaaactggaagaaggtcgccaaagctcaatgtttgacgaccatcctgcatccgccgaacgcgcccagcatattcgcgatcgcatgagcgcggatgggattaagtaa

SEQ ID NO: 41443 - protein, 294 aa, Escherichia coli
MLACCAIYSPVRCAFPYTETERRFTCKRRIFRIILTLCGRENMKIRALLVAMSVATVLTGCQNMDSNGLLSSGAEAFQAYSLSDAQVKTLSDQACQEMDSKATIAPANSEYAKRLTTIANALGNNINGQPVNYKVYMAKDVNAFAMANGCIRVYSGLMDMMTDNEVEAVIGHEMGHVALGHVKKGMQVALGTNAVRVAAASAGGIVGSLSQSQLGNLGEKLVNSQFSQRQEAEADDYSYDLLRQRGISPAGLATSFEKLAKLEEGRQSSMFDDHPASAERAQHIRDRMSADGIK

SEQ ID NO: 41444 - DNA, 759 bp, Pseudomonas aeruginosa PAO1
  CDS (1)..(759): transl_table=11
atgaagatccgtctttccctttccgccctggccctcgcctgcgccaccctggccggctgccagaacctgccccagggggacctcatgcagcacggcatgatggcggtgaaggccgctaccctgagcgacgccgaggtccgccaggtcgccgaccaggcctgtgccgagtccgaccagcagaaccgcatcgccccggccaacagcaagtacggccagcgcctggacaagatcgccaaggccctgggcgaccagatcgacggcgtgccggtgaactacaaggtctacctcaccgaggaggtcaacgcctgggccatggccaacggctgcatccgcgtctacagcgggctgatggagctgatgagcgacaacgagatcgaaggcgtactcggccacgagatgggccacgtcgccctcggccacacccgcaaggccgcccagaccgcctacgcggccgccgcggtgcgcggcgccgccggcgcctcgaagagcggcgcgctggccgccctgtccggctcccagctgggcgaactcaccgaatcgctggtcaacgcgcagttctcccagtcccaggaatccgacgccgacgatttctcctacgagctactgaagaagcgcggagtgaacacccagggcctggtcaccgccttcgagaagctggccaagctgggcggcggcgacagcagcatgttcgattcgcacccgggctcccaggcccgcgccgatcacatccgccagcgcatcgctgcggatcgcaagtaa

SEQ ID NO: 41445 - protein, 252 aa, Pseudomonas aeruginosa PAO1
MKIRLSLSALALACATLAGCQNLPQGDLMQHGMMAVKAATLSDAEVRQVADQACAESDQQNRIAPANSKYGQRLDKIAKALGDQIDGVPVNYKVYLTEEVNAWAMANGCIRVYSGLMELMSDNEIEGVLGHEMGHVALGHTRKAAQTAYAAAAVRGAAGASKSGALAALSGSQLGELTESLVNAQFSQSQESDADDFSYELLKKRGVNTQGLVTAFEKLAKLGGGDSSMFDSHPGSQARADHIRQRIAADRK

SEQ ID NO: 41446 - DNA, 885 bp, Escherichia coli O157:H7 EDL933
  CDS (1)..(885): transl_table=11
atgctcgcatgttgcgcaatctactcgcccgtccgctgcgcttttccttatactgagactgagcgtcggttcacctgcaaacggcgcatttttagaataatcctgaccttgtgcggaagaaaaaacatgaaaattcgcgccttattggtagcaatgagcgtggcaacggtactgaccggttgccagaatatggactccaacggactgctctcatcaggagcggaagcttttcaggcttacagtttgagtgatgcgcaggtgaaaaccctgagcgatcaggcatgtcaggagatggacagcaaggcgacgattgcgccagccaatagcgaatacgctaaacgtctgacaactattgccaatgcgctaggcaacaatatcaacggtcagccggtaaattacaaagtgtatatggcgaaggatgtgaacgcctttgcaatggctaacggctgtatccgtgtctatagcgggctgatggatatgatgacggataacgaagtcgaagcggtgatcggtcacgaaatggggcacgtggcattaggccatgtgaaaaaaggaatgcaggtggcacttggtacaaatgccgtacgagtagctgcggcctcggcgggcgggattgtcggcagtttatctcaatcacaactcggtgatctgggcgagaaattagttaattcgcaattctcccagcgccaggaagcagaagccgatgattattcttacgatcttctgcgccaacgcggcatcagcccggcaggtcttgccaccagctttgaaaaactggcaaaactggaagaaggtcgccaaagctcaatgtttgacgaccatcctgcatccgccgaacgcgcccagcatattcgcgatcgcatgagcgcggatgggattaagtaa

SEQ ID NO: 41447 - protein, 294 aa, Escherichia coli O157:H7 EDL933
MLACCAIYSPVRCAFPYTETERRFTCKRRIFRIILTLCGRKNMKIRALLVAMSVATVLTGCQNMDSNGLLSSGAEAFQAYSLSDAQVKTLSDQACQEMDSKATIAPANSEYAKRLTTIANALGNNINGQPVNYKVYMAKDVNAFAMANGCIRVYSGLMDMMTDNEVEAVIGHEMGHVALGHVKKGMQVALGTNAVRVAAASAGGIVGSLSQSQLGDLGEKLVNSQFSQRQEAEADDYSYDLLRQRGISPAGLATSFEKLAKLEEGRQSSMFDDHPASAERAQHIRDRMSADGIK

SEQ ID NO: 41448 - DNA, 762 bp, Salmonella typhimurium LT2
  CDS (1)..(762): transl_table=11
atgaaaaataaatcattactactggcggtggcgatttccgccacgctactggcaggatgtaaaaatggcgtgaatggcaatttaatcgccagttcaggcatgtcaacctacaaagccgccacactgtccgatgcggatgttaaggcattatctaataatgcctgtaaacaaatggacagcgagaatcaactggcaggttcgaaaagcaaatacaccaaacgtctgagcaaaatcgccaaagcgctgggtaacaacattgacggtacgccggttagctataaagtctatatgaccagcgatatcaacgcatgggcgatggcgaacggttgcgttcgcgtatactccggcctgatggatctgatgaccgataatgaaattgaaggcgtactgggccatgaactgggccatgtctctttagggcactctcgcaaggcaatgcagaccgcttatgccacgctggcggctcgcgatgcgatttccgccaccagcggcgtcgcagcgcagctttcccagtctcaattgggcgatctggcggaaggcgtcatcaattcggcgttttctcgcagtcaggagtcggatgcggatgacttctcttacgatctgctgaaaaaacgcgggattaacacccagggcttagtcacggcattcgataaattcgccacaatggacgcaggtcatgcaaaatcattgatggactcccacccggcttcagccgatcgcgcgcagcatatgcgcgacagaattgccgaagataaaaagtaa

SEQ ID NO: 41449 - protein, 253 aa, Salmonella typhimurium LT2
MKNKSLLLAVAISATLLAGCKNGVNGNLIASSGMSTYKAATLSDADVKALSNNACKQMDSENQLAGSKSKYTKRLSKIAKALGNNIDGTPVSYKVYMTSDINAWAMANGCVRVYSGLMDLMTDNEIEGVLGHELGHVSLGHSRKAMQTAYATLAARDAISATSGVAAQLSQSQLGDLAEGVINSAFSRSQESDADDFSYDLLKKRGINTQGLVTAFDKFATMDAGHAKSLMDSHPASADRAQHMRDRIAEDKK

SEQ ID NO: 41450 - DNA, 759 bp, Salmonella typhimurium LT2
  CDS (1)..(759): transl_table=11
atgaaaattcgcgctttactgcttgctttgggcatggcgacggtgctgaccggttgccagaatatggactctaatggactgctttcttcgggcgctgaagcttttcaggcctatacgttaagcgatgcgcaggtaaaagcgttgagcgatcaatcctgtcaagagctcgacagtaaagcgaaaatcgcgccggcgagcagcgaatacactaaacgactggcaaaaattgccgccgcgctgggggataacattaacggccagccggtgaactataaggtttacgagacgaaagacgtcaacgcgtttgccatggcgaacggttgtatccgcgtctacagcggactgatggatatgatgaccgacaacgaagttgaagccgtgatcggccatgaaatgggccatgtcgcgctgggtcatgtaaagaaagggatgcaggtcgcgctgggcactaacgccgttcgtgttgcggcggcatcggcaggaggcgtagtcggcagcctgtcgcaatcacagcttggcgatcttggcgaaaaactggtgaactcgcagttctctcagcgtcaggagtccgaagcggatgattattcttacgatctgttgcgcaaacgcggtatcagtccggcaggactcgccaccagctttgagaaactggcaaaactggaagcgggtcgtcaaagctcgatgttcgacgatcacccggcgtccgccgcacgcgcacagcatgtgcgcgatcgtatgagcgcggacgggatcaaataa

SEQ ID NO: 41451 - protein, 252 aa, Salmonella typhimurium LT2
MKIRALLLALGMATVLTGCQNMDSNGLLSSGAEAFQAYTLSDAQVKALSDQSCQELDSKAKIAPASSEYTKRLAKIAAALGDNINGQPVNYKVYETKDVNAFAMANGCIRVYSGLMDMMTDNEVEAVIGHEMGHVALGHVKKGMQVALGTNAVRVAAASAGGVVGSLSQSQLGDLGEKLVNSQFSQRQESEADDYSYDLLRKRGISPAGLATSFEKLAKLEAGRQSSMFDDHPASAARAQHVRDRMSADGIK

SEQ ID NO: 41452 - DNA, 765 bp, Shigella flexneri 2a str. 301
  CDS (1)..(765): transl_table=11
atgaagaatactaaattactgctggcgattgcgacctctgcagcattactgacagggtgtcaaaatacccacggtattgataccaatatggctatcagctccggtttaaatgcctataaagcagcaacattaagcgatgccgatgcaaaagcgattgccaatcagggctgtgccgaaatggacagcggcaatcaagtcgcaagtaaatccagcaagtacggtaaacgtctggcaaaaatcgccaaagcattgggtaacaatattaatggcacgccggtcaactataaggtttatatgaccagcgacgtcaacgcatgggcgatggcgaacggctgtgttcgtgtctacagtggcctgatggacatgatgaatgacaacgaaattgaaggtgttctgggccatgaactgggccacgtcgcgttgggtcactcgctggctgaaatgaaagcttcttatgcgatcgttgccgcacgcgatgccatttcagctaccagcggtgtggcttcccagctttcccgctcacaattgggtgatatcgcagaaggcgctattaatgctaaatactcccgtgataaagagtccgaagcagatgatttctcttttgatctgttgaagaaacgtggcatcagcacccaggggctggttggcagctttgaaaaactggctagcctggatggcggtcgcacccagtccatgtttgactctcacccaccatcaacagagcgtgcgcaacacatccgtgatcgtatcgcctctggtaagtaa

SEQ ID NO: 41453 - protein, 254 aa, Shigella flexneri 2a str. 301
MKNTKLLLAIATSAALLTGCQNTHGIDTNMAISSGLNAYKAATLSDADAKAIANQGCAEMDSGNQVASKSSKYGKRLAKIAKALGNNINGTPVNYKVYMTSDVNAWAMANGCVRVYSGLMDMMNDNEIEGVLGHELGHVALGHSLAEMKASYAIVAARDAISATSGVASQLSRSQLGDIAEGAINAKYSRDKESEADDFSFDLLKKRGISTQGLVGSFEKLASLDGGRTQSMFDSHPPSTERAQHIRDRIASGK

SEQ ID NO: 41454 - DNA, 885 bp, Shigella flexneri 2a str. 301
  CDS (1)..(885): transl_table=11
atgctcgcatgttgcgcaatctgctcgcccgtccgctgcgcttttccttatactgagactgagcgtcgattcacctgcaaacggcgcatttttagaataatcctgaccttgtgcggaagagaaaacatgaaaattcgcgccttattggtagcaatgagcgtggcaacggtactgaccggttgccagaatatggactccaacggactgctctcatcaggagcggaagcttttcaggcttacagtttgagtgatgcgcaggtgaaaaccctgagcgatcaggcatgtcaggagatggacagcaaggcgacgattgcgccagccaatagcgaatacgctaaacgtctgacaactattgccaatgcgctaggcaacaatatcaacggtcagccggtgaattacaaagtgtatatggcgaaggatgtgaacgcctttgcaatggctaacggctgtatccgcgtctatagcgggctgatggatatgatgacagataacgaagtcgaagcggtgatcggtcacgagatggggcacgtggcgttaggccatgtgaagaaagggatgcaggtggcgcttggtacaaatgccgtgcgagtagctgcggcctctgcgggcgggattgtcggcagtttatctcaatcacaacttggtgatctgggcgagaaattagtcaattcgcaattctcccagcgccaggaagcagaagccgatgattattcttacgatcttctgcaccaacgcggcatcagcccggcaggtcttgccaccagctttgaaaaactggcgaagctggaagaaggtcgtcaaagctcaatgtttgacgaccatcctgcatccgccgaacgtgcccagcatattcgcgatcgcatcagcgcggatgggattaagtaa

SEQ ID NO: 41455 - protein, 294 aa, Shigella flexneri 2a str. 301
MLACCAICSPVRCAFPYTETERRFTCKRRIFRIILTLCGRENMKIRALLVAMSVATVLTGCQNMDSNGLLSSGAEAFQAYSLSDAQVKTLSDQACQEMDSKATIAPANSEYAKRLTTIANALGNNINGQPVNYKVYMAKDVNAFAMANGCIRVYSGLMDMMTDNEVEAVIGHEMGHVALGHVKKGMQVALGTNAVRVAAASAGGIVGSLSQSQLGDLGEKLVNSQFSQRQEAEADDYSYDLLHQRGISPAGLATSFEKLAKLEEGRQSSMFDDHPASAERAQHIRDRISADGIK

SEQ ID NO: 41456 - DNA, 840 bp, Pseudomonas putida KT2440
  CDS (1)..(840): transl_table=11
atgtggatagggagtgttttcatgcgtaagtcttttgtcatcagcctgctgagtgctggcatcctgctggccggctgccaggcggtgaataccaccagcggcggtgctgttggcgtcgaacgccaacagtacatgttcagcatgctctcgaccgatgaggtcaaccagatgtacgcgcagtcgtatcagcagaccctgggtgaagcatcgagcaagggtgtgctcgacaagtccagcgccgatgccaagcgtgtgcaggccattgccaaccgcctgatcgcccaggcgcccaaattccgcccggatgccgcgcagtgggactggcaagtcaacgtgatcaagagtgatgaactgaacgccaactgcggcccgggcggcaagatcatcgtctacaccgggctgatcgatcagctcaagctcaccgatgcggaaattgccgcagtggtggggcacgagattgcccacgccttgcgcgagcatagccgcgaggccatgtccaaggcatacggtgtggaaatggctcgccagggtgccggtgccatctttggcctcggccagagcagcatggccatggccgacacggtggtgaactacgccatgaccttgcccaacagccgggccaacgaaaacgaggccgacctgattggcctggagctgtcggcccgtgccggctacgacccgaatgccgcgatcaccctgtggaacaagatgagcaaggcttccgaaggtgcaccgcctgagttcatgagtactcacccggcgtccgcgagccgcattgcttcgctgcaggcggcgattccgaaggtgatgccgctgtatcaggctgccgccaagccgtaa

SEQ ID NO: 41457 - protein, 279 aa, Pseudomonas putida KT2440
MWIGSVFMRKSFVISLLSAGILLAGCQAVNTTSGGAVGVERQQYMFSMLSTDEVNQMYAQSYQQTLGEASSKGVLDKSSADAKRVQAIANRLIAQAPKFRPDAAQWDWQVNVIKSDELNANCGPGGKIIVYTGLIDQLKLTDAEIAAVVGHEIAHALREHSREAMSKAYGVEMARQGAGAIFGLGQSSMAMADTVVNYAMTLPNSRANENEADLIGLELSARAGYDPNAAITLWNKMSKASEGAPPEFMSTHPASASRIASLQAAIPKVMPLYQAAAKP

SEQ ID NO: 41458 - DNA, 762 bp, Salmonella enterica subsp. enterica serovar Typhi Ty2
  CDS (1)..(762): transl_table=11
atgaaaaataaatcattactactggcggtggcgatttccgccacgctactggcaggatgtaaaaatggcgtgaatggcaatttaatcgccagttccggcatgtcagcctacaaagccgccacactgtccgatgcggatgttaaagcattatctaataatgcctgtaaacaaatggacagcgagaatcaactggcaggttcgaaaagcaaatacaccaaacgtctgagtaaaatcgctaaagcgctgggtaacaacattgacggtacgccggttagctataaagtctatatgaccagcgatatcaacgcatgggcgatggcgaacggttgcgttcgcgtatactccggcctgatggatctgatgaccgataatgaaattgaaggcgtactgggccatgaactgggccatgtctctttagggcactcccgcaaggcaatgcagaccgcctatgccacgctggcggctcgcgatgcgatttccgccaccagcggcgtcgcagcgcagctttcccagtctcaattgggcgatctggcggaaggcgtcatcaatttggcgttttctcgcagtcaggagtcggatgcggatgacttctcttacaatctgctgaaaaaacgtgggattaacacccagggcttagtcacggcattcgataaattcgccataatggacgcaggtcatgcaaaatcattgatggactcccacccggcctcagccgatcgcgcgcagcatatgcgcgacagaattgccgaagataaaaagtaa

SEQ ID NO: 41459 - protein, 253 aa, Salmonella enterica subsp. enterica serovar Typhi Ty2
MKNKSLLLAVAISATLLAGCKNGVNGNLIASSGMSAYKAATLSDADVKALSNNACKQMDSENQLAGSKSKYTKRLSKIAKALGNNIDGTPVSYKVYMTSDINAWAMANGCVRVYSGLMDLMTDNEIEGVLGHELGHVSLGHSRKAMQTAYATLAARDAISATSGVAAQLSQSQLGDLAEGVINLAFSRSQESDADDFSYNLLKKRGINTQGLVTAFDKFAIMDAGHAKSLMDSHPASADRAQHMRDRIAEDKK

SEQ ID NO: 41460 - DNA, 783 bp, Bacteroides thetaiotaomicron VPI-5482
  CDS (1)..(783): transl_table=11
atgaaaaaacaaattgcattagtagccctgttatttttgggcatgagttgttttaacgcttcagcacaattcaagaaattcaatttaggcaaagctattcaagcaggaaaagatgccgcacaagcaatctctctatctgacgccgacattgctgctatgagcaaggagtatatggaatggatggacaagcataacccactgaccaaaccggacagcgaatacggaaaacgcctggaaagactgaccggaaacatcaaagaagtagatggtatgaaagttaactttggcgtatatgaagtagtggacgttaacgctttcgcctgtggtgacggcagcgtgcgtatctgtgccggactgatggacgtcatgactgacgaagaagtaatggcagtaatcggtcatgagatcggtcatgtcatccataccgactctaaagacgcaatgaagaatgcatatttccgttcggctgtaaagaatgcggcaggagcagccagcagccaggtcgccaaactgactgactctgaactgggagcaatggcagaagcacttgccggcgcacaatactcacagaaacaagagtacgaagcagatgcctacggcgtagagttctgcgtaaaaaacaacatcgacccttatggtatgtacaaatcactgaataagcttctcgaattgtccaatggggctcccgcatcttcctacatgcagagaatgttttcttcacaccccgacactgccaaacgtgtagcccgtgctaaagaactggctgataaatacaaacaataa

SEQ ID NO: 41461 - protein, 260 aa, Bacteroides thetaiotaomicron VPI-5482
MKKQIALVALLFLGMSCFNASAQFKKFNLGKAIQAGKDAAQAISLSDADIAAMSKEYMEWMDKHNPLTKPDSEYGKRLERLTGNIKEVDGMKVNFGVYEVVDVNAFACGDGSVRICAGLMDVMTDEEVMAVIGHEIGHVIHTDSKDAMKNAYFRSAVKNAAGAASSQVAKLTDSELGAMAEALAGAQYSQKQEYEADAYGVEFCVKNNIDPYGMYKSLNKLLELSNGAPASSYMQRMFSSHPDTAKRVARAKELADKYKQ

SEQ ID NO: 41462 - DNA, 774 bp, Bordetella parapertussis 12822
  CDS (1)..(774): transl_table=11
atgatgaagagcaagacgaaactgctcggcggcgccctggccgccagcctgctgctggccggctgcgccagcatgaagagcatggacaccaacagcctgctttcggcgggctccgacatggccaaggcggccaatctttccgacgccgacatcatccagctgtcggacgccgcctgcaagcaaagcgaccaggaatcgaagatcgccccggccggcaacaagtacagcgtgcgcctgaccaagctgatgcgcggcttcggcaacatgacgctcaacggacagaaggtcaactacaaggtctacatgaccgaggacgtcaacgcctgggccatgggcaacggttgcgtgcgcgtctacaccggcctgatggacctgatgaacgacgacgagctgcgcggcgtgatcggccatgaaatgggccacgtcgcgctgggccacaccaagaaggccatgcagaccgcctacgcggtcagcgccgcgcgccaggccgccggcgccgccggcaacagcgtggtggcttcgctgagcgcttcgcaactgggcgagatgaccgagaaattcatcaacgcgcagttctcgcagtcgcaggaaaccgccgcagacgacttctcgttcgacctgctcaccgagaagaagatgaaccgcaagggcctggtgacggccttccagaagctggccgagctcgacggcggcgagagcagcatgttcagctcgcacccgtcctcgccggaccgcgcggcgcgcatggaaaagcgcctgcaagccggcaagtaa

SEQ ID NO: 41463 - protein, 257 aa, Bordetella parapertussis 12822
MMKSKTKLLGGALAASLLLAGCASMKSMDTNSLLSAGSDMAKAANLSDADIIQLSDAACKQSDQESKIAPAGNKYSVRLTKLMRGFGNMTLNGQKVNYKVYMTEDVNAWAMGNGCVRVYTGLMDLMNDDELRGVIGHEMGHVALGHTKKAMQTAYAVSAARQAAGAAGNSVVASLSASQLGEMTEKFINAQFSQSQETAADDFSFDLLTEKKMNRKGLVTAFQKLAELDGGESSMFSSHPSSPDRAARMEKRLQAGK

SEQ ID NO: 41464 - DNA, 753 bp, Erwinia carotovora subsp. atroseptica SCRI1043
  CDS (1)..(753): transl_table=11
atggcaattcgttcttctgtactggccctgtgtgtagcaaccttgctgaccggctgccagaatttaaacaccaataccttaatgcaatccggcgcacaggctttccaagctgcaacactcagcgatgctcaggttaaagcgctcagcgaccagtcctgtgagcaaatggataaagaagcaaagattgcccctgccgatagcaaatacacgcagcgcctgaataaaattgcggatgcgctgggccacgatatcaacggcacgccagcaaactacaaagtctatctagagaaggatgttaacgcttgggcaatggctaacggttgcatccgagtatatagcggtctgatggacatgatgaacgacaatgaagtggaaggcgtactcggccacgaaatgggccacgttgcgctgggacacacgcgtaaagcgatgcaggttgcctatgctgcgactgccgcacggaccgcaatcgcctctgctggcggcgtagcagcgtcattatcgcaatcacaattagccgatctgggggaaaaactggttaattctcaattctctcaatcccaggaaagtcaggctgatgactattcctttgatttgctgaagaaacgcggcatcaaccgggaaggtctggcgagcagctttgagaaactcgccaaattggatgctagccatgagagtagcatgtttgattcccacccttcctctgaagggcgcgccaaacacatccgtgaacgcattactgccgagaaataa

SEQ ID NO: 41465 - protein, 250 aa, Erwinia carotovora subsp. atroseptica SCRI1043
MAIRSSVLALCVATLLTGCQNLNTNTLMQSGAQAFQAATLSDAQVKALSDQSCEQMDKEAKIAPADSKYTQRLNKIADALGHDINGTPANYKVYLEKDVNAWAMANGCIRVYSGLMDMMNDNEVEGVLGHEMGHVALGHTRKAMQVAYAATAARTAIASAGGVAASLSQSQLADLGEKLVNSQFSQSQESQADDYSFDLLKKRGINREGLASSFEKLAKLDASHESSMFDSHPSSEGRAKHIRERITAEK

SEQ ID NO: 41466 - DNA, 753 bp, Yersinia pseudotuberculosis IP 32953
  CDS (1)..(753): transl_table=11
atgaaaattcgtacctcaatgattgcactgagcctggcggcactattaagtggctgtcaaagcctcaatactgaaggcttaatgcagtcaggtgcgcaagcatttcaggccgcaaccttgaatgatgctgacgtgaaagcccttagtgaaaaatcttgcgttgaaatggatcaaaaagcccagatcgcttcagcggatagtcaatatggtaaacgtatggcaaaaattgctgccgccttgggcgataacattaatggcaccccagctaactataaggtctatgtgaccaaggacgttaatgcttgggcaatggctaatggctgcattcgtgtctacagcggtttgatggatatgatgaccgacaatgaagtagaaggtgtcgtgggccatgaaatgggccacgtggcattggggcacacccgtaaagccatgcaggtggcctacggaacaaccgcgctacggacggctgtcgcctctgcaggcggtgtcgtgggtaccttgtcgcaatctcagctagcagatctcggtgagaaactggttaatgcccaattctcgcaaaaacaagaaagcgaagccgatgattactcattcgatttgctgaaaaaacggggcattgacccgaacggtctggtaaccagttttgaaaaattggcctcaatggaagcgggccgtaacagcagtatgttcgatgatcatccatcatcacaagccagagcagagcatattcgccaacgtattgcggcggagaagtaa

SEQ ID NO: 41467 - protein, 250 aa, Yersinia pseudotuberculosis IP 32953
MKIRTSMIALSLAALLSGCQSLNTEGLMQSGAQAFQAATLNDADVKALSEKSCVEMDQKAQIASADSQYGKRMAKIAAALGDNINGTPANYKVYVTKDVNAWAMANGCIRVYSGLMDMMTDNEVEGVVGHEMGHVALGHTRKAMQVAYGTTALRTAVASAGGVVGTLSQSQLADLGEKLVNAQFSQKQESEADDYSFDLLKKRGIDPNGLVTSFEKLASMEAGRNSSMFDDHPSSQARAEHIRQRIAAEK

SEQ ID NO: 41468 - DNA, 801 bp, Bacteroides fragilis NCTC 9343
  CDS (1)..(801): transl_table=11
atgaaaaaaagaattgtttttattgcggcacttttatgcggaatgtgcttcacgacagcatccgcacagttcaaaatcggtggaaagaaaatcaatgtaggcaaagtggtacaagccggtagcgacgcagcgaaagccatcaccttgtccgattcggacatcgcagccatgagcaaagaatacatgcaatggatggacacccacaatccgctgaccgcagccgacagcgaatacggcaaacgcctggagaaactgaccggacatatcaaagaagtagacggactgaaagtgaatttcggagtatatgaggttgtcgacgtgaatgcttttgcctgtggtgacggcagtgtccgcatctgtgccggattgatggatattatgacggacgatgaagtgatggcagttgtcggacatgagatcggtcacgtgattcatacagactctaaagatgccatgaagagtgcatatcttcgttcggcagtaaagaatgctgcaggagcagccagctctaccgtttccaaactgactgattcggaactgggagctatggcagaagcattagccggtgcccaatattctcagaagcaagagagcgaagccgatgattatggtttcgaattcagcatcaaacataacattgatccgtatgcaatgtacaatgctctgaacaaactactggaactctcagccgaggcccccaaagagtctaaattccagaaaatgttctcttcacaccccgatacagccaaacgtgtagcacgcgccaaagaaaaagcagacaactatactaagaacaagtaa

SEQ ID NO: 41469 - protein, 266 aa, Bacteroides fragilis NCTC 9343
MKKRIVFIAALLCGMCFTTASAQFKIGGKKINVGKVVQAGSDAAKAITLSDSDIAAMSKEYMQWMDTHNPLTAADSEYGKRLEKLTGHIKEVDGLKVNFGVYEVVDVNAFACGDGSVRICAGLMDIMTDDEVMAVVGHEIGHVIHTDSKDAMKSAYLRSAVKNAAGAASSTVSKLTDSELGAMAEALAGAQYSQKQESEADDYGFEFSIKHNIDPYAMYNALNKLLELSAEAPKESKFQKMFSSHPDTAKRVARAKEKADNYTKNK

SEQ ID NO: 41470 - DNA, 786 bp, Dechloromonas aromatica RCB
  CDS (1)..(786): transl_table=11
atgaaatttgtctcgccacttgtccgtgccttgcctgtcgcagccttgtccgccttgctcctgagtgcctgtagcaataccggcaattccgtttctgccgccaatgctgaaggcctgatgagcgccggcaaatcggttgcccaggcggctacgttgagcgacgccgaggtcatgcaactgtccgacaagtcctgcgccgaactcgacggccagtccaagatcgcggcaccgaaaagtaagtacgccctgcgcctcgccaagatcaccaagagcatgcccaaggacgtcaatggcgtcgccatcagctacaaggtctatgagaccaaggacgtcaacgcctgggccatgaacaacggctgcgtgcgcgtctattccggtctgatgaatttgatgaccgacgacgaaatccgtggcgtggtcggccacgaaatcgggcacgtcgcgctgggccactccaagaaatccatgcaggtcgcctacgccgccggcgctgcccgccagatcgcagctgtctcgggtaattccgccgttgccgccctgagttcttccgacattggcgccattgccgaaaagctggtcaatgcccaattctcgcaagctcaggaaagcgacgccgacgattactccttcgacctgctgaccgctgccaagctgaagcgcgagggcctgatttccgcctttgaaaagctcgccaagctgggtgacagcaacagcatgcggagttcgcatccatcgtcctccggccgcgcccagcacatccgcgaccgcatcgctgcgaagaagtaa

SEQ ID NO: 41471 - protein, 261 aa, Dechloromonas aromatica RCB
MKFVSPLVRALPVAALSALLLSACSNTGNSVSAANAEGLMSAGKSVAQAATLSDAEVMQLSDKSCAELDGQSKIAAPKSKYALRLAKITKSMPKDVNGVAISYKVYETKDVNAWAMNNGCVRVYSGLMNLMTDDEIRGVVGHEIGHVALGHSKKSMQVAYAAGAARQIAAVSGNSAVAALSSSDIGAIAEKLVNAQFSQAQESDADDYSFDLLTAAKLKREGLISAFEKLAKLGDSNSMRSSHPSSSGRAQHIRDRIAAKK

SEQ ID NO: 41472 - DNA, 753 bp, Ralstonia eutropha JMP134
  CDS (1)..(753): transl_table=11
atgaaagcaactcttctcattgccctcgcagcagcagccgccgcgaccctggccggctgcgccggcaccaacctcgacggcatgatggccgccggcagcagcctggccaaggcggctacgctcagcgacgccgacgtcaagagcctgtccgaccaggcctgcgctgaatccgacaagaccaacaagatcgccgcctccggcagcacgtattccagacgcctggccaaagtcatgacgggtctgaagaattcggatatgcccaacgtgaacgccagggtctacatgaccaaggacgtcaacgcgtgggcgatggccaacggttgcgtgcgcgtgtacagcggcttgatggacatgatgaccgacgatgaggtgcgcggcgtgctcggccacgagatgggccacgtggcgctgggccacacgaagaaggcgatgcaggtcgcctacacggcaaccgcggcgcgtggcgtggcagcgtcggccagcagcagtgcggtggccgcattgtcgtcgtcgcaactcggcgaactcggcgagaagctgatcaacgcgcagttctctcagtcccaggaatcggcggcggacgactactcgttcgacctgctgacgaagaacaaggccagcacaagtgggctggtaacggcgttccagaagctggccaagctcgatggcggcaagtccagcatgttctcgtcgcatccgggatcggatgcgcgcgcccagcatattcaggagcgcatcaacaagggtgcgtaa

SEQ ID NO: 41473 - protein, 250 aa, Ralstonia eutropha JMP134
MKATLLIALAAAAAATLAGCAGTNLDGMMAAGSSLAKAATLSDADVKSLSDQACAESDKTNKIAASGSTYSRRLAKVMTGLKNSDMPNVNARVYMTKDVNAWAMANGCVRVYSGLMDMMTDDEVRGVLGHEMGHVALGHTKKAMQVAYTATAARGVAASASSSAVAALSSSQLGELGEKLINAQFSQSQESAADDYSFDLLTKNKASTSGLVTAFQKLAKLDGGKSSMFSSHPGSDARAQHIQERINKGA

SEQ ID NO: 41474 - DNA, 753 bp, Ralstonia eutropha JMP134
  CDS (1)..(753): transl_table=11
atgacgcgatatgcacgatatgccgtccctgcccttgcctgcattgccctgcaggccggttgcgccaacatgaacatggacagcatgacgcaggcgggcggcagcctgttttctgccgcctcgctgtccgatgccaacgtcaagaccttgtccgaccagtcatgcgcggagatggacaagaagaacaccatcgccgcagccgacagcacctacacgaaacggctcgccaacgtcatgagcggcctgggcaataccggcctgccgcttgatgcaaaggtctacatgaccaaggacgtcaatgcctgggccatggccaacggctgcgtgcgtgtctacagcggcctcatggacctgatgaccgacgatgaagtccgcggcgtggtcgggcacgaaatcggccacgtcgcgctggggcataccaaggccgccatgcaggttgcctacggcacgtcggctgcgcgcggcgcgctgggcgcgctggggaacccgacgcttaccgcgctgacgtcatcgcagatcgcggaccttggtgagcagttcatcaacgcgcagttttcccaacggcaggaaagtgccgccgatgactattctttcgatttgctgacgaagaacggtgcaaaccgccaagcgcttgcctccgcgttccgcaagctggcctcgctcgatggcgggcagtcaagcatgctgagttcccacccgggctcgcttgagcgcgccaagcatatcgacgcgcgccttgccggaggcaaataa

SEQ ID NO: 41475 - protein, 250 aa, Ralstonia eutropha JMP134
MTRYARYAVPALACIALQAGCANMNMDSMTQAGGSLFSAASLSDANVKTLSDQSCAEMDKKNTIAAADSTYTKRLANVMSGLGNTGLPLDAKVYMTKDVNAWAMANGCVRVYSGLMDLMTDDEVRGVVGHEIGHVALGHTKAAMQVAYGTSAARGALGALGNPTLTALTSSQIADLGEQFINAQFSQRQESAADDYSFDLLTKNGANRQALASAFRKLASLDGGQSSMLSSHPGSLERAKHIDARLAGGK

SEQ ID NO: 41476 - DNA, 762 bp, Burkholderia sp. 383
  CDS (1)..(762): transl_table=11
atgcaactcaagaaagcggtggcagcgtgtggcgtggcgtttctgttgagcgcgtgcggcggggtacagagccttgacgcgaacagcctgacgtcggcggggaccagcctgtacaaggcagcgacgctgtcggatgccgacatcgccgcactgtcgaatgactcgtgcaagtcgagcgacgccgaatcgaagatcgcgccggcgaacagcgcgtacgcgaagcgcctgacgaaggtgatgaagggcttcggcgacatgacgctgaacggccagaagatcaactacaaggtctacatgaccaaggacgtcaacgcgtgggcgatgggcaatggctgcgtgcgcgtgtacagcggcctgatggaccagatgaacgacgacgagctgcgcggcgtgatcggccatgaaatgggccacgttgcactgggtcactcgaagaaggcgatgcagacggcctacgcggtcagcgcggcgcgcaccgcggccggcgcggcatcgccgggcgtggcggcactgtcgagctcgcagctcggcgacatcaccgagaagttcatcaacgcgcagttctcgcagacgcaggaaagcgcggccgacgactactcgttcgacctgatgaagcagaagggcatgaaccagaagggcctcgtcaccgcgttccagaagctcgcgaagctcgacggcggccagagctcgatgatgagctcgcacccgtcgtcggcgagccgtgcgcagcacatcgaagatcgcatcgcgaagggcagctga

SEQ ID NO: 41477 - protein, 253 aa, Burkholderia sp. 383
MQLKKAVAACGVAFLLSACGGVQSLDANSLTSAGTSLYKAATLSDADIAALSNDSCKSSDAESKIAPANSAYAKRLTKVMKGFGDMTLNGQKINYKVYMTKDVNAWAMGNGCVRVYSGLMDQMNDDELRGVIGHEMGHVALGHSKKAMQTAYAVSAARTAAGAASPGVAALSSSQLGDITEKFINAQFSQTQESAADDYSFDLMKQKGMNQKGLVTAFQKLAKLDGGQSSMMSSHPSSASRAQHIEDRIAKGS

SEQ ID NO: 41478 - DNA, 939 bp, Desulfovibrio desulfuricans G20
  CDS (1)..(939): transl_table=11
atgatgctcgcctttgccaatgttgcatcaagcaatgcccttcgggtttggcgcgaaagccttcttcctcttttgctggcgaccgggctggccgtgcttctttccggctgcgagaataccgacatgcaactggccaccgaggctggagttgacgccattaaagccgtcaccctttccgaccaggatgtggcggagctggccggaaaatcttccgcgttaatggacaacgaacatgcggtcgctccggctgaaaaccactatgcacagcggttgcggtcgctggtcggcgatctgcatgagcaggatggctataccttcaactacaaggtgtatttgcgcgacgaggtgaacgccttcgccatggctgacggatcgatccggattttcagcgggctaatggatatgcttgatgacggcgaacttcgatttgtgatcggccacgaaatgggtcacatcgtgaaacagcacaccgccaaccagttgcgtcttgcctatgccgccagcgccgtgcgcaaggggctggcggcgcaagaaggtgtggtggcggatattgcccgctcgcaactgggagggttggttcaacgcttgactgcggcgcaattctcgcagcttgaagaaaaggtggcggatgactatggcttgtcgttcctcaaggcgcggggttatgcgccggaggatgcggtttcggccttgaacaaactcgctgctctgggcagcggccattcctttctttccagccatcccgatccggctttgcgggccgaacgaataatgctgcagattcaaggcaaggccctttccattgaagagacacaggaaaatatactgacaatgatgaaacagaaaatgatcgaatggtacagccttttgcgggacatggtcatggggctgttcaagagcctcactgggcaaactgatatgaaaaggggagtggcatga

SEQ ID NO: 41479 - protein, 312 aa, Desulfovibrio desulfuricans G20
MMLAFANVASSNALRVWRESLLPLLLATGLAVLLSGCENTDMQLATEAGVDAIKAVTLSDQDVAELAGKSSALMDNEHAVAPAENHYAQRLRSLVGDLHEQDGYTFNYKVYLRDEVNAFAMADGSIRIFSGLMDMLDDGELRFVIGHEMGHIVKQHTANQLRLAYAASAVRKGLAAQEGVVADIARSQLGGLVQRLTAAQFSQLEEKVADDYGLSFLKARGYAPEDAVSALNKLAALGSGHSFLSSHPDPALRAERIMLQIQGKALSIEETQENILTMMKQKMIEWYSLLRDMVMGLFKSLTGQTDMKRGVA

SEQ ID NO: 41480 - DNA, 750 bp, Ralstonia metallidurans CH34
  CDS (1)..(750): transl_table=11
atgatccgacttaccgccacaaccgcggccgtcgcctgcgccgcactactggctggctgcgccggcgccaatatggatagcctcacccaggctggcaccagcatgttctcggccgccacactcagtgatgccaacgtcaagcaactgtccgaccagtcctgcgcccagatggacaagcagaacacgctggccacgccggacagcacctattcgaaacggctcgtgaaaatcatgagcggtctgcagaacaccgggctgccgctcgatgcgaaggtctacatgaccaaggatgtcaacgcgtgggccatggccaatggttgcgtgcgggtctatagcgggctgatggacatgatgagtgacgacgaagtacgcggcgtgctcggtcacgagatcggccacgtggcgctgggccataccaagtcggcaatgcaggtggcctattccaccgccgccgcgcgtggactgctcggttcgacgggcaacgccacgttgaccgcgctgtcgtcgtcgcagttgggcgcgctcggcgagcagctcgtcaatgcgcagttctcgcagcggcaggagagccaggccgatgactactcgttcgacctgctcaccaagaacggcgccaaccgccaggcgcttgtcacggcattccagaaactggccaagctcgatggcggccagtcgagcatgctgagttcgcaccccggttcggctgcgcgcgcacagcatattcaggaccggatcgccagcgggaagtag

SEQ ID NO: 41481 - protein, 249 aa, Ralstonia metallidurans CH34
MIRLTATTAAVACAALLAGCAGANMDSLTQAGTSMFSAATLSDANVKQLSDQSCAQMDKQNTLATPDSTYSKRLVKIMSGLQNTGLPLDAKVYMTKDVNAWAMANGCVRVYSGLMDMMSDDEVRGVLGHEIGHVALGHTKSAMQVAYSTAAARGLLGSTGNATLTALSSSQLGALGEQLVNAQFSQRQESQADDYSFDLLTKNGANRQALVTAFQKLAKLDGGQSSMLSSHPGSAARAQHIQDRIASGK

SEQ ID NO: 41482 - DNA, 825 bp, Myxococcus xanthus DK 1622
  CDS (1)..(825): transl_table=11
atgcagcgcatcctcgtggcggtactgggagtcaccctggcattgggcctgtcgacgggctgcaccaagcagcgcatctccgccgagaaggccgtggcccgcaccctcatctccgacgagcaggaggagcagctcggcaagcaggtcaaggcggagctggagacgaaggagaagatcaaatacgtgcagaacgcggccgtcgtcgactatgtgcgcggcatctccaccagcatcctgaaccaggcctccaaggaccggcccggggtgaagtggaagatcaacgtcatcgacgacccgaagacggtcaacgcgttcgccacgcccggcggctacctgtacgtctacacgggcctcatcctggccgcggacacggaggcggagctggccggcgtcatggcgcacgaggcgggccacgtcgtgggccgtcactccgcgcgcgccatggtcaaccagatgggcctgcaggccatcacccaggcggcgctggggcaaaacccgggcacggtggcgcagatcgccgcgtcgctggtgagcggcggcacgctgctggcgcacggccgcggcgaggagattgaagccgacgagtacggcgcccgctacgcctccggggcgggctatgacccgcggggcctcatcaccttcttcgagaagctccagaaggagcagggcgacacgcccgcgctgatgaagtggctgagcacgcaccccaccaacagggatcgcatcgtgaacatccagaagatcatctcgcagaagaacctgcggggcagcaacaacggcccgggtgggcttcccgccatcaagcaggccctgggcggcaagtag

SEQ ID NO: 41483 - protein, 274 aa, Myxococcus xanthus DK 1622
MQRILVAVLGVTLALGLSTGCTKQRISAEKAVARTLISDEQEEQLGKQVKAELETKEKIKYVQNAAVVDYVRGISTSILNQASKDRPGVKWKINVIDDPKTVNAFATPGGYLYVYTGLILAADTEAELAGVMAHEAGHVVGRHSARAMVNQMGLQAITQAALGQNPGTVAQIAASLVSGGTLLAHGRGEEIEADEYGARYASGAGYDPRGLITFFEKLQKEQGDTPALMKWLSTHPTNRDRIVNIQKIISQKNLRGSNNGPGGLPAIKQALGGK

SEQ ID NO: 41484 - DNA, 759 bp, Pseudomonas aeruginosa UCBPP-PA14
  CDS (1)..(759): transl_table=11
atgaagacccgtctttccctttccgccctggccctcgcctgcgccaccctggccggctgccagaacctgccccagggggacctcatgcagcacggcatgatggcggtgaaggccgccaccctgagcgacgccgaggtccgccaggtcgccgaccaggcctgcgccgagtccgaccagcaaaaccgcatcgccccggccaacagcaagtacggccagcgcctggacaagatcgccaaggccctgggcgaccagatcgacggcgtgccggtgaactacaaggtctacctcaccgaggaggtcaacgcctgggccatggccaacggctgcatccgcgtctacagcgggctgatggagctgatgagcgacaacgagatcgaaggcgtgctcggccacgagatgggccacgtcgccctcggccacacccgcaaggccgcccagaccgcctacgcggccgccgcggtgcgcggcgccgccggcgcctcgaagagcggcgcgctggccgccctgtccggctcccagctgggcgaactcaccgaatcgctgatcaacgcgcagttctcccagtcccaggaatccgacgccgacgatttctcctacgagctactgaagaagcgcggagtgaacacccagggcctggtcaccgccttcgagaagctggccaagctgggcggcggcgacagcagcatgttcgattcgcacccgggctcccaggcccgcgccgatcacatccgccagcgcatcgccgcggatcgcaagtaa

SEQ ID NO: 41485 - protein, 252 aa, Pseudomonas aeruginosa UCBPP-PA14
MKTRLSLSALALACATLAGCQNLPQGDLMQHGMMAVKAATLSDAEVRQVADQACAESDQQNRIAPANSKYGQRLDKIAKALGDQIDGVPVNYKVYLTEEVNAWAMANGCIRVYSGLMELMSDNEIEGVLGHEMGHVALGHTRKAAQTAYAAAAVRGAAGASKSGALAALSGSQLGELTESLINAQFSQSQESDADDFSYELLKKRGVNTQGLVTAFEKLAKLGGGDSSMFDSHPGSQARADHIRQRIAADRK

SEQ ID NO: 41486 - DNA, 762 bp, Burkholderia vietnamiensis G4
  CDS (1)..(762): transl_table=11
atgcatatcaagaaagcggcggcagcgtgtggcgtggcgttcctgttgagcgcgtgcggcggggtgcagaacctcgacgcgaacggcctgacgtcggcgggcaccagcctgttcaaggcggcgacgctgtcggacagcgacatcgcggccctgtcgaacgactcgtgcaaggcgagcgacgcggaatcgaagatcgccgcgccgaacagcgcgtattcgaagcgtctgacgaaggtgatgaagggcttcggcgacatgacgctgaacggccagaagatcaactacaaggtctacgtcacgaaggacgtcaacgcgtgggcgatgggcaacggctgcgtgcgcgtgtacagcggcctgatggacatgatgaacgacgacgagctgcgcggcgtgatcggccatgaaatgggccacgttgcgctgggccactcgaagaaggcgatgcagacggcctacgccgtcagcgcggcgcgcacggcggccggcgcggcctcgcccggcgtcgcggcgctgaccagctcgcagctcggcgacatcaccgagaagttcatcaacgcgcagttctcgcaatcgcaggaaagcgcggccgacgactattcgttcgacctgatgaagcagaagaacatgagccagaagggcctcgtcaccgcgttccagaagctcgcgcagctcgacggcggcaagagctcgatgatgagctcgcacccgtcgtcgacgagccgtgcgcagcacatccaggatcgcatcgcgaagggcagctga

SEQ ID NO: 41487 - protein, 253 aa, Burkholderia vietnamiensis G4
MHIKKAAAACGVAFLLSACGGVQNLDANGLTSAGTSLFKAATLSDSDIAALSNDSCKASDAESKIAAPNSAYSKRLTKVMKGFGDMTLNGQKINYKVYVTKDVNAWAMGNGCVRVYSGLMDMMNDDELRGVIGHEMGHVALGHSKKAMQTAYAVSAARTAAGAASPGVAALTSSQLGDITEKFINAQFSQSQESAADDYSFDLMKQKNMSQKGLVTAFQKLAQLDGGKSSMMSSHPSSTSRAQHIQDRIAKGS

SEQ ID NO: 41488 - DNA, 819 bp, Pseudomonas putida GB-1
  CDS (1)..(819): transl_table=11
atgcgtaagtcttttgtcgtcagcctgctgagtgctggcatcctgctggccggctgccaggcggtgaacaccaccagcggaggtgctgttggcgtcgagcgtcagcagtacatgttcagcatgctctcgaccgatgaggtcaaccagatgtacgcccagtcgtaccagcaaaccctgggtgaggcctcgagcaagggtgtgctcgacaagtccagtgccgatgccaagcgggtgcaggtcattgccaaccgactgatcgcccaggcgcccaagttccgcccggatgccgcgcagtgggactggcaagtcaacgtgatcaagagcgacgaactcaacgccaactgcggcccgggcggcaagatcatcgtctataccggcctgatcgatcagctcaagctcagcgatgcggaaattgccgcagtggtggggcacgagattgcccacgccctgcgtgagcacagccgcgaggccatgtccaaggcgtacggtgtggaaatggcccgccagggtgccggtgccatcttcggcctcggccagagcagcatggccatggccgacaccgtggtgaactacgccatgaccttgcccaacagccgggccaacgaaaacgaggccgacctgattggcctggagctgtcggcgcgtgccggttatgacccgaatgccgcgatcaccttgtggaacaagatgagcaaggcttccgagggtgcaccgcctgagttcatgagcactcacccggcgtcggaaagccgcattgcttcgctgcaggcggcaattccgaaggtgatgccgctgtatcaggccgcggccaagccgtaa

SEQ ID NO: 41489 - protein, 272 aa, Pseudomonas putida GB-1
MRKSFVVSLLSAGILLAGCQAVNTTSGGAVGVERQQYMFSMLSTDEVNQMYAQSYQQTLGEASSKGVLDKSSADAKRVQVIANRLIAQAPKFRPDAAQWDWQVNVIKSDELNANCGPGGKIIVYTGLIDQLKLSDAEIAAVVGHEIAHALREHSREAMSKAYGVEMARQGAGAIFGLGQSSMAMADTVVNYAMTLPNSRANENEADLIGLELSARAGYDPNAAITLWNKMSKASEGAPPEFMSTHPASESRIASLQAAIPKVMPLYQAAAKP

SEQ ID NO: 41490 - DNA, 765 bp, Escherichia coli
  CDS (1)..(765): transl_table=11
atgaagaatactaaattactgctggcgattgcgacctctgcagcattactgacagggtgtcaaaatacccacggtattgataccaatatggctatcagctccggtttaaatgcctataaagcagcaacattaagcgatgccgatgcaaaagcgattgccaatcagggctgtgccgaaatggacagcggcaatcaagtcgcaagtaaatccagcaagtacggtaaacgtctggcaaaaatcgccaaagcattgggtaacaatattaatggcacgccggtcaactataaggtttatatgaccagcgacgtcaacgcatgggcgatggcgaacggctgtgttcgtgtctacagtggcctgatggacatgatgaatgacaacgaaattgaaggcgttctgggccatgaactgggccacgtcgcgttgggtcactcgctggctgaaatgaaagcttcttatgcgatcgttgccgcacgcgatgccatttcagctaccagcggtgtggcttcccagctttcccgctcacaattaggtgatatcgcagaaggcgctatcaatgctaaatactcccgtgataaagagtccgaagcagatgatttctcctttgatctgttgaagaaacgtggcatcagcacccaggggctggttggcagctttgaaacactggctagcctggatggcggtcgcacccagtccatgtttgactctcacccaccatcaacagagcgtgcgcaacacatccgtgatcgtatcgcctctggtaagtaa

SEQ ID NO: 41491 - protein, 254 aa, Escherichia coli
MKNTKLLLAIATSAALLTGCQNTHGIDTNMAISSGLNAYKAATLSDADAKAIANQGCAEMDSGNQVASKSSKYGKRLAKIAKALGNNINGTPVNYKVYMTSDVNAWAMANGCVRVYSGLMDMMNDNEIEGVLGHELGHVALGHSLAEMKASYAIVAARDAISATSGVASQLSRSQLGDIAEGAINAKYSRDKESEADDFSFDLLKKRGISTQGLVGSFETLASLDGGRTQSMFDSHPPSTERAQHIRDRIASGK

SEQ ID NO: 41492 - DNA, 21 bp, Artificial sequence
  primer
atgctcgcatgttgcgcaatc

SEQ ID NO: 41493 - DNA, 23 bp, Artificial sequence
  primer
ttacttaatcccatccgcgctca

SEQ ID NO: 41494 - protein, 252 aa, Artificial sequence
  consensus sequence
  Variant (2)..(2): Xaa in position 2 is any amino acid
  Variant (5)..(10): Xaa in position 5 to 10 is any amino acid
  Variant (11)..(22): Xaa in position 11 to 22 is any or no amino acid
  Variant (24)..(28): Xaa in position 24 to 28 is any amino acid
  Variant (30)..(31): Xaa in position 30 to 31 is any amino acid
  Variant (35)..(48): Xaa in position 35 to 48 is any amino acid
  Variant (50)..(54): Xaa in position 50 to 54 is any amino acid
  Variant (55)..(57): Xaa in position 55 to 57 is any or no amino acid
  Variant (59)..(61): Xaa in position 59 to 61 is any amino acid
  Variant (63)..(63): Xaa in position 63 is any amino acid
  Variant (65)..(66): Xaa in position 65 to 66 is any amino acid
  Variant (69)..(84): Xaa in position 69 to 84 is any amino acid
  Variant (85)..(93): Xaa in position 85 to 93 is any or no amino acid
  Variant (97)..(99): Xaa in position 97 to 99 is any amino acid
  Variant (101)..(103): Xaa in position 101 to 103 is any amino acid
  Variant (107)..(107): Xaa in position 107 is any amino acid
  Variant (110)..(111): Xaa in position 110 to 111 is any amino acid
  Variant (113)..(114): Xaa in position 113 to 114 is any amino acid
  Variant (118)..(118): Xaa in position 118 is any amino acid
  Variant (123)..(123): Xaa in position 123 is any amino acid
  Variant (125)..(125): Xaa in position 125 is any amino acid
  Variant (126)..(127): Xaa in position 126 to 127 is any or no amino acid
  Variant (129)..(129): Xaa in position 129 is any amino acid
  Variant (131)..(133): Xaa in position 131 to 133 is any amino acid
  Variant (135)..(135): Xaa in position 135 is any amino acid
  Variant (139)..(139): Xaa in position 139 is any amino acid
  Variant (143)..(145): Xaa in position 143 to 145 is any amino acid
  Variant (147)..(150): Xaa in position 147 to 150 is any amino acid
  Variant (152)..(153): Xaa in position 152 to 153 is any amino acid
  Variant (156)..(158): Xaa in position 156 to 158 is any amino acid
  Variant (160)..(160): Xaa in position 160 is any amino acid
  Variant (162)..(173): Xaa in position 162 to 173 is any amino acid
  Variant (174)..(174): Xaa in position 174 is any or no amino acid
  Variant (176)..(176): Xaa in position 176 is any amino acid
  Variant (177)..(177): Xaa in position 177 is any or no amino acid
  Variant (179)..(179): Xaa in position 179 is any amino acid
  Variant (181)..(182): Xaa in position 181 to 182 is any amino acid
  Variant (183)..(184): Xaa in position 183 to 184 is any or no amino acid
  Variant (186)..(192): Xaa in position 186 to 192 is any amino acid
  Variant (194)..(196): Xaa in position 194 to 196 is any amino acid
  Variant (198)..(199): Xaa in position 198 to 199 is any amino acid
  Variant (203)..(206): Xaa in position 203 to 206 is any amino acid
  Variant (208)..(217): Xaa in position 208 to 217 is any amino acid
  Variant (219)..(221): Xaa in position 219 to 221 is any amino acid
  Variant (223)..(223): Xaa in position 223 is any amino acid
  Variant (227)..(229): Xaa in position 227 to 229 is any amino acid
  Variant (230)..(230): Xaa in position 230 is any or no amino acid
  Variant (232)..(232): Xaa in position 232 is any amino acid
  Variant (233)..(239): Xaa in position 233 to 239 is any or no amino acid
  Variant (241)..(244): Xaa in position 241 to 244 is any amino acid
  Variant (247)..(247): Xaa in position 247 is any amino acid
  Variant (249)..(250): Xaa in position 249 to 250 is any amino acid
LXGCXXXXXXXXXXXXXXXXXXGXXXXXAXXLSDXXXXXXXXXXXXXXDXXXXXXXXAXXXSXYXXRLXXXXXXXXXXXXXXXXXXXXXXXXXKVYXXXDXXXVNAXAMXXGXXRVYXGLMDXMXXXDXEXXXVXGHEXGHVXXXHXXXXMXXAYXXXAXRXXXXXXXXXXXXXLXXSXLXXXXEXXXXXXXSXXXEXXADDXXXXLXXXXXXXXXXLXXXFXKLAXXXXGXXXXXXXXSXXXXHPXSXXRA

SEQ ID NO: 41495 - protein, 20 aa, Artificial sequence
  protein pattern
  Variant (3)..(3): Xaa in position 3 is Phe or Trp
  Variant (6)..(6): Xaa in position 6 is Ala, Gly or Asn
  Variant (7)..(7): Xaa in position 7 is Asp or Asn
  Variant (9)..(9): Xaa in position 9 is Cys or Ser
  Variant (10)..(10): Xaa in position 10 is Ile or Val
  Variant (12)..(12): Xaa in position 12 is Ile or Val
  Variant (13)..(13): Xaa in position 13 is Phe or Tyr
  Variant (14)..(14): Xaa in position 14 is Ser or Thr
  Variant (18)..(18): Xaa in position 18 is any amino acid
  Variant (19)..(19): Xaa in position 19 is any or no amino acid
NAXAMXXGXXRXXXGLMXXM

SEQ ID NO: 41496 - protein, 57 aa, Artificial sequence
  protein pattern
  Variant (2)..(3): Xaa in position 2 to 3 is any amino acid
  Variant (5)..(5): Xaa in position 5 is Asp, Glu or Gln
  Variant (6)..(6): Xaa in position 6 is Ile or Leu
  Variant (7)..(7): Xaa in position 7 is Ala or Gly
  Variant (8)..(8): Xaa in position 8 is Ala, Asp, Glu or Asn
  Variant (9)..(9): Xaa in position 9 is Ile, Leu or Met
  Variant (10)..(10): Xaa in position 10 is Ala, Gly or Thr
  Variant (12)..(13): Xaa in position 12 to 13 is any amino acid
  Variant (14)..(14): Xaa in position 14 is Ala, Ile or Val
  Variant (15)..(15): Xaa in position 15 is Gly or Asn
  Variant (16)..(17): Xaa in position 16 to 17 is any amino acid
  Variant (18)..(18): Xaa in position 18 is Phe or Tyr
  Variant (20)..(20): Xaa in position 20 is Gln or Arg
  Variant (21)..(22): Xaa in position 21 to 22 is any amino acid
  Variant (24)..(24): Xaa in position 24 is Ala, Ser or Thr
  Variant (25)..(25): Xaa in position 25 is Ala, Asp, Glu or Gln
  Variant (29)..(29): Xaa in position 29 is Phe or Tyr
  Variant (30)..(30): Xaa in position 30 is Gly or Ser
  Variant (31)..(31): Xaa in position 31 is Phe or Tyr
  Variant (32)..(32): Xaa in position 32 is Asp, Glu or Asn
  Variant (33)..(33): Xaa in position 33 is Phe or Leu
  Variant (34)..(42): Xaa in position 34 to 42 is any amino acid
  Variant (43)..(43): Xaa in position 43 is Ala or Gly
  Variant (44)..(44): Xaa in position 44 is Leu or Met
  Variant (45)..(45): Xaa in position 45 is any amino acid
  Variant (46)..(46): Xaa in position 46 is Gly, Asn, Ser or Thr
  Variant (47)..(47): Xaa in position 47 is Ala or Ser
  Variant (48)..(48): Xaa in position 48 is Phe or Leu
  Variant (49)..(49): Xaa in position 49 is Asp, Glu, Asn, Gln or Arg
  Variant (50)..(50): Xaa in position 50 is any amino acid
  Variant (51)..(51): Xaa in position 51 is Phe or Leu
  Variant (52)..(52): Xaa in position 52 is Ala or Leu
  Variant (53)..(53): Xaa in position 53 is any amino acid
  Variant (54)..(54): Xaa in position 54 is Leu or Met
  Variant (55)..(55): Xaa in position 55 is Asp, Glu, Gly or Ser
  Variant (56)..(56): Xaa in position 56 is Ala, Asp, Glu or Gly
  Variant (57)..(57): Xaa in position 57 is Glu, Gly or Ser
LXXSXXXXXXEXXXXXXXSXXXEXXADDXXXXXXXXXXXXXXXXXXXXXXXXXXXXX

SEQ ID NO: 41497 - protein, 41 aa, Artificial sequence
  protein pattern
  Variant (2)..(2): Xaa in position 2 is any amino acid
  Variant (3)..(4): Xaa in position 3 to 4 is any or no amino acid
  Variant (6)..(6): Xaa in position 6 is any amino acid
  Variant (7)..(8): Xaa in position 7 to 8 is any or no amino acid
  Variant (10)..(10): Xaa in position 10 is Ile, Leu or Val
  Variant (14)..(14): Xaa in position 14 is Ile, Leu or Met
  Variant (18)..(19): Xaa in position 18 to 19 is any amino acid
  Variant (20)..(20): Xaa in position 20 is Gly or Thr
  Variant (21)..(21): Xaa in position 21 is Asp or His
  Variant (22)..(22): Xaa in position 22 is Ser, Thr or Val
  Variant (23)..(24): Xaa in position 23 to 24 is any amino acid
  Variant (25)..(25): Xaa in position 25 is Ala, Glu or Gly
  Variant (26)..(27): Xaa in position 26 to 27 is any amino acid
  Variant (28)..(28): Xaa in position 28 is Ala, Asn, Ser, Thr or Val
  Variant (29)..(29): Xaa in position 29 is Ala or Ser
  Variant (30)..(33): Xaa in position 30 to 33 is any amino acid
  Variant (35)..(35): Xaa in position 35 is Ala, Leu or Val
  Variant (36)..(36): Xaa in position 36 is Lys or Arg
  Variant (37)..(37): Xaa in position 37 is any amino acid
  Variant (38)..(38): Xaa in position 38 is Ala, Leu or Val
  Variant (39)..(39): Xaa in position 39 is Ala, Ile, Leu or Val
  Variant (40)..(40): Xaa in position 40 is Ala, Gly or Ser
  Variant (41)..(41): Xaa in position 41 is Ala or Ser
DXXXEXXXVXGHEXGHVXXXXXXXXXXXXXXXXAXXXXXXX

SEQ ID NO: 41498 - protein, 20 aa, Artificial sequence
  protein pattern
  Variant (2)..(2): Xaa in position 2 is Phe, Leu or Met
  Variant (3)..(3): Xaa in position 3 is any amino acid
  Variant (4)..(5): Xaa in position 4 to 5 is Asp or Ser
  Variant (8)..(8): Xaa in position 8 is Ala, Asp, Gly, Pro or Ser
  Variant (9)..(9): Xaa in position 9 is Pro or Ser
  Variant (10)..(11): Xaa in position 10 to 11 is any amino acid
  Variant (14)..(14): Xaa in position 14 is any amino acid
  Variant (15)..(18): Xaa in position 15 to 18 is any or no amino acid
  Variant (20)..(20): Xaa in position 20 is Ile, Leu or Met
SXXXXHPXXXXRAXXXXXRX

SEQ ID NO: 41499 - DNA, 1047 bp, Escherichia coli
  CDS (1)..(1047): transl_table=11
atggagtttttcaaaaagacggcacttgccgcactggttatgggttttagtggtgcagcattggcattacccaatatcaccattttagcaaccggcgggaccattgccggtggtggtgactccgcaaccaaatctaactacacagtgggtaaagttggcgtagaaaatctggttaatgcggtgccgcaactaaaagacattgcgaacgttaaaggcgagcaggtagtgaatatcggctcccaggacatgaacgataatgtctggctgacactggcgaaaaaaattaacaccgactgcgataagaccgacggcttcgtcattacccacggtaccgacacgatggaagaaactgcttacttcctcgacctgacggtgaaatgcgacaaaccggtggtgatggtcggcgcaatgcgtccgtccacgtctatgagcgcagacggtccattcaacctgtataacgcggtagtgaccgcagctgataaagcctccgccaaccgtggcgtgctggtagtgatgaatgacaccgtgcttgatggccgtgacgtcaccaaaaccaacaccaccgacgtagcgaccttcaagtctgttaactacggtcctctgggttacattcacaacggtaagattgactaccagcgtaccccggcacgtaagcataccagcgacacgccattcgatgtctctaagctgaatgaactgccgaaagtcggcattgtttataactacgctaacgcatccgatcttccggctaaagcactggtagatgcgggctatgatggcatcgttagcgctggtgtgggtaacggcaacctgtataaatctgtgttcgacacgctggcgaccgccgcgaaaaccggtactgcagtcgtgcgttcttcccgcgtaccgacgggcgctaccactcaggatgccgaagtggatgatgcgaaatacggcttcgtcgcctctggcacgctgaacccgcaaaaagcgcgcgttctgctgcaactggctctgacgcaaaccaaagatccgcagcagatccagcagatcttcaatcagtactaa

SEQ ID NO: 41500 - protein, 348 aa, Escherichia coli
MEFFKKTALAALVMGFSGAALALPNITILATGGTIAGGGDSATKSNYTVGKVGVENLVNAVPQLKDIANVKGEQVVNIGSQDMNDNVWLTLAKKINTDCDKTDGFVITHGTDTMEETAYFLDLTVKCDKPVVMVGAMRPSTSMSADGPFNLYNAVVTAADKASANRGVLVVMNDTVLDGRDVTKTNTTDVATFKSVNYGPLGYIHNGKIDYQRTPARKHTSDTPFDVSKLNELPKVGIVYNYANASDLPAKALVDAGYDGIVSAGVGNGNLYKSVFDTLATAAKTGTAVVRSSRVPTGATTQDAEVDDAKYGFVASGTLNPQKARVLLQLALTQTKDPQQIQQIFNQY

SEQ ID NO: 41501 - DNA, 1047 bp, Salmonella enterica subsp. enterica serovar Typhi
  CDS (1)..(1047): transl_table=11
atggagtttttcaggaaaacggcattagctgctctggtaatgggtttcagcggcgcagcgttcgctttaccgaatatcaccatcttagcgaccggcggaacgatcgctggcggcggtgattcagcaacaaaatcaaattatacggcaggtaaagtcggcgtcgaaaatctggtggatgccgttcctcaattgaaggacattgcggtagtgaaaggcgagcaggtcgttaacattggctcgcaggatatgaacgatgaagtctggctcacgctggcgaaaaaaatcaataccgagtgcgacagcaccgacggtttcgtgatcacccacggtactgatacgatggaagagaccgcttatttcctcgatctgaccgtgaaatgcaataaaccggtggtactggtcggcgcgatgcgtccttccacgtcaatgagcgcagatggcccgttcaacctctataatgcggtagtaacagcggctgataaacagtctgccaaccgcggcgtgctggtggtaatgaatgataccgtcatggacggacgcgacgtcactaagaccaatacgactgacgtggcgacgtttaaagcggttaactacggcccgctgggttatatccacaacggtaaaattgactaccagcgtacgccagagcgtaaacataccacctccaccccgttcgacgtgtcgaagctgaccgcgttgccgaaagtcggtatcgtttataactatgcgaatgcgtccgatctgccggcaaaagcgctggtagacgcgggttatgacgggatcgtgagcgcaggcgtgggtaacggcaacctgtataaaacggtctttgataccctagcgaccgccgcgcacaacggtacggtagtggtgcgttcttcacgtgtgccgactggcgcaaccacgcaggatgcggaagttgacgatgcaaaatacggctttgtcgcttccggcacgctgaacccgcaaaaagcgcgtgtcttactgcaactggcgttaacccagactaaagatccaaaacagatccagacgatgttcaatcagtattaa

SEQ ID NO: 41502 - protein, 348 aa, Salmonella enterica subsp. enterica serovar Typhi
MEFFRKTALAALVMGFSGAAFALPNITILATGGTIAGGGDSATKSNYTAGKVGVENLVDAVPQLKDIAVVKGEQVVNIGSQDMNDEVWLTLAKKINTECDSTDGFVITHGTDTMEETAYFLDLTVKCNKPVVLVGAMRPSTSMSADGPFNLYNAVVTAADKQSANRGVLVVMNDTVMDGRDVTKTNTTDVATFKAVNYGPLGYIHNGKIDYQRTPERKHTTSTPFDVSKLTALPKVGIVYNYANASDLPAKALVDAGYDGIVSAGVGNGNLYKTVFDTLATAAHNGTVVVRSSRVPTGATTQDAEVDDAKYGFVASGTLNPQKARVLLQLALTQTKDPKQIQTMFNQY

SEQ ID NO: 41503 - DNA, 1026 bp, Dichelobacter nodosus VCS1703A
  CDS (1)..(1026): transl_table=11
atgaagaagttattattatcaattttatggacgagtgctatgttaaccacgcaaactgcttttacccttcctagtttgaatatttacgccaccggcggcacgattgctggaagttccgacagcgtaacggatacctcgcaatatcaagttgcaacattaggcgttgaaaaactcattgctgcggttccggaattgaaaaaaatcgcaacggtgaccggcaaacaaattgccagcgttgatagtaacgatatttcggtaaacattttgctggaacttgcgaaaactttaaaccaagatttggcaggcggtactgacggcgccgtgattacgcacggaaccgatactttagaagaaaccgcgttctttttatcattaaccacgaaaaccgaaaaaccgatcgtaatcgttggcgcgatgcgtccggcaacggcaatcagcgctgatggtgcgatgaacttattgcaagcatcagcgcttgcagttgccaaagaggcgtacaatcgcggcgtgatgatggtgatgaacgaccgcatcggttctggttattacatcagtaaaaaccacgccaacgcgcccgatgcgtttaaatctgtggaatcaggatatttaggattgatggtgggattaaccccgcatttttattatcaaccgcagcagccgatgaatgcggcaaattttgatgtgagtcaatataaagaattgccgcgcgtcgatattatttttggctatcaagatgctgatgctgatttattagatgctgccgttgagcgcggtgcgcgcggtgttgtcatcgatgcaactggtgccggcatgttgtctactaagttattagaacgcgttaaagcgttgactgctgaaggttttcctgtggtgcgcgcttctcgcacaggtcaagggtacgtttccattgctgaagatgaaggcattggcagcggctttttaaatgcacaaaaagcacggattttattgatgcttgctttggcaaacggcgacgatttagcagcaattcgcgcgcgttttcagtaa

SEQ ID NO: 41504 - protein, 341 aa, Dichelobacter nodosus VCS1703A
MKKLLLSILWTSAMLTTQTAFTLPSLNIYATGGTIAGSSDSVTDTSQYQVATLGVEKLIAAVPELKKIATVTGKQIASVDSNDISVNILLELAKTLNQDLAGGTDGAVITHGTDTLEETAFFLSLTTKTEKPIVIVGAMRPATAISADGAMNLLQASALAVAKEAYNRGVMMVMNDRIGSGYYISKNHANAPDAFKSVESGYLGLMVGLTPHFYYQPQQPMNAANFDVSQYKELPRVDIIFGYQDADADLLDAAVERGARGVVIDATGAGMLSTKLLERVKALTAEGFPVVRASRTGQGYVSIAEDEGIGSGFLNAQKARILLMLALANGDDLAAIRARFQ

SEQ ID NO: 41505 - DNA, 969 bp, Bacillus halodurans C-125
  CDS (1)..(969): transl_table=11
atgaaaaaagttttagttatacacacaggtggaacgattgcgatgcatgaagatgaaaaagggggcgtacagcctaaagagacaaatcccctgtttgccaccgtcgaatcgttaacatcgattgcctcgatcgaagtcgatgattttctcaatattccttccccccatatgacacctgagctcatgtttcagttggctgagcgactaaagagccgagtaggtaatgaatcgtttgatggggtcgtgattacacatgggacggatacgttagaagaaacagcctaccttctagatttgttactcgattgggaagtccctgtcgttgtcacaggggcgatgcgttccagtaatgagctcggagcggacggaccacacaattttatttctgctgtcaaaacggctgctacagatgaagcaaaaggaaaaggagttctcgtcgtatttaacgacgaaattcatacagcaaaaaacgtcacgaaaactcatacgagtaacgtcgccacgttccaaagtccacagtatgggccgattgggattgtcacgaaacgaggcgttaccttccaccacgccccttcatacaaagagagctatacggtctcaagcatcgatcatcgagttgtgctattaaaggcctacgcaggcatggatgggtccgttgttgatgcgattgccgacacgggaattgacggcctagtcattgaggctttcggacaaggaaacttaccaccagctgtcgtcccaagcatcaaacgtcttcatcaagccaacattccagtggtactcgtgtcaagaagcgttagtggtatcgttcaggaaacgtacgcttacgaggggggcgggcgtcacctaaaagatttaggggttatttttacgaacggtttaaatggacaaaaagcacgattaaagctactcgtcgcccttgaattgacgaccgatcgtaagaaattacaagaaatctttttcaaataa

SEQ ID NO: 41506 - protein, 322 aa, Bacillus halodurans C-125
MKKVLVIHTGGTIAMHEDEKGGVQPKETNPLFATVESLTSIASIEVDDFLNIPSPHMTPELMFQLAERLKSRVGNESFDGVVITHGTDTLEETAYLLDLLLDWEVPVVVTGAMRSSNELGADGPHNFISAVKTAATDEAKGKGVLVVFNDEIHTAKNVTKTHTSNVATFQSPQYGPIGIVTKRGVTFHHAPSYKESYTVSSIDHRVVLLKAYAGMDGSVVDAIADTGIDGLVIEAFGQGNLPPAVVPSIKRLHQANIPVVLVSRSVSGIVQETYAYEGGGRHLKDLGVIFTNGLNGQKARLKLLVALELTTDRKKLQEIFFK

SEQ ID NO: 41507 - DNA, 972 bp, Lactococcus lactis subsp. lactis Il1403
  CDS (1)..(972): transl_table=11
atgatgaaaaaaatcttaattctccatactggtggaacaatttcgatggcggaagatgaaaatggtcatgtttccccaaatgcagtcaatccaatgaatgctgtgagcatgcagtttgatgaagtaaacttagtgacagaggatatttttaacttacctagtccacatgtcactttatcagatatgttggtcttgaaaaatcgaatcaaaacagcttttattgctgaggattttgatggagtggtcattacacatggaactgacacacttgaagaaacagcttttttccttgacactactctttcgcgtggtaaaccaattgttttaactggtgccatgcgctcaagtaatgaattaggaactgacggaatttataatttactgacagctattcgcgtcgctgctgacagtaattcaagtgaccgtggcgtacttgttgttatgaatgacgagattcattctgctcgttatgtcactaaaacacacacgactaatgtttcaacttttcaaacacctacacatggtcctgtcggtttactgacaaaaaataaaattatttatttccataaagatagtgaaaatcaacatttagatgttgcaactgttcatggaaaagtgccaattgtcaaagcatttgctgggatgactggggaaattttagatttactcaatttggaacaactagacggtcttgtcattgaagcattaggtgcgggaaatctcccacctattgctagtcaatcgcttcaaagattactagatgctaaggttcctgtcgttcttgtttctcgttgttttaacggaattgctgaacctgtctattcctatcaaggcggtggttcacaactttatgaagcaggcgtgatgtttgctgatgaagtcaattctcaaaaagcgcgtattaaattgattattgcattgaatgctggcttgaaagatttatcagaattacgacctttcttggagaattaa

SEQ ID NO: 41508 - protein, 323 aa, Lactococcus lactis subsp. lactis Il1403
MMKKILILHTGGTISMAEDENGHVSPNAVNPMNAVSMQFDEVNLVTEDIFNLPSPHVTLSDMLVLKNRIKTAFIAEDFDGVVITHGTDTLEETAFFLDTTLSRGKPIVLTGAMRSSNELGTDGIYNLLTAIRVAADSNSSDRGVLVVMNDEIHSARYVTKTHTTNVSTFQTPTHGPVGLLTKNKIIYFHKDSENQHLDVATVHGKVPIVKAFAGMTGEILDLLNLEQLDGLVIEALGAGNLPPIASQSLQRLLDAKVPVVLVSRCFNGIAEPVYSYQGGGSQLYEAGVMFADEVNSQKARIKLIIALNAGLKDLSELRPFLEN

SEQ ID NO: 41509 - DNA, 966 bp, Streptococcus pyogenes M1 GAS
  CDS (1)..(966): transl_table=11
atgaaaaaaatcctagtcttacacactggtggaaccatttctatgcaagctgataactctggtagggttgttccaaatcaagataatcctatgacgaaaatacatgctgcagcccaagatattcagcttaccgttagtgattttctaaatcttccgagtcctcacatcacgcctcaccacatgttatctatttatcatcatattcaagaaagaactgatgtctttgatggtatagtcatcacacatggaacagataccttagaagaaacagcttattttttagataccatggcattgcctactaatatacctgttgtcctaacaggtgctatgaggtcttctaatgaagttggtagtgatggcatatataattaccttaccgcacttagagttgcaagtagtgataaagctaaagaaaaaggggtacttgttgttatgaacgatgaaatccatgctgctaaatatgttactaaaacacatacaaccaatatttcaactttccaaacacccacacacggaccgcttggtatcatcatgaaaaatgacctactttttttcaaaactgctgaacctcgtattcgttttgacttgagatgcatttctggaaccatccccattatcaaagcatacgcaggtatgggcgatggtagtatcttgagtctattaactccaggtagcattcaaggtctagttatcgaagctctaggggcaggaaatgtcccaccattagcagttggggagatcgagcacttaattgctttaggtattcctgtcattcttgtttcccgttgtttcaatggtatggcagaacctgtctatgcttatgaaggtggtggtgcgatgctacaagaagcaggtgttatgtttgtaaaagaattgaatgctccaaaagcccgtctaaagttattaattgctctcaacgccggacttactggtcaagagctaaaagattatattgaaggataa

SEQ ID NO: 41510 - protein, 321 aa, Streptococcus pyogenes M1 GAS
MKKILVLHTGGTISMQADNSGRVVPNQDNPMTKIHAAAQDIQLTVSDFLNLPSPHITPHHMLSIYHHIQERTDVFDGIVITHGTDTLEETAYFLDTMALPTNIPVVLTGAMRSSNEVGSDGIYNYLTALRVASSDKAKEKGVLVVMNDEIHAAKYVTKTHTTNISTFQTPTHGPLGIIMKNDLLFFKTAEPRIRFDLRCISGTIPIIKAYAGMGDGSILSLLTPGSIQGLVIEALGAGNVPPLAVGEIEHLIALGIPVILVSRCFNGMAEPVYAYEGGGAMLQEAGVMFVKELNAPKARLKLLIALNAGLTGQELKDYIEG

SEQ ID NO: 41511 - DNA, 996 bp, Campylobacter jejuni subsp. jejuni NCTC 11168
  CDS (1)..(996): transl_table=11
atgaaaaaagctaaatcaaggattgctattttaggaacaggcggaacgatagcaggcttcattgatagcactattgctacaacaggatatgcggccggagccattgatatagatgtattaattaaagcagttccgcaaattagagatttagcagatattagttgggagcaaatagcaaatattgatagttcaaatatgtgtgatgaaatttggttaaggcttgctaaaaaaattgctaagctttttgctgaggggatagacggtgtggtgataactcatggtactgatactatggaagaaactgcttattttttaaatttaaccattaaaagtgataagcccgtagttctagttggcgctatgcgtccatcaactgctataagtgcggatggtccgaaaaatctttataatgcagtggcattagttgtcaataaagaagctaagaataagggtgttatggtagctataaatgataaaattttaagcgctagaggcgtagtaaaaactcatagtttaaatgttgatgctttctcttctcctgattttggggatttgggttatatagtagatggtaaagtctttttctataataatgttattaaagctcacacaaaaaacgctccttttgatgtaagcaaactcacaagtttgccaaaagtagatattctttatagctattcaaatgatggtagtggtgtcgctgcaaaagctttatttgaacatggaactaagggcatagttgttgcaggaagtggagcaggaagtatacacaaaaatcaaaaagatgttttaaaagagcttttaaaaaaagggcttaaggttgttgtaagttcaagggttgtagcaggttgtgttgctgtgagtgattcagatgaaaaattaggttttattagtgctgaagatttaaatcctcaaaaagcaagagttttgcttatgttagcacttacaaaaacaagtgatcctaaaaaaattcaagagtattttttaaaatattaa

SEQ ID NO: 41512 - protein, 331 aa, Campylobacter jejuni subsp. jejuni NCTC 11168
MKKAKSRIAILGTGGTIAGFIDSTIATTGYAAGAIDIDVLIKAVPQIRDLADISWEQIANIDSSNMCDEIWLRLAKKIAKLFAEGIDGVVITHGTDTMEETAYFLNLTIKSDKPVVLVGAMRPSTAISADGPKNLYNAVALVVNKEAKNKGVMVAINDKILSARGVVKTHSLNVDAFSSPDFGDLGYIVDGKVFFYNNVIKAHTKNAPFDVSKLTSLPKVDILYSYSNDGSGVAAKALFEHGTKGIVVAGSGAGSIHKNQKDVLKELLKKGLKVVVSSRVVAGCVAVSDSDEKLGFISAEDLNPQKARVLLMLALTKTSDPKKIQEYFLKY

SEQ ID NO: 41513 - DNA, 1047 bp, Escherichia coli O157:H7 EDL933
  CDS (1)..(1047): transl_table=11
atggagtttttcaaaaagacggcacttgccgcactggttatgggttttagtggtgcagcattggcattacccaatatcaccattttagcaaccggcgggaccattgccggtggtggtgactccgcaaccaaatctaactacacagcgggtaaagttggcgtagaaaatctggttaatgcggtgccgcaactgaaggacattgcgaacgttaaaggcgagcaggtagtgaatatcggctcccaggacatgaacgatgatgtctggctgacactggcgaaaaaaattaacaccgactgcgataaaaccgacggcttcgtcattactcacggtaccgacacgatggaagaaaccgcttacttcctcgacctgacggtgaaatgcgacaaaccggtggtgatggtcggcgcaatgcgtccgtccacgtctatgagcgcagacggtccattcaacctgtataacgcggtagtgaccgcagctgataaagcctccgctaatcgtggcgtgctggtggtgatgaacgacaccgtactggacggtcgcgatgtcaccaaaaccaacaccaccgacgtagcgaccttcaagtctgttaactacggtccgctgggatacattcacaacggtaagattgactaccaacgtaccccggcacgtaagcacaccagcgacacgccgttcgatgtctctaagctgaatgaactgccgaaagtcggcattgtttataactacgctaacgcatccgatcttccggctaaagccctggtagatgcgggctatgatggcatcgtgagcgctggtgtgggtaacggcaacctgtataaatccgtgtttgacacgctggcgaccgccgcgaaaaacggtactgcagtcgtgcgttcttcccgcgtaccgacgggcgctaccactcaggatgccgaagtggatgatgcgaaatacggttttattgcctctggtacgctgaacccgcaaaaagcgcgcgtcctgctgcaactggctctgacgcaaaccaaagatccgcagcagatccagcagatcttcaatcagtactaa

SEQ ID NO: 41514 - protein, 348 aa, Escherichia coli O157:H7 EDL933
MEFFKKTALAALVMGFSGAALALPNITILATGGTIAGGGDSATKSNYTAGKVGVENLVNAVPQLKDIANVKGEQVVNIGSQDMNDDVWLTLAKKINTDCDKTDGFVITHGTDTMEETAYFLDLTVKCDKPVVMVGAMRPSTSMSADGPFNLYNAVVTAADKASANRGVLVVMNDTVLDGRDVTKTNTTDVATFKSVNYGPLGYIHNGKIDYQRTPARKHTSDTPFDVSKLNELPKVGIVYNYANASDLPAKALVDAGYDGIVSAGVGNGNLYKSVFDTLATAAKNGTAVVRSSRVPTGATTQDAEVDDAKYGFIASGTLNPQKARVLLQLALTQTKDPQQIQQIFNQY

SEQ ID NO: 41515 - DNA, 1044 bp, Deinococcus radiodurans R1
  CDS (1)..(1044): transl_table=11
atgatgaccctctgcttcggtggagggttttcgcgttctggcgcccccctctcccctatctattaccctgcccccatgcctgcttctctgccgcgcctcgccctgattcacaccggcggcaccatcgccagccggcccagtcccgacggacgcgggctgacgccgcaaacgccccccgcgctgccggggctggaaggagtgcaggtcagcgaacaccagccgttcaacctgccgagtccgcacgtcacgcccgcgcacatgcagcagctcgcgcacctcatcgagcagctcgccgggggccacgacgcggtggtggtcacgcacggcaccgacacgctggaagaaacggcctttttcctgcacctgtgcctgcccgctgggctgccggtggtgctgaccggctccatgcgccacgccgaggaagtctcctgggacggccccggcaacctgctcgacgccgcgcaggtcgcgctgtgcccgcagacggcggggcgtgggccgctcgtcgtgtttggcggggacatcttcgacgcccgcaccgtgacgaaggtgcacaccagcgcggtggacgcgttcggcggctatcccggtcccatcgggcgcatcgaccgcaccgccgccgggccgcaggtccactattttgcccggcccgaaccgcgccccactttccgcccggtcacgctggagcggcgggtggagattctctatgcctatgccggctggcagggcgagggctacgccggggcgctggagcgggccgacggactggtgattgccgcgctcggcaccggcaacctgccgcccgaactgctgccactcattgccgcgaccgacaagccggtggtgctcgctacccgcacccacgccgggccgattttgccggtgtacggctacgcgggcggcggcgcgacgttggtggaagcgggcgcgattcccgccagttttctcaacgcgcacaaggcgcggctgctgctgctggtgctgcttaacctgggagcgtcgcgcgaagatatccggcgggtctttacgcagggcgtcttctga

SEQ ID NO: 41516 - protein, 347 aa, Deinococcus radiodurans R1
MMTLCFGGGFSRSGAPLSPIYYPAPMPASLPRLALIHTGGTIASRPSPDGRGLTPQTPPALPGLEGVQVSEHQPFNLPSPHVTPAHMQQLAHLIEQLAGGHDAVVVTHGTDTLEETAFFLHLCLPAGLPVVLTGSMRHAEEVSWDGPGNLLDAAQVALCPQTAGRGPLVVFGGDIFDARTVTKVHTSAVDAFGGYPGPIGRIDRTAAGPQVHYFARPEPRPTFRPVTLERRVEILYAYAGWQGEGYAGALERADGLVIAALGTGNLPPELLPLIAATDKPVVLATRTHAGPILPVYGYAGGGATLVEAGAIPASFLNAHKARLLLLVLLNLGASREDIRRVFTQGVF

SEQ ID NO: 41517 - DNA, 963 bp, Streptococcus pneumoniae TIGR4
  CDS (1)..(963): transl_table=11
atgcctaagaaaatccttgttttacatacgggtggaactatttccatgcaggccgatgcttctggcgctgttgtgacgagttcagataatcccatgaaccatgtgtccaacccacttgaaggaatccaagtccacgccttggacttttttaaccttccaagtccccatatcaaacccaaacatatgctggtcctctaccagaaaattaaagaggaagcagataactacgatggagtggtgatcacacacggaaccgatactttagaggaaacagcctatttccttgataccatggaagttccccatatgcctatcgttctaacaggagccatgcgtagctccaatgagctcggtagtgatggtgtttataattacctaagtgctttacgagtggccagcgatgacagggctgctgacaaaggagttttggtcgttatgaacgatgaaatccacgctgccaagtatgtcaccaaaacacatacgactaatgtcagcaccttccagactccaacacatggcccccttggtctcatcatgaaacaggaaatcctctacttcaaaacagctgaacctcgtgttcgctttgaccttgatcacatacaaggtttagtccctatcatctcggcttatgctggtatgacagatgagctgattgatatgctggatttagaacacttggacggtttgattatccaagccttcggagctggtaatattcccaaagaaacggctcaaaaattagaaagccttctgcaaaaaggaattccagtcgctctggtatcacgatgctttaacggtattgccgagcctgtttatgcataccagggtgggggcgtacagttgcaaaaagcaggcgttttctttgttaaagaactcaacgcccaaaaagctcgcttgaaactcctcatcgccctcaatgccggactaacaggacaggctttgaaagactatatggaaggctaa

SEQ ID NO: 41518 - protein, 320 aa, Streptococcus pneumoniae TIGR4
MPKKILVLHTGGTISMQADASGAVVTSSDNPMNHVSNPLEGIQVHALDFFNLPSPHIKPKHMLVLYQKIKEEADNYDGVVITHGTDTLEETAYFLDTMEVPHMPIVLTGAMRSSNELGSDGVYNYLSALRVASDDRAADKGVLVVMNDEIHAAKYVTKTHTTNVSTFQTPTHGPLGLIMKQEILYFKTAEPRVRFDLDHIQGLVPIISAYAGMTDELIDMLDLEHLDGLIIQAFGAGNIPKETAQKLESLLQKGIPVALVSRCFNGIAEPVYAYQGGGVQLQKAGVFFVKELNAQKARLKLLIALNAGLTGQALKDYMEG

SEQ ID NO: 41519 - DNA, 996 bp, Clostridium acetobutylicum ATCC 824
  CDS (1)..(996): transl_table=11
atgaagaaagttgcagtgatatttaatggtggtactatatctatgaagtttgattcaagggtaaaggcagcagttccagctttgtctggagaagaaataatgtctatggtaacaggaatagaaaaatttgctgaaattgagtcctttaacttttcggaggaaccaggacctcatatgacacctgagaaaatgatggaattatctaatttcataaaggatattttaaaaagagatgatattgtaggagcagtagttacacatggtacagactcacttgaggagacagcatatttcctagacttaaccataaaaaatgaaaaacctgtggttgtaactggttccatgagaaatagttctgaacttggatatgatggtccagccaatctttctgctgctatatgtacagcaatatcagaagaatcaaggaataaaggagtactagtatgcttcagcgatgaacttaacagcgcttctgaagttacaaaggtacattctatgcatcttaatgctttcgagagtccggattttggaccacttggaatagttgatactaataagcccatattttacagggataaagtttataatgattacatagaaacaagcagcgtagaatctaaagtggctttaataaaaacagctgtaggaatgaattctgattttatagattttgcagttgaaaaaggctataaaggaattgtaattgaagctatgggaagaggtaatgtacctccttatatggtagaaggcattgaaagggctctcaagaaaaatgtgcctgttgttcttgtctcacgatgctataaaggaagagttcttgattcctatgggtatcatggtggaggaaaagaacttagaaatataggagtaatttttggagataatcttcctggtcaaaaggcaagaataaagcttatgcttgcacttggaaagacaaaagatcttgaaaaaataagaaatatatttgaagaggatttctacaggatatataaataa

SEQ ID NO: 41520 - protein, 331 aa, Clostridium acetobutylicum ATCC 824
MKKVAVIFNGGTISMKFDSRVKAAVPALSGEEIMSMVTGIEKFAEIESFNFSEEPGPHMTPEKMMELSNFIKDILKRDDIVGAVVTHGTDSLEETAYFLDLTIKNEKPVVVTGSMRNSSELGYDGPANLSAAICTAISEESRNKGVLVCFSDELNSASEVTKVHSMHLNAFESPDFGPLGIVDTNKPIFYRDKVYNDYIETSSVESKVALIKTAVGMNSDFIDFAVEKGYKGIVIEAMGRGNVPPYMVEGIERALKKNVPVVLVSRCYKGRVLDSYGYHGGGKELRNIGVIFGDNLPGQKARIKLMLALGKTKDLEKIRNIFEEDFYRIYK

SEQ ID NO: 41521 - DNA, 954 bp, Agrobacterium tumefaciens str. C58
  CDS (1)..(954): transl_table=11
ttgagtgggcagggtacagccccgctggtggcggtcatcgccaccggtggcaccattgccagccggcggggcgccgatggcgccagcacccccagcctttccggcgaggatctgctggcgctggttccgcaggtcaatgcacggctgaagcccgtcgatctgatggcgaaggattcgtccagcctgaccttggctaacatgcagcgcatcagcgatgccgttggcatcgaactcagcgatcccgccgtggcgggcatcgtcgttctgcatggaaccgatgcgatggaagaatcgtcgctgctcgtccatctgcagcacgcccttcccaagcccgtggtcttcaccggcgcgcaatttacggcggaccacaggcaagcggacggaccggccaatctggcccgggccatagaaacagcgctcgatcagcggaatgctgaaaagggtgtgctgctttccttcggtggccgctgtctgccggcgtgggggctttacaagctgagtgcggatgcggcggacgccttccgttcggcgcgaccgcaggtccaggccgcagcgccgaaacttgctgctcccgtcacggacatcagggttgatatcgtcgccattcatcccggttgtgacgcgacccatatcgatgccagccttgcagcgggtgcaaaaggtatcgtgcttgctgcactcggttccggcaatgccaaccctctcatcgctgaagcggtgaagcgctgcgcagagcgccgcgttccggtcgtggtttccagccgtgtgccggaaggcctgctggttgcaagttatggcggcggcggcggcgggcatgatctcgtcgctgtgggtgccgtgcattcatccacacttcggccggggcaggcccgcattctgctggcggcgctgctcgccagtaacagttcggccgaaaccatcgtatccgcctttggcgagccgctctctcattaa

SEQ ID NO: 41522 - protein, 317 aa, Agrobacterium tumefaciens str. C58
MSGQGTAPLVAVIATGGTIASRRGADGASTPSLSGEDLLALVPQVNARLKPVDLMAKDSSSLTLANMQRISDAVGIELSDPAVAGIVVLHGTDAMEESSLLVHLQHALPKPVVFTGAQFTADHRQADGPANLARAIETALDQRNAEKGVLLSFGGRCLPAWGLYKLSADAADAFRSARPQVQAAAPKLAAPVTDIRVDIVAIHPGCDATHIDASLAAGAKGIVLAALGSGNANPLIAEAVKRCAERRVPVVVSSRVPEGLLVASYGGGGGGHDLVAVGAVHSSTLRPGQARILLAALLASNSSAETIVSAFGEPLSH

SEQ ID NO: 41523 - DNA, 1044 bp, Salmonella typhimurium LT2
  CDS (1)..(1044): transl_table=11
atgaaaattagagttttcatggccaccgtgttgctgctcatcagccactgtgtatttagcacaacgtcactaccgcatattgttattctcgcgacaggtggtactatcgccgggacggcagccaataatacgcaaaccgccggatataaatctggtgaacttggcgtgcaaacattaataaatgccgtgccggaaatgaataatatcgctcgcgttgacggcgagcaggtggcgaatattggtagcgaaaatatgaccagcgatatcatcctgaaactttcacagaaggtgaatgcgttattggcgcgggacgatgttgacggtgtggttattactcatggcactgacacgctcgatgaaaccgcctactttcttaatttgaccgtgaaaagcgacaaaccggtggtgtttaccgctgcaatgcggcccgcgtcggcaatcagcgccgatggcgcaatgaacctgctggaagcggtcacggtggctgctgacccgaatgcgaagggacgcggtgtgatggtggttttaaacgatcgtattggttcggcgcgctttgtgacgaaaactaatgccacgactctggatacctttaaagcgccggaagagggctatctgggggtcatcgttaatggtcagccacagttcgaaacgcgggtggaaaaaattcataccctgcgatctgtttttgacgtacgtaatatcaaaaaattacccaatgtggtgattatttacggctatcaggacgacccggaatatatgtatgatgcggcgatcgcccatcacgcggacggtattatttatgccggaaccggcgcaggttcggtctcggtacgcagcgacgcggggattaaaaaagcggagaaagccgggattatcgtggtgcgcgcttcccgcaccggaaacggcgtcgtaccgttggataaagggcagccagggctggtgtctgactcgctcaacccggcgaaggcgcgagtcttgctgatgacggcattaactcagacgcgtaatccggaactgatccagagttatttcagtacgtattaa

SEQ ID NO: 41524 - protein, 347 aa, Salmonella typhimurium LT2
MKIRVFMATVLLLISHCVFSTTSLPHIVILATGGTIAGTAANNTQTAGYKSGELGVQTLINAVPEMNNIARVDGEQVANIGSENMTSDIILKLSQKVNALLARDDVDGVVITHGTDTLDETAYFLNLTVKSDKPVVFTAAMRPASAISADGAMNLLEAVTVAADPNAKGRGVMVVLNDRIGSARFVTKTNATTLDTFKAPEEGYLGVIVNGQPQFETRVEKIHTLRSVFDVRNIKKLPNVVIIYGYQDDPEYMYDAAIAHHADGIIYAGTGAGSVSVRSDAGIKKAEKAGIIVVRASRTGNGVVPLDKGQPGLVSDSLNPAKARVLLMTALTQTRNPELIQSYFSTY

SEQ ID NO: 41525 - DNA, 1104 bp, Ralstonia solanacearum GMI1000
  CDS (1)..(1104): transl_table=11
ttgcttgccaacaggacgccggcccttgcgccggcgtttttcatttggcgcgaaagcgcggcgggcggatacaatgcgccgcgtcacaatttcctgcttgtcgcgccgatgtcctcgttgcccactatcgccattctcgccaccggcggcaccattgccggctcggcggacgattccgcttccgcggcccgctatcgtgccggtgccgtgcccatcgaccagttgctggcagccagcaagctgggcctggaacgcatcgccaacgtgcgcgccgagcaggtcgcgcagatcgacagcaaggacctgaccttcgacgtgtgggagcgtctggtggcgcggatccgtcactggatcgatgtggagcgtgtggacggcgtggtcatcacgcacggcaccgacacgctcgaggaaaccgcgatgctgctgcacctggtgttgcagactgacatgcccatcgtcatgaccgcggcgatgcggccgtcgacgtcgttgtcggcggatggtccgctgaacctgctcaatgccgtgcgcgcagccgccagccctgcctcgcgcgggcgtggcgtgctggtggccctgaatcagcgcgtccatgcggcgcgcgacgtgcagaaggggcacacctacgctgtcgaggcgtttgtgtcgccggacgtcggtccgcttggcttcgtgctggacgccgcagtgcaataccagcgcgccgcccagctgccggccgcggctgacgggctgccgatgccggctgtcgggcaatggccgtgggtcgaggtgctgtcgagctacgctcagcccgatgcgcgcctggtcgacgctctggtggaggccggtgtgcgcgggctggtcattgccgcgacgggggcggggtccatccacgtcaatctggaagctgcgctgcagcaggcggtcaagcagggcgtgattgtgctgcgttcgacccggactggggccggcgtggtgccggcgcatcccgacgggcagggctgggcatcgtccgggacgctcaacccgtacaaggcgcgcgtgcttctgatgctgctgattgccgccggccatgcccaggcagaaacggcctccctgcagcaagtcattgatcgatattga

SEQ ID NO: 41526 - protein, 367 aa, Ralstonia solanacearum GMI1000
MLANRTPALAPAFFIWRESAAGGYNAPRHNFLLVAPMSSLPTIAILATGGTIAGSADDSASAARYRAGAVPIDQLLAASKLGLERIANVRAEQVAQIDSKDLTFDVWERLVARIRHWIDVERVDGVVITHGTDTLEETAMLLHLVLQTDMPIVMTAAMRPSTSLSADGPLNLLNAVRAAASPASRGRGVLVALNQRVHAARDVQKGHTYAVEAFVSPDVGPLGFVLDAAVQYQRAAQLPAAADGLPMPAVGQWPWVEVLSSYAQPDARLVDALVEAGVRGLVIAATGAGSIHVNLEAALQQAVKQGVIVLRSTRTGAGVVPAHPDGQGWASSGTLNPYKARVLLMLLIAAGHAQAETASLQQVIDRY

SEQ ID NO: 41527 - DNA, 999 bp, Brucella melitensis 16M
  CDS (1)..(999): transl_table=11
atgaagacaggcaggacggatcgccccagaattctcatcgtttccaccggcggaaccatcgcctcgcgttacgatccgcaaacggattcgctgttgagcgtttcgaccggaaaggaacttctatcctctctcggtgcgcttgcccctgcagtcgatgttgttcttgacgaattctgcaatcttggcagcaaccgcatcgatctcgatacatctttcaggcttgcgcatcatattgatgaacggctcagggaccgaaccgtcgacgggtgtgtggtcacacacggcacggacacgctggaggaaagcgcattcctcgcacagcttacgatatcctcgcgaaagccggtggtctttaccggagcccagcgcagcgcagacgaaccggatgccgacggaccacgcaatcttgccgacgcaatctccgttgccgcctcgcccgaggctcgcgatctcggcacgctcgtcgtcttcgccgggaaggtgctctcctctatcgacgcgacaaaaattcatacgtcgaagctcgaagcctatgatgcccccggatatgggccgctcggcgtggtggatcacggcgcggtattcatcacaagaaaaccgctgggctatccgatgattgccgcccattcgatcgaaactcgggtcgatctcatcacactcgcgatgggtgccgatggccgtctcatcgaagcggcgatcaattccggcacacacggcttcattctggaaacattcggccggggcaacgccacgcccgcagttgtcgatgccatcgcccgagcaacggaacggggcatcgtaacaatcatcacctcgcgctgcccggatggccgggtgctgcctgtctacggcgatggaggcggaagcgaccttgaaaaggccggagcaatcttcgccggtcggctgaacggccccaaagcacgaattctcctttgtctgtcattgccaaccatccctgttgaggagctaggccgcctttttgagcagtttggacgataa

SEQ ID NO: 41528 - protein, 332 aa, Brucella melitensis 16M
MKTGRTDRPRILIVSTGGTIASRYDPQTDSLLSVSTGKELLSSLGALAPAVDVVLDEFCNLGSNRIDLDTSFRLAHHIDERLRDRTVDGCVVTHGTDTLEESAFLAQLTISSRKPVVFTGAQRSADEPDADGPRNLADAISVAASPEARDLGTLVVFAGKVLSSIDATKIHTSKLEAYDAPGYGPLGVVDHGAVFITRKPLGYPMIAAHSIETRVDLITLAMGADGRLIEAAINSGTHGFILETFGRGNATPAVVDAIARATERGIVTIITSRCPDGRVLPVYGDGGGSDLEKAGAIFAGRLNGPKARILLCLSLPTIPVEELGRLFEQFGR

SEQ ID NO: 41529 - DNA, 978 bp, Corynebacterium glutamicum ATCC 13032
  CDS (1)..(978): transl_table=11
atgtcgaagcagcactccacaccattaaacaatgatgaagaacacacttccgctcctcaaaaggttgcggtaatcaccacgggcggaaccatcgcctgtacttccgacgcaaatgggcatctgcttcccaccgtcagcggtgcagacctgcttgcgccaatcgcaccacggttcaatggagcgcagatcgctttcgaaatccacgaaatcaaccgccttgattcctcctccatgacgtttgaggatctcgattccatcatcgccacggttcataaggtgttggaggatccggatgttgttggcgtagtagttacccacggcaccgattccatggaagagtccgccatcgccgtagacaccttccttgatgatccccgcccagtcattttcaccggcgcccaaaaacccttcgatcatcccgaagccgacggcccaaacaaccttttcgaagcctgcctcatcgcatccgacccctccgctcgcggaattggtgcactcattgtcttcggtcacgccgtcatccctgctcgcggctgcgttaaatggcacacctctgatgagctggcgtttgcaaccaacggccctgaagaaccagagcgccccgatgcgctgcccgtagctaaattggcggatgtctctgtcgaaatcatccccgcataccctggtgccaccggcgcaatggtggaagctgccatcgctgccggtgctcaaggacttgtagtggaagcaatgggatcaggcaatgttggttcccgcatgggtgatgccctaggtaaagcacttgacgctggaattcccgtggtgatgagcactagggttcctcgtggtgaagtatccggagtgtatggcggtgcaggtggaggtgcgactttggctgcgaagggcgctgtgggatctcgctacttcagagctggtcaggcacgtattttgctcgcgattgccattgcgacgggcgcacatccggtgacgctttactaa

SEQ ID NO: 41530 - protein, 325 aa, Corynebacterium glutamicum ATCC 13032
MSKQHSTPLNNDEEHTSAPQKVAVITTGGTIACTSDANGHLLPTVSGADLLAPIAPRFNGAQIAFEIHEINRLDSSSMTFEDLDSIIATVHKVLEDPDVVGVVVTHGTDSMEESAIAVDTFLDDPRPVIFTGAQKPFDHPEADGPNNLFEACLIASDPSARGIGALIVFGHAVIPARGCVKWHTSDELAFATNGPEEPERPDALPVAKLADVSVEIIPAYPGATGAMVEAAIAAGAQGLVVEAMGSGNVGSRMGDALGKALDAGIPVVMSTRVPRGEVSGVYGGAGGGATLAAKGAVGSRYFRAGQARILLAIAIATGAHPVTLY

SEQ ID NO: 41531 - DNA, 978 bp, Thermoanaerobacter tengcongensis MB4
  CDS (1)..(978): transl_table=11
ttgggtaaagtggctgtgatttttacaggtggaaccatagcgatgaagcaagaccccaatctgaaaggggcagtcccttccctcacgggaaaagacctgcttgaaattattcctcacagagaaaacgttttagaaattgaaactatagaatttggaaactaccctagtcctcatctcacagtagaacttttggaagaattaagagaagtcgtagagaagacccttaaaagagatgaaataaaaggagttgtgataacccacggcactgatacattagaagaaacagcttattttttagagctcaccacaaattttgacaaacctattgtcttaactggcgcaatgaaaaattcctctgaagcaggttatgatgggccttccaatttaattgactctctcaccacagcctcttcagaaaaatccaaaaaaagaggcgtgttagtagtgctaaacggtgaaattcattctgcaaaagatgtaacgaaaacccatacttcaagtcttgacacttttaaaagccctgaaacaggtcctctggggtatgtggacagtggcaatgtgtatttttatagaaacgtagaaaaaaggcagtacattcccacaaaaaaactggaacgtcgcgtaagccttttaaaagtagtgtttggaatggatgacaaactgataagatttttagtagaaaatggagaaagaggcattgtcattgaagggacgggcagaggaaatgtgcctccaaaagtagcagaaggaataaaatacgctatatctaaaggaacagttgtagttctcgtatcaaggtgcccgatgggaagagtacatccttcctatgcttatgaaggaggaggaaaacacctcgaatctctgggggtaatttttggaggaaatctatcaggtcaaaaggcaagagtaaaattaatggcagcactggcatacacatcagattacagaaaaattagagagatttttgaggaagagtaa

SEQ ID NO: 41532 - protein, 325 aa, Thermoanaerobacter tengcongensis MB4
MGKVAVIFTGGTIAMKQDPNLKGAVPSLTGKDLLEIIPHRENVLEIETIEFGNYPSPHLTVELLEELREVVEKTLKRDEIKGVVITHGTDTLEETAYFLELTTNFDKPIVLTGAMKNSSEAGYDGPSNLIDSLTTASSEKSKKRGVLVVLNGEIHSAKDVTKTHTSSLDTFKSPETGPLGYVDSGNVYFYRNVEKRQYIPTKKLERRVSLLKVVFGMDDKLIRFLVENGERGIVIEGTGRGNVPPKVAEGIKYAISKGTVVVLVSRCPMGRVHPSYAYEGGGKHLESLGVIFGGNLSGQKARVKLMAALAYTSDYRKIREIFEEE

SEQ ID NO: 41533 - DNA, 969 bp, Staphylococcus aureus subsp. aureus MW2
  CDS (1)..(969): transl_table=11
atgaaacatctacttgttattcatactggtggcaccattagtatgtcacaagaccaatctaataaagtagtaacaaatgataccaaccctatttcaatgcatcaagatgtcataaatcaatatgcacaaatagatgaattaaatccttttaatgtaccatcacctcatatgacaatccaacatgttaaacaattaaaggatattattttagaagcagtaacaaataaatattatgatggtttcgttatcacgcatggtaccgatacgttagaagaaactgcctttttacttgatttaatattaggtatcgagcaacctgttgttattactggcgcaatgcgctcgtctaatgaaattggttctgacggattatataattatatttccgctattcgcgttgcctctgatgaaaaggcccgtcataaaggcgtgatggttgtatttaatgatgaaattcatacggcgcgtaatgttaccaaaacacatacgtctaatacaaacacatttcaaagtccaaatcatggtccgctaggtgtattgacaaaggatcgtgtgcaattccatcatatgccatatcgccaacaagcattggaaaatgtcaatgacaaactaaatgtaccattagtaaaagcatatatgggtatgccaggtgacatttttagtttttatagtcgagaaggtatcgatggtatggttattgaagcgttaggacaaggcaacatacctccaagcgcattagaaggcattcaacaattagtatctttaaatatacctattgtgctagtttcacgttcctttaatggtattgtgagtccaacttacgcatacgatggtggtggttaccaactcgcacaacaaggttttattttttctaacggtttgaatggtccaaaagcaagattaaaattattagttgcgttaagcaacaatttagataaagctgaaatcaaatcatattttgaattataa

SEQ ID NO: 41534 - protein, 322 aa, Staphylococcus aureus subsp. aureus MW2
MKHLLVIHTGGTISMSQDQSNKVVTNDTNPISMHQDVINQYAQIDELNPFNVPSPHMTIQHVKQLKDIILEAVTNKYYDGFVITHGTDTLEETAFLLDLILGIEQPVVITGAMRSSNEIGSDGLYNYISAIRVASDEKARHKGVMVVFNDEIHTARNVTKTHTSNTNTFQSPNHGPLGVLTKDRVQFHHMPYRQQALENVNDKLNVPLVKAYMGMPGDIFSFYSREGIDGMVIEALGQGNIPPSALEGIQQLVSLNIPIVLVSRSFNGIVSPTYAYDGGGYQLAQQGFIFSNGLNGPKARLKLLVALSNNLDKAEIKSYFEL

SEQ ID NO: 41535 - DNA, 1038 bp, Yersinia pestis KIM
  CDS (1)..(1038): transl_table=11
atgaaatatataaagctaacggtactcgccggaatatttgtagggatcagtagcccggtttttgctctgcctaatatcactttattggcaaccgggggcaccatcgcagggggaggtgattctgctacaaaatccaattataccgccggtaaattgggggtagatgcgctggtagaggccgtcccggctataaaagacattgcgaatatccagggcgaacaagtggtgaatataggctcacaagatatgaatgacgatgtttggctcacattggcgaaaaaaatcaataaagactgcacgaaaacagacggttttgtcatcactcatggaacggatactttagaagaaacggcttatttcctcgatttaaccgtcaattgtgataaacccgtggtgatagtcggcgcaatgcgcccggcaacggcattaggggccgacggcccgttgaacctctacaacgcggtggtggtcgccagtgacgcagactcggctaaacggggtgtgctggtggcgatgaatgacatggttttcactgggcgtgatgtggtaaaaaccaacaccacatcagtgcaaacattccaatcaccgaatacagggccattggggtatatctatgatggtaaagttaattatttgcatcaaccagcagcaagacaactcgcgtttgatatcagtaagctaaatacgttaccgaaagttggcattatttataactatgcaaatgcatcggacatacccgcaaaggcattgattgccgatggttatcaggggattgtcagtgctggcgtggggaatggtaatctctatcatacggttttcgatacgctggcaaccgccgcaagtcacggagttgcagttgtgcgctcgtctcgtgtgcccagtggttcaaccacagaaggtgctgaaattgatgacgctaaatacggctttgtcgctgcgggtgcacttaatccacagaaagcacgggttttattacagttagcattaacgcaaactcaaaaaccacaagaaattcaaaaactattccacacatattga

SEQ ID NO: 41536 - protein, 345 aa, Yersinia pestis KIM
MKYIKLTVLAGIFVGISSPVFALPNITLLATGGTIAGGGDSATKSNYTAGKLGVDALVEAVPAIKDIANIQGEQVVNIGSQDMNDDVWLTLAKKINKDCTKTDGFVITHGTDTLEETAYFLDLTVNCDKPVVIVGAMRPATALGADGPLNLYNAVVVASDADSAKRGVLVAMNDMVFTGRDVVKTNTTSVQTFQSPNTGPLGYIYDGKVNYLHQPAARQLAFDISKLNTLPKVGIIYNYANASDIPAKALIADGYQGIVSAGVGNGNLYHTVFDTLATAASHGVAVVRSSRVPSGSTTEGAEIDDAKYGFVAAGALNPQKARVLLQLALTQTQKPQEIQKLFHTY

SEQ ID NO: 41537 - DNA, 990 bp, Brucella suis 1330
  CDS (1)..(990): transl_table=11
atgtctttaatttctatcggccccctcgggggtacgattgcgatggttgaggggggaagcggaggcggtgttgtgccgaccctgaccgcggatgcactcattgccgctgtgccgcagattagaaattatgcgcagatcaaggcccaatctctttttcagcttcccagcccctcgctaaaatttcggcacggccttgaagtgataggctgggctgaaaacgaggtgaaatcgggagcggacggcatagtgctgacgcagggaaccgatacgcttgaggaaatggcattccttctggatttattgtgggaacatccgcagcccctcgtactgaccggcgccatgcgctcgccgcgcgcgccgggtgctgacggtccggccaatctggtggcggccgtattgacagccgcgagcaggcttagccgggaacgcggtgtccttgttgcaatgaacgatacaatccacgcggcacgttggataacaaaatctcatgcgctcagtgtccagacattcgtatcgtcggacagcgggccgttgggatatgtgtatgaggagacgccggtttacatcaacaccctttcgcggttgccaaaaattgaccgtacgcagttcaacgccgatgtgaagatcggcttttacgaatcgctgctggatggtgacgcgcagatgctgcgaagcatgtttgagagcggcagatatgatggaatcgtcgtcgcctgttttggagcaggacatgtgtcgggcgacgaagccgacattatcgagcgctatgcgtcccgcattccggtcgtcgtagccagccggacctatggcggaaggaccgccacgaagacttatgggttccatggctccgagattgatcttcagacgaaaggcgctatgctcgcaggctggttatccccccgcaaggcgcggttattgctgtgggcactactggcagcgggtaaaaatctggaagaaacaagagctaacttcctgctctataacccataa

SEQ ID NO: 41538 - protein, 329 aa, Brucella suis 1330
MSLISIGPLGGTIAMVEGGSGGGVVPTLTADALIAAVPQIRNYAQIKAQSLFQLPSPSLKFRHGLEVIGWAENEVKSGADGIVLTQGTDTLEEMAFLLDLLWEHPQPLVLTGAMRSPRAPGADGPANLVAAVLTAASRLSRERGVLVAMNDTIHAARWITKSHALSVQTFVSSDSGPLGYVYEETPVYINTLSRLPKIDRTQFNADVKIGFYESLLDGDAQMLRSMFESGRYDGIVVACFGAGHVSGDEADIIERYASRIPVVVASRTYGGRTATKTYGFHGSEIDLQTKGAMLAGWLSPRKARLLLWALLAAGKNLEETRANFLLYNP

SEQ ID NO: 41539 - DNA, 1047 bp, Shigella flexneri 2a str. 301
  CDS (1)..(1047): transl_table=11
atggagtttttcaaaaagacggcacttgccgcactggttatgggttttagtggtgcagcattggcattacccaatatcaccattttagcaaccggcgggaccattgccggtggtggtgactccgcaaccaaatctaactacacagcgggtaaagttggcgtagaaaatctggttaatgcggtgccgcaactaaaagacattgcgaacgttaaaggcgagcaggtagtgaatatcggctcccaggacatgaacgataatgtctggctgacactggcgaaaaaaattaacgccgactgcgataaaaccgacggcttcgtcattacccacggtaccgacacgatggaagaaactgcttacttcctcgacctgacggtgaaatgcgacaaaccggtggtgatggtcggcgcaatgcgcccgtccacgtccatgagcgcagacggtccattcaacctgtataacgcggtagtgaccgcagctgataaagcctccgctaatcgtggcgtgctggtggtgatgaacgacaccgtactggacggtcgcgatgtcaccaaaaccaacaccaccgacgtagcgaccttcaagtctgttaactacggtcctctgggatacattcacaacggtaagattgattaccaacgtaccccggcacgtaagcacaccagcgatacgccattcgatgtctctaagctgaatgagctgccgaaagtcggcatcgtttataactacgctaacgcatccgatcttccggctaaagcactggtagatgcgggctatgatggcatcgttagcgctggtgtgggtaatggtaacctgtataaatccgtgttcgacaccctggcaaccgccgcgaaaaacggcactgcagtagtgcgttcttcccgcgtaccgacgggtgctaccactcaggatgctgaagtggatgatgcgaaatacggcttcgtcgcctctggcacgctgaacccgcaaaaagcgcgcgtcctgctgcagctggctctgacgcaaaccaaagatccgcagcagatccagcagattttcaatcagtactaa

SEQ ID NO: 41540 - protein, 348 aa, Shigella flexneri 2a str. 301
MEFFKKTALAALVMGFSGAALALPNITILATGGTIAGGGDSATKSNYTAGKVGVENLVNAVPQLKDIANVKGEQVVNIGSQDMNDNVWLTLAKKINADCDKTDGFVITHGTDTMEETAYFLDLTVKCDKPVVMVGAMRPSTSMSADGPFNLYNAVVTAADKASANRGVLVVMNDTVLDGRDVTKTNTTDVATFKSVNYGPLGYIHNGKIDYQRTPARKHTSDTPFDVSKLNELPKVGIVYNYANASDLPAKALVDAGYDGIVSAGVGNGNLYKSVFDTLATAAKNGTAVVRSSRVPTGATTQDAEVDDAKYGFVASGTLNPQKARVLLQLALTQTKDPQQIQQIFNQY

SEQ ID NO: 41541 - DNA, 960 bp, Streptococcus mutans UA159
  CDS (1)..(960): transl_table=11
atgaaaagaatccttgttttacatactggaggaaccatttccatgcatgctgataaggctggtagggttgttccagacagtgataaccctatgaaccatgccagtgtcaaacttgatgatattcagattaatgctattgattttttaaacattcccagtccgcaaataacagtggagcatatgcttttattgactcaaaaaattagagaaacagctggcttatacgatggcgtggttattacacatggaacagacactttagaagagactgcttacttcctagacactatgattttgccacaaattcccattgttttgactggagctatgcgttcttccaatgagttagggagtgatggtgtttacaattacttatctgcccttcgtgttgccagccatgacaatgctgctgacaagggagtccttgtcgtcatgaatgatgaaattcatgctgccaaatacgttaccaaaacacatactactaatgtttctacttttcaaacacctacacatggaccgcttggtatcattatgaaacatgatattctctttttcaaaacagctgaaccgcgggttcgttttcgcctagaatctttaacaggaactgttcccattatcaaggcatacgctggtatgggtgattggcttttaaatattttagataaaagcagtattgatggtttggttgttgaagctctaggtgctggtaaccttccacccgaggctgctcaaagcattaccaagctcattcaagaaggaattcctgtcgctctcgtctctcgatgttttaacgggattgcagagcctgtctacgcttaccaaggtggcggtgtcaaactgcaagaagcaggtgtcatgtttgttagggaactcaatgcccctaaggccagactcaaacttctcattgctctcaacgctggcctcaaggggcaagaattaaaagaatacatagaaggttaa

SEQ ID NO: 41542 - protein, 319 aa, Streptococcus mutans UA159
MKRILVLHTGGTISMHADKAGRVVPDSDNPMNHASVKLDDIQINAIDFLNIPSPQITVEHMLLLTQKIRETAGLYDGVVITHGTDTLEETAYFLDTMILPQIPIVLTGAMRSSNELGSDGVYNYLSALRVASHDNAADKGVLVVMNDEIHAAKYVTKTHTTNVSTFQTPTHGPLGIIMKHDILFFKTAEPRVRFRLESLTGTVPIIKAYAGMGDWLLNILDKSSIDGLVVEALGAGNLPPEAAQSITKLIQEGIPVALVSRCFNGIAEPVYAYQGGGVKLQEAGVMFVRELNAPKARLKLLIALNAGLKGQELKEYIEG

SEQ ID NO: 41543 - DNA, 1056 bp, Corynebacterium efficiens YS-314
  CDS (1)..(1056): transl_table=11
ttgttctatgtgacgtggtgtccgcttttcgtttctggtgtcccagctcgcagggaaagtgcgggaaaagaagaagagaggtgctctatgacccacgtcctcgtcctggcaacgggtgggaccatagcgtcgacagccgggccgtctggatcgggtgccgtcgccaccgaaggtatcgatgcgctcctgaacaaggtggaggtcagtggcatcacggtgagtggacgcaatgtcctcaccaccaattccttcctcctgtcacatcgggacctacggctgattgtcgaggcggtcacagacgcgctgcgggacgagggcgtggacggtgtggtgttgacccacggcaccgacaccatggaggaatcggcctaccttttggacctgatccacgacagtgacaaacccgtggtactcaccggctcccagcgatccaatgatggcattggatacgacggggatatcaacctggtggacgccatcaccgtcgcaggagcccccgaggcgcggggacagggggtcctcattgcattcgccggtgggatccaccctgcccgtggcacccggaaactccacaccattgacccgtcgcccttcggcggcacagggcccctcggctatgtcaccggcggggcggtggggtttcacgccaccgcacgcaggggtccggcacttccgccacccgacaggggcttcgatgacacccgggtggatgttgttgtctcccatcccggagcggacgccaccgccgctcgggcagcggtggcagccggtgccagaggtgtggtcattctgggcaccggtgccggtaacggcaatcaggagatccggtcatgggtggcggaggctgtgagccgggacatcaccgtgggggtcagcttccgcgcggtcggcggtccggttcgtccgctctatggcaacggtggcgcctcggacctggcggacgccggtgccctgttactgggtgacctgccgtggccccaggcccggatcctgctcgcccatctgatctccattcacggcatcgtgtcctcgtcgatggtggctccctatatctga

SEQ ID NO: 41544 - protein, 351 aa, Corynebacterium efficiens YS-314
MFYVTWCPLFVSGVPARRESAGKEEERCSMTHVLVLATGGTIASTAGPSGSGAVATEGIDALLNKVEVSGITVSGRNVLTTNSFLLSHRDLRLIVEAVTDALRDEGVDGVVLTHGTDTMEESAYLLDLIHDSDKPVVLTGSQRSNDGIGYDGDINLVDAITVAGAPEARGQGVLIAFAGGIHPARGTRKLHTIDPSPFGGTGPLGYVTGGAVGFHATARRGPALPPPDRGFDDTRVDVVVSHPGADATAARAAVAAGARGVVILGTGAGNGNQEIRSWVAEAVSRDITVGVSFRAVGGPVRPLYGNGGASDLADAGALLLGDLPWPQARILLAHLISIHGIVSSSMVAPYI

SEQ ID NO: 41545 - DNA, 990 bp, Pseudomonas putida KT2440
  CDS (1)..(990): transl_table=11
atgagtgaacattcgagcctgcccaggctgtcgatcgccactctgggtggcacggtcagtatgcgggccggtgctgtcggggatggtgtgacgccaagcctggattgtgagcggcaactgcttcaggttccacaattgcgcgaaatggcgcagttgaacgttgcttcattgtgcctgctccccagtgcatcgctgggcttcgcgacgttgctggaggtgctggcatgggcccggggcgaggtggagcgcggggctcaggccttggtattgagccaagggaccgacagccttgaagaaacggcctatttcctggatctgctctggccattcgatgtgccattggtgatgaccggtgccatgcgctcggcgagtcagccgggcaatgatgggccggccaacttgttggctgcggctcaggttgcattggcacaagacagccgtgggcgaggtgtgcttgtggtcatgaatgatcaggtccactgcgcggcaagggttcgcaagacggccagcctggcgatggcggcattcgagtcgcccggatgtggcccgttgggcgacgttgtggagggtgttgtgttgtatcgccatccgcccgggcgacggaaagtgttgccgttaccctatcgcaccgaccagcgcgttgccctgctggaagcctgcctggacgcagacacggcgctgctgcaggctgtggccacattgggttatgaggggttggtcatcgccggtttcggtgctgggcatgtttccgccagttggtccgaagtgctggaacacctggcgcccaccttgccggtcatggttgctacgcgcacaggtagggggcttacagcccgggcaacctacgggtttgctggtgcagagatcgacctgcagaaaaaaggcgtctacatggctgggcaactctgcccgcgcaaatgccgcatcttgctgtggctgctgataggcaccgaccggcaacatgagctgcaggactggttgcagccctga

SEQ ID NO: 41546 - protein, 329 aa, Pseudomonas putida KT2440
MSEHSSLPRLSIATLGGTVSMRAGAVGDGVTPSLDCERQLLQVPQLREMAQLNVASLCLLPSASLGFATLLEVLAWARGEVERGAQALVLSQGTDSLEETAYFLDLLWPFDVPLVMTGAMRSASQPGNDGPANLLAAAQVALAQDSRGRGVLVVMNDQVHCAARVRKTASLAMAAFESPGCGPLGDVVEGVVLYRHPPGRRKVLPLPYRTDQRVALLEACLDADTALLQAVATLGYEGLVIAGFGAGHVSASWSEVLEHLAPTLPVMVATRTGRGLTARATYGFAGAEIDLQKKGVYMAGQLCPRKCRILLWLLIGTDRQHELQDWLQP

SEQ ID NO: 41547 - DNA, 1140 bp, Bradyrhizobium japonicum USDA 110
  CDS (1)..(1140): transl_table=11
atgacgaagcctaccgccagcccagccagctgtcgccaacgtcgaacatccatgcttgccattccactgctgtcttttgcgctctggtccggcggcatcggcgcagcggcgcacgctgcagagccgggcaaggacgcttcggccggaggcctgccgcgcattctcgtgcttgcgacgggaggcaccatcgcaggccaggctgacgcgcgtgcgaccggtgcgtacaaatcgggccagatcacgggcgagcaattgatgcagtcggtgccgggtctggacaagctggcaaagctgaacgccgaacagatttcgtcgatcggatcccaggacatgaacgacaaggtctggtttgcgctggcccgtcgcattcaggaggccttcgacaagaacgaggccgacggcgtcatcgtgacccacggcacggatacgctcgaggagacggcgttctttctcgacaatgtggtgcgtggcgacaagccggtggtcatcgtcggctcgatgcgtccggcttcagccgtcagcgcggatggccccggcaatctgtacgaagcggtccaggtggccgccgatccccgatcccgcgggcgcggcgtcatggccgtgctgaacgacaagatcgagggagcacgctcggtcaccaagaccaacaccacgagcatcgagacgttcaattctcccaacggcgggccgatcggctatgtcgacaccgcgggcggcatccgtttcatggcccaggctgccggtctcaagcgcgcggcctatcagctcccggcaggcgagcaattgccgcgggtcgagatcgtctactcgcatgccaacatggacgccgttccgatcgaggacgccatttcccacggcgccaaaggcatcgtgctggccggtgtcggtgacggcaatacgtcgaagccggcgctcgatgcgctcgaagcggccgcgaagaaagggatcctcgtcgtccgttccacgcgggttcggtctggcttcgtcacccgcaatgtcgaggtcgacgatgacaagaatggcttcgtcgtgtccgaggacctcaatccccagaaggcacgcgttctcacccaattgctgatcgcgagcggcgtcacggctccggccgagctgcagcgggcttttacagcgacatggtga

SEQ ID NO: 41548 - protein, 379 aa, Bradyrhizobium japonicum USDA 110
MTKPTASPASCRQRRTSMLAIPLLSFALWSGGIGAAAHAAEPGKDASAGGLPRILVLATGGTIAGQADARATGAYKSGQITGEQLMQSVPGLDKLAKLNAEQISSIGSQDMNDKVWFALARRIQEAFDKNEADGVIVTHGTDTLEETAFFLDNVVRGDKPVVIVGSMRPASAVSADGPGNLYEAVQVAADPRSRGRGVMAVLNDKIEGARSVTKTNTTSIETFNSPNGGPIGYVDTAGGIRFMAQAAGLKRAAYQLPAGEQLPRVEIVYSHANMDAVPIEDAISHGAKGIVLAGVGDGNTSKPALDALEAAAKKGILVVRSTRVRSGFVTRNVEVDDDKNGFVVSEDLNPQKARVLTQLLIASGVTAPAELQRAFTATW

SEQ ID NO: 41549 - DNA, 1065 bp, Vibrio parahaemolyticus RIMD 2210633
  CDS (1)..(1065): transl_table=11
atgacaaaaaatcttttccgcctcagtacgattacccttggtttgtgcctcagttctttgtcgttcgcccaatccgatcttcctaatatcaaaatcctcgcgactggcggcaccatagctggcgcaggtcaatctgccactgagtcgaactacaccgcaggtaaagttggcgtcgaatcattaatttctgctgtgccgagcatgaccaacattgcggatatttctggtgagcaagtcgtcagcatcggctctcaagacatgaacgatgaggtatggctgaagttagcgaaaagggttaacgagctgctcgctcaagatgatgttgacggtatcgtcatcacccacggtacggatacgttggaagaaaccgcatacttccttgatttaacggtgaagagcgacaagcccgttgtgatcgtgggcgcgatgcgaccatccaccgccatgagtgccgatggcccggtcaatttatacaatgctgttgttactgcaaccgatgaagactcaaaaggccgcggcgtgctagtggcaatgaatgacactattttcgatgcgcgagatgtaacgaagaccaacaccacctcagtaagtacgttccaatcgccaaacttcggccctcttggctacattcacaacagcgatgcaaagtaccaaagaagccctgaacgtaaacacaccacagaaaccccattcgacgtatcaaaactcaacacactacctaaagtaggcattgtttataactatgcgaatgcgtcgagcttgccagtcaaagccttggttgatgccaagtttgacggtattgtgagtgctggtgtgggtaatggtaacttgtaccacacggtctttgatgagctcgaaaaagcgagcaaagatggcattgttgtcgtcagaagctctcgcacgccaactggctcaacgactttggacgcggaaattgatgatgataaatacggctttgttgcatcaggcacgctaaacccacaaaaagcacgtattttgctgatgttgtcactcacgcaaacgaagaactatcaagacgttcagaagatgttccagtactactaa

SEQ ID NO: 41550 - protein, 354 aa, Vibrio parahaemolyticus RIMD 2210633
MTKNLFRLSTITLGLCLSSLSFAQSDLPNIKILATGGTIAGAGQSATESNYTAGKVGVESLISAVPSMTNIADISGEQVVSIGSQDMNDEVWLKLAKRVNELLAQDDVDGIVITHGTDTLEETAYFLDLTVKSDKPVVIVGAMRPSTAMSADGPVNLYNAVVTATDEDSKGRGVLVAMNDTIFDARDVTKTNTTSVSTFQSPNFGPLGYIHNSDAKYQRSPERKHTTETPFDVSKLNTLPKVGIVYNYANASSLPVKALVDAKFDGIVSAGVGNGNLYHTVFDELEKASKDGIVVVRSSRTPTGSTTLDAEIDDDKYGFVASGTLNPQKARILLMLSLTQTKNYQDVQKMFQYY

SEQ ID NO: 41551 - DNA, 966 bp, Streptococcus pyogenes SSI-1
  CDS (1)..(966): transl_table=11
atgaaaaaaatcctagtcttacacactggtggaaccatttctatgcaagctgataactctggtagggttgttccaaatcaagataatcctatgacgaaaatacatgctgcagcccaagatattcagcttaccgttagtgattttctaaatcttccgagtcctcacatcacgcctcaccacatgttatctatttatcatcatattcaagaaagaactgatgtctttgatggtatagtcatcacacatggaacagataccttagaagaaacagcttattttttagataccatggcattgcctactaatatacctgttgtcctaacaggtgctatgaggtcttctaatgaagttggtagtgatggcatatataattaccttaccgcacttagagttgcaagtagtgataaagctaaagaaaaaggggtacttgttgttatgaacgatgaaatccatgctgctaaatatgttactaaaacacatacaaccaatatttcaactttccaaacacccacacacggaccacttggtatcatcatgaaaaatgacctactttttttcaaaactgctgaacctcgtattcgttttgacttgagatgcatttctggaaccatccccattatcaaagcatacgcaggtatgggcgatggtagtatcttgagtctattaactccaggtagcattcaaggtctagttatcgaagctctaggggcaggaaatatcccaccattagcagttggggagatcgagcacttaattactttaggtattcctgtcgttcttgtttcccgttgtttcaatggtatggcagaacctgtctatgcttatgaaggtggtggtgcgatgctacaagaagcaggtgttatgtttgtaaaagaattgaatgctccaaaagcccgtctaaagttattaattgctctcaacgccggacttactggtcaagagctaaaagattatattgaaggataa

SEQ ID NO: 41552 - protein, 321 aa, Streptococcus pyogenes SSI-1
MKKILVLHTGGTISMQADNSGRVVPNQDNPMTKIHAAAQDIQLTVSDFLNLPSPHITPHHMLSIYHHIQERTDVFDGIVITHGTDTLEETAYFLDTMALPTNIPVVLTGAMRSSNEVGSDGIYNYLTALRVASSDKAKEKGVLVVMNDEIHAAKYVTKTHTTNISTFQTPTHGPLGIIMKNDLLFFKTAEPRIRFDLRCISGTIPIIKAYAGMGDGSILSLLTPGSIQGLVIEALGAGNIPPLAVGEIEHLITLGIPVVLVSRCFNGMAEPVYAYEGGGAMLQEAGVMFVKELNAPKARLKLLIALNAGLTGQELKDYIEG

SEQ ID NO: 41553 - DNA, 1059 bp, Bacteroides thetaiotaomicron VPI-5482
  CDS (1)..(1059): transl_table=11
atgaaacaaattaagaaattaggcctggtagtagtaacactactattatccgcaacaatggcatttgccgcaaaaccgaatatccacatccttgctaccggaggaaccattgccggaacaggaagctcggctacgggcaccagctatacggcaggacaagttgctatcggtgcattgctggatgcagtccccgaaatcaaagatatcgccaatgtaaccggcgaacagattgtgagaatcggttcacaggacatgaatgacgaagtctggctgacacttgccaagaaaatcaacgagttattgaaacgaccggatatcgacggaatcgtgatcactcatggaacggatacgatggaagaaactgcttactttctgaatctgactgtcaaaagtgacaagcctgttgtattggtaggtgccatgcgcccctctacagcattaagtgccgacggtccgctgaatctttataatgcagtagttaccgctgcagctaaagaatcaaaagacaaaggtgtactggttgccatgaacggtctgattctaggtgcagaaagcgtagttaaaatgaacacggtcgatgtacagactttccaggctcccaactccggcgcattgggatatgtactgaacggtaaagtatgttataatcagatcacactgaagaaacataccacccaatccgtatttgatgtcaccaaactgacttcattgcccaaagtcggcatcgtatacagctattccaatattgaagccgatatgatgactccgttgctcaacaacggatataaaggaatcattcatgcaggagtcggaaacggtaatatccataaaaacatatttccgtcattgatagacgcccgcagaaaaggcattgtagtcgttcgttcttcccgcgtaccgactggtcctaccactcttgatgcggaagtggatgacgccaagtatcagtttgtagcctctcaagaattgaatccacaaaagtcacgtgtactattgatgcttgcgctgaccaaaaccacggactggaaacaaattcaggaatactttaacgaatactaa

SEQ ID NO: 41554 - protein, 352 aa, Bacteroides thetaiotaomicron VPI-5482
MKQIKKLGLVVVTLLLSATMAFAAKPNIHILATGGTIAGTGSSATGTSYTAGQVAIGALLDAVPEIKDIANVTGEQIVRIGSQDMNDEVWLTLAKKINELLKRPDIDGIVITHGTDTMEETAYFLNLTVKSDKPVVLVGAMRPSTALSADGPLNLYNAVVTAAAKESKDKGVLVAMNGLILGAESVVKMNTVDVQTFQAPNSGALGYVLNGKVCYNQITLKKHTTQSVFDVTKLTSLPKVGIVYSYSNIEADMMTPLLNNGYKGIIHAGVGNGNIHKNIFPSLIDARRKGIVVVRSSRVPTGPTTLDAEVDDAKYQFVASQELNPQKSRVLLMLALTKTTDWKQIQEYFNEY

SEQ ID NO: 41555 - DNA, 966 bp, Enterococcus faecalis V583
  CDS (1)..(966): transl_table=11
atgaagaccattttagtccttcatacaggtgggaccatttccatgtcgaaagtagcaggaggaagtgttgccccgaatgaaaaaaatccgttgatggaacaagaagcattattttctggcaaggttcatttagttgttgaagatatttttaatattccctcaccacacatgaccttagaacggatgtttcaattaaaagaacggattcaaaaagcttattctgaaccaattgatggcgtggttattacgcatggaacagatacattagaagaaactgcttattttttagatataaccttagagaaaaaaatccccattgttttaacaggagcaatgcggtcaagtaacgaaatcggtagtgatggcttgtataatttcatcagtgctatttggactgcttgttcagacgaatcgtacgataaaggtgttttagtcgtgatgaatgatgaaattcatacggcgcgttatgtgacaaaaacacatacaacgaacgtagcgacgtttcggacgccaacttttggaccaataggaaccattgcgaaagaacgtgctttttttgcgaaagaggtcttaccgcaagaagtttgcgatgtttcttctgtgaaaggaaatgttcacgtagtgaaggcctatgcggggatgggtgaacggatgtttgaattattaaacaccccagaaacggatgggttagtaattgaagcgctaggcgcgggtaatttaccgccagaaacgctcccagcattacaaaaaatgctagacaacgggattccagtcgttttagtttctcgttgttccaatggcattgctgaagatatctatgattatgctggtggtggcgttggcttgaaaaaaatgggggtcgtttttgcccgtggtttaaacggaccgaaagcgcggattcgtttaattgttggtttaaacagcgaaaaaaatcctgcagagttaaaagaatttttggaacagtaa

SEQ ID NO: 41556 - protein, 321 aa, Enterococcus faecalis V583
MKTILVLHTGGTISMSKVAGGSVAPNEKNPLMEQEALFSGKVHLVVEDIFNIPSPHMTLERMFQLKERIQKAYSEPIDGVVITHGTDTLEETAYFLDITLEKKIPIVLTGAMRSSNEIGSDGLYNFISAIWTACSDESYDKGVLVVMNDEIHTARYVTKTHTTNVATFRTPTFGPIGTIAKERAFFAKEVLPQEVCDVSSVKGNVHVVKAYAGMGERMFELLNTPETDGLVIEALGAGNLPPETLPALQKMLDNGIPVVLVSRCSNGIAEDIYDYAGGGVGLKKMGVVFARGLNGPKARIRLIVGLNSEKNPAELKEFLEQ

SEQ ID NO: 41557 - DNA, 1137 bp, Helicobacter hepaticus ATCC 51449
  CDS (1)..(1137): transl_table=11
atgagtatatggcgtattgctcaaatctttgtttgtgttcttgtgatggcattaggaatgctaggttgttcaagtgaagagaaagcacagcaagtgaaagaaaaaaggagtgaaaagttggaaggctttgagcaaaatgccaaaataaagaagcctaatattgtgattcttgccacaggaggcacgatagctggggcggtagattctcaaattaaaacaacaggctataatgcaggagtaataagcgttgatacattgattgaggctgtgccacagcttcaagagattgcacatattcaaggggagcaaattgccaatattgatagtgcggatatgaatgatgaaatatggctcactttggctcaacgcgtgaataagttgcttgagaatccaaagattgatggtattgttattactcacggcacagatacaatggaagagagcgcgttttttttacatcttactactcgaagtgataagcctgtagtgcttacaggagcaatgcgtcctagcactgcgataagtgctgatggtcctaagaatctttacaatgcacttgcattagcagctaatacgcaatcaaagggtaagggcgttatggtagtgatgaatgatagaatccaaagtgcgcgatatgtgagcaaaacacatagtcttaatgtagatgctttttcctcccctaatagtggcgatatgggctatattttagatggtaaagtatttttctacacatttccaaataagcctcatacaactcatagtgaatttgatgtgcgctctttgagatctctgccaaaagtggatattctttattcttatgctaatgatggcttagccatagcggctcaagctttggcaaatcaaggcacaaaaggcttagtcatagcaggaagtggcgctggaagtatccataagaatcacaaagatatgcttaaaaaattaatgcaagagggtttaatagtcgtgcaaagctcaaggataaataatggcatagtattagcaagtgaagcagatgctaaacttggctttattggcagtggggatttgaacccacaaaaagcacgtgtgcttttaatgcttgcccttactcaaaccaaaaattcagcagaaattgcaaaaatttttcaaagatattaa

SEQ ID NO: 41558 - protein, 378 aa, Helicobacter hepaticus ATCC 51449
MSIWRIAQIFVCVLVMALGMLGCSSEEKAQQVKEKRSEKLEGFEQNAKIKKPNIVILATGGTIAGAVDSQIKTTGYNAGVISVDTLIEAVPQLQEIAHIQGEQIANIDSADMNDEIWLTLAQRVNKLLENPKIDGIVITHGTDTMEESAFFLHLTTRSDKPVVLTGAMRPSTAISADGPKNLYNALALAANTQSKGKGVMVVMNDRIQSARYVSKTHSLNVDAFSSPNSGDMGYILDGKVFFYTFPNKPHTTHSEFDVRSLRSLPKVDILYSYANDGLAIAAQALANQGTKGLVIAGSGAGSIHKNHKDMLKKLMQEGLIVVQSSRINNGIVLASEADAKLGFIGSGDLNPQKARVLLMLALTQTKNSAEIAKIFQRY

SEQ ID NO: 41559 - DNA, 1050 bp, Haemophilus ducreyi 35000HP
  CDS (1)..(1050): transl_table=11
atgaaattgactaaattagcgctttccactttatttgcattaggattatctaccgcttacgccaacaagctcccgaatatcacgatcctagccaccggtggcacgatcgctggtagcggtgaaagtgccgtcagctctgcttatcaagctggacaactgaatattgacacgctgattgaagcggttccagaaatgaaaaaattagcaaatatcaaaggcgaacaagtggttaaaattggctcacaagatatgaatgatcaagtttggttaacattagccaacacgatcaaccaacaatgtgcttctactgatggctttgtgatcacacacggcacagatacgatggaagaaaccgcttatttcctagatatgaccgctaaatgcgaaaaaccgattgtcttagttggcgctatgcgccctgcaaccgaaaaaagtgctgatggcccacttaatttatataatgccatcgtagtggcacgagaagctaaatccgccaaacgtggcgtgttagttgcaatgaatgatcaagtacttggcgcacgagacgtcactaaaacaagcacaacggctgtccaaacctttcattcaccaaattttggcgctttaggttatattcataatagtaaagtcgattatgaacgtaatcctgaaagcaagcatacaaccaacacaccatttgatgtaaccaaattaactgatttgcctaaagtcggcattatttacgcctatgcaaatatgccaacggagccattaaaagcattattagatgctgattatcaaggtattgtggttgcgggagttggcaatggtaatatgaatgccgaaaacttagcactactcgaaacagcagctaaaaaaggcgttgccgttattcgctcatcgcgtgttccaaccggttataccacacgcgatgctgaaattgatgattcaaaatatggctttgctgcatctggtacacttaatccacaaaaagcccgcgtattgttacaattagcattaacgaaaacaaaagatatccatactatccaacaatattttgaagaattttaa

SEQ ID NO: 41560 - protein, 349 aa, Haemophilus ducreyi 35000HP
MKLTKLALSTLFALGLSTAYANKLPNITILATGGTIAGSGESAVSSAYQAGQLNIDTLIEAVPEMKKLANIKGEQVVKIGSQDMNDQVWLTLANTINQQCASTDGFVITHGTDTMEETAYFLDMTAKCEKPIVLVGAMRPATEKSADGPLNLYNAIVVAREAKSAKRGVLVAMNDQVLGARDVTKTSTTAVQTFHSPNFGALGYIHNSKVDYERNPESKHTTNTPFDVTKLTDLPKVGIIYAYANMPTEPLKALLDADYQGIVVAGVGNGNMNAENLALLETAAKKGVAVIRSSRVPTGYTTRDAEIDDSKYGFAASGTLNPQKARVLLQLALTKTKDIHTIQQYFEEF

SEQ ID NO: 41561 - DNA, 1002 bp, Bordetella bronchiseptica RB50
  CDS (1)..(1002): transl_table=11
atgcctgaggcccggctgccgcggattgccgtcctggcgaccggcggcaccattgccggcgcgcaaaccgacgcggccagcggcgcttaccgcgccggctcgtacggcgtcgggcagttgctggcggccgtgcctcaactggccggcctggcgcgcatcggcgccgagcagatcgccaacgtcggcagccagaacatgagccatgccgtctggcggcagctcgcgctgcgcgccgccgcgctgtgcgacgatccggcgaccgacggcatcgtcattacccatggcaccgatacgctggaagagaccgcttatttcctcagcctggtattgcctgtggataaaccggtggtgctgctgggcgccatgcgcccggccaccgcgttgagcgccgacgggccggtcaatctatacaacgcggtggcgttggcctgccatccggccgcacgcggccgcgggccgctggtcgtgatgaacgaggatatccatctggcccgtcatgtgcagaaaacggccgcctctggcatcgccgcgttcgcttcgcccaatgcaggccgggccggcgtcatgcagggcggccggccggtgtttcacgcccgcgccgagcgccaggccgccgacgcgctgctcaggccggacgaactgccgcagcaggcctggccgcgggtcgacatcgtgcatgcctgtgtcgatctcgacggcgagctcatcgatttcatggccgggcgagcccagggcatcgtgctggccggcgtgggcgacggcaacgccaccgacgcggccctgcaggccctgcagcgggccagcgcgcggggcgttgcggtggtgcgggcgtcgcgcaccggctcgggcagggtggggcgcaatatcgagatcgacgacgacgcctgcggcttcattgccgccggcgacctcagcccccagaaggcccgcgtgctgcttaccctcggcctgtgccagacccgcgataccgcgcgcctgcaggcgttgttcgacagccgctga

SEQ ID NO: 41562 - protein, 333 aa, Bordetella bronchiseptica RB50
MPEARLPRIAVLATGGTIAGAQTDAASGAYRAGSYGVGQLLAAVPQLAGLARIGAEQIANVGSQNMSHAVWRQLALRAAALCDDPATDGIVITHGTDTLEETAYFLSLVLPVDKPVVLLGAMRPATALSADGPVNLYNAVALACHPAARGRGPLVVMNEDIHLARHVQKTAASGIAAFASPNAGRAGVMQGGRPVFHARAERQAADALLRPDELPQQAWPRVDIVHACVDLDGELIDFMAGRAQGIVLAGVGDGNATDAALQALQRASARGVAVVRASRTGSGRVGRNIEIDDDACGFIAAGDLSPQKARVLLTLGLCQTRDTARLQALFDSR

SEQ ID NO: 41563 - DNA, 1032 bp, Synechococcus sp. WH 8102
  CDS (1)..(1032): transl_table=11
atgagccgccggctgctgttgctggccacgggcggcaccatcgccggccaggcaagcgacccaacccgtttgaacgactacaccgccggtgccatggcgggagacgcgttgctggcggcggtcccccagttgcagaacctggcgacgatcagcgtcgagcaggtggccaatgtcgacagcgccgaactgttgtttgagcattggcgagcgctggtggcgcgcattcgtgctgtcttcgcggcggacgccgagctgacgggtgtggtgatcacccatggcaccaacaccctggaggagaccgcctggttgctgcagctgctcattgatgatcctcggccggtggttctggtgggggcgatgcgaccggccacggccctcagtgccgatggtccgctcaatctgttccaggcggtgcaggtggctttgagtcctgaagcccgtggccacggcgtgctggtggtgatggatggccagatccatccatctcgccatgtcggcaaagtggccacccagggggtgggggccttcgccagccccgggtatgggcctttgggctgtgtggatgacatgggcgttcatttgccaacggcgactggatcacgccaggtgcccttcgctgcgctggctctaccggagcaatggccccaggtgcccatcgtctacggctgtgtggagcccgatccgttgatcctccaggcctgtctcaacgccggtgctccgggcttggtgttcaccggtaccggagccggccagctgtcggcgggtgagcgttctgttctgcaggcctgggctgggtcgcggccgttgatgttgcgggccaaccgctgtggttctggccccgtgcaccaccatcacgaggatgaacggctcgggctgttgcctgctggcaacctgagcccgcagaaggcccgggtgctgctgttgctggccttgattgccggactgagtcgggatgatttggccgaattgatcagcgcagcacctgttaccgcaacacccattatcgcaacacctattatcgcaacaccgtga

SEQ ID NO: 41564 - protein, 343 aa, Synechococcus sp. WH 8102
MSRRLLLLATGGTIAGQASDPTRLNDYTAGAMAGDALLAAVPQLQNLATISVEQVANVDSAELLFEHWRALVARIRAVFAADAELTGVVITHGTNTLEETAWLLQLLIDDPRPVVLVGAMRPATALSADGPLNLFQAVQVALSPEARGHGVLVVMDGQIHPSRHVGKVATQGVGAFASPGYGPLGCVDDMGVHLPTATGSRQVPFAALALPEQWPQVPIVYGCVEPDPLILQACLNAGAPGLVFTGTGAGQLSAGERSVLQAWAGSRPLMLRANRCGSGPVHHHHEDERLGLLPAGNLSPQKARVLLLLALIAGLSRDDLAELISAAPVTATPIIATPIIATP

SEQ ID NO: 41565 - DNA, 1047 bp, Wolinella succinogenes DSM 1740
  CDS (1)..(1047): transl_table=11
atgaatgcatggaaaaaaaccgctgttttggcactcatgagcgcctctgttttgatggctaaaccccaagtgactatcctagccacaggaggcaccatcgctggttcgggggaatctagcgtcaagagtagctactctgctggagcagtcaccgttgataagcttcttgcagccgtccctgccatcaacgacctagccaccatcaagggtgaacagatctcaagcattggctcccaagagatgacgggtaaggtgtggcttaaactagccaagcgtgtcaatgagctcctcgcccaaaaagagaccgaagccgtgatcatcacccatggaactgacaccatggaagagaccgctttcttcctcaacctcacggtgaaaagccaaaaacctgtcgtccttgtaggcgccatgcgctcaggctcttccatgagtgctgatggccccatgaatctctataacgccgtgaatgtagcgatcaacaaagcctctactaacaaaggagtggtgattgtgatgaacgatgagattcacgccgccagagaagcgaccaagctcaacaccaccgcagtcaatgcatttgcttcgcccaacacaggtaaaatcggcacagtctattatggcaaagtcgagtatttcactcaatccgttcgacctcacacccttgcaagtgagtttgatattagcaaaatcgaagaactccccagagtcgatattctttacgctcaccccgatgatactgatgttttagtcaatgcagcccttcaggcaggagccaaaggaatcatccatgcaggcatgggcaatgggaaccctttccctttgactcaaaatgctcttgaaaaagcagccaaatcaggcgtagtcgtcgctcgaagctctagagtgggcagtggttccaccacccaagaggctgaagtggatgataagaaacttggttttgtggctacagagagtctcaaccctcaaaaagccagagtgcttcttatgttagccctcaccaaaactagtgatagagaggcgatccaaaagatcttctccacctattaa

SEQ ID NO: 41566 - protein, 348 aa, Wolinella succinogenes DSM 1740
MNAWKKTAVLALMSASVLMAKPQVTILATGGTIAGSGESSVKSSYSAGAVTVDKLLAAVPAINDLATIKGEQISSIGSQEMTGKVWLKLAKRVNELLAQKETEAVIITHGTDTMEETAFFLNLTVKSQKPVVLVGAMRSGSSMSADGPMNLYNAVNVAINKASTNKGVVIVMNDEIHAAREATKLNTTAVNAFASPNTGKIGTVYYGKVEYFTQSVRPHTLASEFDISKIEELPRVDILYAHPDDTDVLVNAALQAGAKGIIHAGMGNGNPFPLTQNALEKAAKSGVVVARSSRVGSGSTTQEAEVDDKKLGFVATESLNPQKARVLLMLALTKTSDREAIQKIFSTY

SEQ ID NO: 41567 - DNA, 1044 bp, Photorhabdus luminescens subsp. laumondii TTO1
  CDS (1)..(1044): transl_table=11
atgaaaaagatgaaacacacagctttagccagtttattggcattaattagtggttctgcttttgctttaccaaatattacacttttggcgacgggagggacgatcgcgggtggcgggaagtctgcaatccaatccaactatgttgctggaagggttgccattgatgaattagtcaatgctgttcctgagatcaaaaatatcgccaacctaaaaggtgaacaggtggtgagtattggctcgcaagatatgaatgatcaggtgtggttaacgctagcgaaaagaatcaacgctgattgtgacaagaccgatggttttgttatcacccatggtactgacacgatggaagaaaccgcttacttcctcgatctgactacccactgccagaaacccattgtcatggttggagcgatgcgtccatctacagcgcttggtgctgatggcccgttaaatctgtataacgctgtggtcgttgccggtgatacagcatcagccaaacgcggtgtgttgatggcaatgaatgatgcggttatcagtgggcgcaccgtggtgaaaatgagcaccaccgaagttcaggcgttccagccagttaatgcgggtgctgagggctttgttcataatggcaaagtcaattattatgctgacgcgaagccgagagccaataaggctatttttgatgtcagtaaactcgataagctaccgaaagtaggtattgtttataactatgccaatgcgtctgatctgccggcgaaagctctgttgaaagatggttaccaaggcattgtcagcgctggtgtgggcaacggtaatatgtacaaggcgattttcgatactctggccttggcggctaaagatggggttgtggtcgtcagatcaagccgtgtaccggtgggatatgttactcaggatgcggaagtagacgatagcaaacatggctttgtcgcttctgaacgtttgaatccgcaaaaggccagagtacttttacaattagctctgactgaaacacgtaatccggtgaaaattcacgagatgtttgtgaaatattga

SEQ ID NO: 41568 - protein, 347 aa, Photorhabdus luminescens subsp. laumondii TTO1
MKKMKHTALASLLALISGSAFALPNITLLATGGTIAGGGKSAIQSNYVAGRVAIDELVNAVPEIKNIANLKGEQVVSIGSQDMNDQVWLTLAKRINADCDKTDGFVITHGTDTMEETAYFLDLTTHCQKPIVMVGAMRPSTALGADGPLNLYNAVVVAGDTASAKRGVLMAMNDAVISGRTVVKMSTTEVQAFQPVNAGAEGFVHNGKVNYYADAKPRANKAIFDVSKLDKLPKVGIVYNYANASDLPAKALLKDGYQGIVSAGVGNGNMYKAIFDTLALAAKDGVVVVRSSRVPVGYVTQDAEVDDSKHGFVASERLNPQKARVLLQLALTETRNPVKIHEMFVKY

SEQ ID NO: 41569 - DNA, 1059 bp, Gibberella zeae PH-1
  CDS (1)..(1059)
atgagcaggctctataacactggcgatggcacaattctctctggctcgaccaacggtagactggacactaccaactacggcggccccatcggtcgtctcactcccgagacactcatcgagagcgtcagtgaagttctagatattgctcagatcgctatcgtcaatttcacaggggggatagatggtgctagcagtgcgaatgctggttccgatcgcttcttgaatatctctatggacgcccacaagcgtctttgtagtcctgattccgacattgttggggctatcatgatccacggcaccaataccttagccgatacggtctttggcgttgaccttactctcaactgctccaagccttttgtcaccacaggatccatgcgtcccaactctgcactctcggccgatggatcatccaacttttacgacgctgttcgaactgccatccaccctgaagctcgagaccgcggagctctgattgcaatgaacaatcacctagtctcggcattctacgctacaaagacaaatggtaatactgtgtcgactttcctggcacctgatcagggatacattgcacagttcatgtctggacagccgtactttttctactcaccacctttacccaaggctagaaactatcttaatccgtttaaattgagctcgcctttaccaaaggttgatattttttatggttaccagggttttgacgctgatctcctctactctgcggccaagaacggtgccaagggtattgtcatcatgggtgttggccctagtgccctcagtatggctgcttttgaagcagccgagatctttacagccaaggcgttatcacagtcgcttcgttccgtccgtatttcggactctcagttcccagcccccaattggaaaagatgcaacattagctctggagttctgcgtggagaaaaagctctcattcatctgcaacttgctctcggtgcaggttatgactttaaagggatacagaagctttttgagggtgaggttaggaaggccgtgtacaatgatgctaccgctttctttaacggcacagttctttga

SEQ ID NO: 41570 - protein, 352 aa, Gibberella zeae PH-1
MSRLYNTGDGTILSGSTNGRLDTTNYGGPIGRLTPETLIESVSEVLDIAQIAIVNFTGGIDGASSANAGSDRFLNISMDAHKRLCSPDSDIVGAIMIHGTNTLADTVFGVDLTLNCSKPFVTTGSMRPNSALSADGSSNFYDAVRTAIHPEARDRGALIAMNNHLVSAFYATKTNGNTVSTFLAPDQGYIAQFMSGQPYFFYSPPLPKARNYLNPFKLSSPLPKVDIFYGYQGFDADLLYSAAKNGAKGIVIMGVGPSALSMAAFEAAEIFTAKALSQSLRSVRISDSQFPAPNWKRCNISSGVLRGEKALIHLQLALGAGYDFKGIQKLFEGEVRKAVYNDATAFFNGTVL

SEQ ID NO: 41571 - DNA, 1116 bp, Gibberella zeae PH-1
  CDS (1)..(1116)
atgtcgccctctttccactccctactcgctatcgcaacccttgcaggctcagctgcccttgcatccccgatcccggagccagaaacaccgcagcttatcccccgggctgttggtgactttgagtgcttcaacgctagtcttcccaacatcaccatcttcgcgactggtggtaccatcgctggttctgctggttctgccgatcagactacgggttaccaggctggtgcattgggtatccaagcgttgatcgacgctgtcccgcaactctgcaacgtctccaacgtcaggggtgtgcagatcgccaacgttgatagcggcgatgtaaactctactatcctgaccactttggcgcatcgcatccagactgatcttgacaaccctcacatccaaggtgttgtcgtcacccatggcacagacactctcgaggagtcttcatttttcctcgatctcactgtccaaagtgaaaagcctgttgttatggttggatccatgcgtcctgccactgccatcagcgctgatggtcccatcaacctcctgtctgctgttcgattggcaggtagcaagagtgccaagggtcgcggtacaatgattgtactcaacgacaagatcgcttctgcacgctacaccgttaaatcccacgccaatgctgtccagactttcattgccgaagatcaaggttatcttggtgcctttgaaaacattcagcccgtcttctggtaccctgctagtcgaccactaggtcaccactatttcaacattagtgctagctcacctaagaaggctcttcctcaggttgacgttttgtacggccaccaagaagcggaccccgagcttttccaagctgctgtcgatagcggcgcccagggcattgttctcgctggtcttggcgctggaggctggcctgacgaagctgctgatgagatcaagaaggtcttgaacgagactaacattcctgttgttgtcagccgtcgtactgcttggggttacgttggagagaggcctttcggtatcggtgctgggtacttgaacccttccaaggccagaatccaactgcaacttgcgcttgagaagaagctttctgtggaggagatccaagacatattcgagtatgtttga

SEQ ID NO: 41572 - protein, 371 aa, Gibberella zeae PH-1
MSPSFHSLLAIATLAGSAALASPIPEPETPQLIPRAVGDFECFNASLPNITIFATGGTIAGSAGSADQTTGYQAGALGIQALIDAVPQLCNVSNVRGVQIANVDSGDVNSTILTTLAHRIQTDLDNPHIQGVVVTHGTDTLEESSFFLDLTVQSEKPVVMVGSMRPATAISADGPINLLSAVRLAGSKSAKGRGTMIVLNDKIASARYTVKSHANAVQTFIAEDQGYLGAFENIQPVFWYPASRPLGHHYFNISASSPKKALPQVDVLYGHQEADPELFQAAVDSGAQGIVLAGLGAGGWPDEAADEIKKVLNETNIPVVVSRRTAWGYVGERPFGIGAGYLNPSKARIQLQLALEKKLSVEEIQDIFEYV

SEQ ID NO: 41573 - DNA, 1137 bp, Candida glabrata CBS 138
  CDS (1)..(1137)
atggtgaacgactctgtggagattactactatatgtcccgatgttgagaactcgcagtttctgctaagcagctcggttcaagacctcagaaaagtatcgcaaacaccgcttggtacagttcacaggagtcttcctcgtattaagatcctgggtacaggtggtactattgcctcaaaaggtagtgacagctcccagactgctggctaccatgttgatttgaccatccaggacatgctgagtgccattccggacatttcaggtatctgtgagttagaatatgagcaactgtgtaatgttgactcgaaggatatcgacgaggcgctgttgttcaagatatacaaaggtatctctgactccctgcagagttttgacggtattgtcatcactcatggtactgatactttggctgagactgcgttttttatagagagcaccattgatgctggcgacgtacctattgtgctggttggctctatgagaccatccaccagtgtttctgcagatggtcccatgaacttgtaccaagctatctgtatcgcatcggataagaagtccagaggcagaagcgtcctcgtttccctgaatgaccagatctctgcgggttactacatcacaaagaccaatgctaacagtttggacacattcaacgtaagacaaggttatctcggaaatttcttcaacaacgagatccactactattacccaccagtgaagccaatgggttgccacaaattcaagttgaagttcgacgatgttgaagaaaaatacacaggtttcaacttcccaaaggttgccatcctatacgcacaccaagcttttgagccagagctatttgaccttgtatcagataaatacgatggtatcgtgatagctactatgggtgccggttctttgccagataacgtgaaccagaaggcactcactttaaaggtcccaattgtctactcaaagagatccatggatggtatgattccagtggctaacttgccaaaggctgcagacggaacacataactacgtgattgcttctgggtacttgaacccagagaagagtagaatcctgctacaactctgcctggcaggtaagtacagcttgcatgagataaggcacgtctttgccggtgtctacggtggctag

SEQ ID NO: 41574 - protein, 378 aa, Candida glabrata CBS 138
MVNDSVEITTICPDVENSQFLLSSSVQDLRKVSQTPLGTVHRSLPRIKILGTGGTIASKGSDSSQTAGYHVDLTIQDMLSAIPDISGICELEYEQLCNVDSKDIDEALLFKIYKGISDSLQSFDGIVITHGTDTLAETAFFIESTIDAGDVPIVLVGSMRPSTSVSADGPMNLYQAICIASDKKSRGRSVLVSLNDQISAGYYITKTNANSLDTFNVRQGYLGNFFNNEIHYYYPPVKPMGCHKFKLKFDDVEEKYTGFNFPKVAILYAHQAFEPELFDLVSDKYDGIVIATMGAGSLPDNVNQKALTLKVPIVYSKRSMDGMIPVANLPKAADGTHNYVIASGYLNPEKSRILLQLCLAGKYSLHEIRHVFAGVYGG

SEQ ID NO: 41575 - DNA, 1194 bp, Kluyveromyces lactis NRRL Y-1140
  CDS (1)..(1194)
atgcctaataagaacattgatatcaagaccatcaactctgatgttgagttatcgcagtttactttgcagcctgtagagccagtatatcgcgaggagactttttctggcagcgatgaaccgataactgtgggccaggaagtggggtctagtaatgcgacgacgacgactccgtcgtcgtcgtctcgactagtctccaaacgtcatttacccagagtcaagatcttgggtaccggtgggactattgcatctaaaggtggtaaggcttctgacactgcagggtatcatgttgatttgaccattcatgaattgttagaggctatcccggacattacggacgtatgtgaaatagagtacgaacagctttgtaatttcgattcgaaagaaatcggactggcagagttgtacaagatatatacaggcgtctgtgattctttgcagaagttcgatgggatagtcatcactcatggtaccgatacgttggccgaaacgaccttctttatagagagtacgattgacgctggccaagtgccaattgtgtttgttgggtccatgagaccttccacgagtatcagtgcggatggtccgatgaacttgtatcaggctatttgcatagcagctaaccgggaatctcgtggtagaggtgtattgatctcattaaacgaccagatcagtgctggttactatattacaaagaccaatgcgaattcgttggattcgttcaatgttagacaaggttatttgggtaactttgtcaacaacgagatccattattattacccaccggtgaaaccaatcggctgtcacaagttcaaattgaacctggaggatgatcttcaattaccggcagtttgtattctatacgcacaccagtgtttctcaccggaacttgtcgagatggctgcggaaagatacgatggtatcgttattgcgacgatgggtgctggatctctttccacaccagtcaacgaaatgtgcatgagactcaaggtcccgatcgtgtactccaagaggtccatggacggtatgattcctgtggcaaacctaccgttaccaccctcggacccttcttccacaatcattgcatcaggttatttaaatccagaaaagagtagaattttgttacagttgtgtttgaagcaacagtataacatggagaagataagaaccgtgttcaaaggcgtctacggtgggtga

SEQ ID NO: 41576 - protein, 397 aa, Kluyveromyces lactis NRRL Y-1140
MPNKNIDIKTINSDVELSQFTLQPVEPVYREETFSGSDEPITVGQEVGSSNATTTTPSSSSRLVSKRHLPRVKILGTGGTIASKGGKASDTAGYHVDLTIHELLEAIPDITDVCEIEYEQLCNFDSKEIGLAELYKIYTGVCDSLQKFDGIVITHGTDTLAETTFFIESTIDAGQVPIVFVGSMRPSTSISADGPMNLYQAICIAANRESRGRGVLISLNDQISAGYYITKTNANSLDSFNVRQGYLGNFVNNEIHYYYPPVKPIGCHKFKLNLEDDLQLPAVCILYAHQCFSPELVEMAAERYDGIVIATMGAGSLSTPVNEMCMRLKVPIVYSKRSMDGMIPVANLPLPPSDPSSTIIASGYLNPEKSRILLQLCLKQQYNMEKIRTVFKGVYGG

SEQ ID NO: 41577 - DNA, 996 bp, Debaryomyces hansenii CBS767
  CDS (1)..(996)
atgaagcagctcccaaaagtcaaaatctttggaatgggtggaactatagcaagtaaaggaacaactaactcgcagacagctggatataaagtgggtcttactgtaaaagacttggttgaagcaattccatcactcgaagatgttgctcatttagattatttgcaggtagctaatgtcggatcaaagttattgaatagctcacatttattgaaattatatgcggctattaccgaagcttttgacgggaatattgacggagcggtcgtcacacatgggactgatacaatcgaagaaaccagtttttttttggacttgacaataaaatctgacctacctcttgttatagtaggcgccatgagaccttccacggctatttctgctgacgggctcatgaatctatatcaggcagttaaaattgccagttcagaaacttcaaaagaacgtggtccgttagtagtcttaaatgatagaatagcaagtgggttttggacaacaaaaatgagtggatttgctttagatacctttagatctggagaacagggatatcttggtgtatttcagaataaccagattgagtggtactatcctccaattcgaccttatggccatcaatattttgatatatctaaaacggatgagttacctgaagtgataattttgtatgcgtatcagggattgaatcccggactcatatacagtgctgttgaattgggggctaagggtcttgtatttgccggatttggagcggggcattggacagatgagggtaataatgttgcaaaagaagtctgggagaaatacggtgtgccaactgtatattctcatcgtacagttgaaggtagtgttccagtcgcaaatgtcaatcatttcgaaggtgcagttgcttctggaatactcaaccctcagaaagctcggattcttcttcaattatgcattaatgctgattacagcattgttgaaattagagaatctttttcatcagtttacggaggttag

SEQ ID NO: 41578 - protein, 331 aa, Debaryomyces hansenii CBS767
MKQLPKVKIFGMGGTIASKGTTNSQTAGYKVGLTVKDLVEAIPSLEDVAHLDYLQVANVGSKLLNSSHLLKLYAAITEAFDGNIDGAVVTHGTDTIEETSFFLDLTIKSDLPLVIVGAMRPSTAISADGLMNLYQAVKIASSETSKERGPLVVLNDRIASGFWTTKMSGFALDTFRSGEQGYLGVFQNNQIEWYYPPIRPYGHQYFDISKTDELPEVIILYAYQGLNPGLIYSAVELGAKGLVFAGFGAGHWTDEGNNVAKEVWEKYGVPTVYSHRTVEGSVPVANVNHFEGAVASGILNPQKARILLQLCINADYSIVEIRESFSSVYGG

SEQ ID NO: 41579 - DNA, 1191 bp, Debaryomyces hansenii CBS767
  CDS (1)..(1191)
atgaccaaccagaagccggcagagccttcaaatattgaagaggatgctaattatcaaattgatattcaagaagacaaggaacatcctatcttcaagattaaatacagatccaactccgtcattagcatcggagcactttcagatggatcgagttacgagaacttaccaacagtcaaagtgttaggtacaggtggtactattgcatctaaaggtacatcatcacaccaaaccgcgggctacgaagtggacttgactattgaggatcttattaagagtataccagacttatcaaccacctgtaatttacaatatgaacaggtcttaaaccttgactcgaaagatattggaacacatgaattattaatgttataccaaaaaattcaagaagatttacctaaatatgatggtatagttattacgcacggtactgataccatggaagaaacatcatttttcttgcaatcaacattacgtacaagcaagccgatcgtgatgtgcggatctatgcgtccatctactgccatttcttcagatggtcctatgaacttataccaagcaatcgttattgcggctcataaagattcgagaggtaggggagtcttggttgcacttaatgatagaatcggagcaggtttctatatcaccaaatctaacgctaattcattagataccttcaaatcaataggtcaaggctatgtgggaagcttcgtgaataatgaagtccattattttttccctgccgcaaggcctctaggcataacctattttaagttatcaaatccttctgcgttggctgatttaccagaggttccaattattttcgctcatcaaggtttgaataacaaaatcatcgaggtgacaattaaagaattaggtgcaaaaggtttggtatttgctactatgggtgctgggtcaatgtccaaaggtactaatgagtttgcttgtaaattttcaaaagaacataataatataccaatcatctattctaagagatctatggatggaatggttccagtgggatcattaccaaaaatttccaacgacaaaggagaaacaattgaatacaaaaatgccattgccagtggatacttaaaccctcaaaagtcaaggattttattacaattatgtctcagcgatggaatggaaattaacgaaattaagagagtgtttaagggagtttacgggggttag

SEQ ID NO: 41580 - protein, 396 aa, Debaryomyces hansenii CBS767
MTNQKPAEPSNIEEDANYQIDIQEDKEHPIFKIKYRSNSVISIGALSDGSSYENLPTVKVLGTGGTIASKGTSSHQTAGYEVDLTIEDLIKSIPDLSTTCNLQYEQVLNLDSKDIGTHELLMLYQKIQEDLPKYDGIVITHGTDTMEETSFFLQSTLRTSKPIVMCGSMRPSTAISSDGPMNLYQAIVIAAHKDSRGRGVLVALNDRIGAGFYITKSNANSLDTFKSIGQGYVGSFVNNEVHYFFPAARPLGITYFKLSNPSALADLPEVPIIFAHQGLNNKIIEVTIKELGAKGLVFATMGAGSMSKGTNEFACKFSKEHNNIPIIYSKRSMDGMVPVGSLPKISNDKGETIEYKNAIASGYLNPQKSRILLQLCLSDGMEINEIKRVFKGVYGG

SEQ ID NO: 41581 - DNA, 1137 bp, Aspergillus nidulans FGSC A4
  CDS (1)..(1137)
atgggtctccgtgtcaaagcccttgcagtggcagctctggctaccctcagccaggcctcgccggtcctatacactcgcgaggacactacctccaacacaacctacgcctttaccaacagcaacgggctgaacttcacccagatgaacaccacacttcctaatgtaaccatcttcgcaacaggcggcacaatcgccggctcggccgcctctaacactgcaacaacaggctaccaggcgggcgccctcggaatccagaccctcatcgacgccgtccccgaaatgctctccgtcgccaacatcgccggcgtgcagatctccaacgtcggtagcccagacgtcacctccaccatcctgctagagatggcgcaccgtctcaacaaagttgtctgcgaggacccatccatggctggcgcagtcgtcacccacggcactgacacccttgaggaaacggccttcttcctcgacgcaacagtcaactgcgggaagcctattgtcatcgtgggcgccatgcggcccgcaacagccatctctgccgatgggccctataatctcctgcaggccgttactgtggcgagcacgaaagaggcaaggaacaggggcgcgatggtcgtcatgaacgaccgcatcgcctccgcttactacgtgtccaagacaaacgccaatacgatggatacattcaaggctgtggaaatggggtacctgggtgccattatctcgaacactccgttcttctattacccggccgtgcagccaagtgggaagacgactgtcgatgtgtccaacgtcacctccatcccgcgcgtcgacatcctctactccttccaggacatgacaaacgacacgctctactcaagcattgagaacggcgcgaagggcgttgttatcgcaggatctggtgctgggagtgtcgataccgccttctcgacggctattgatgatattatcagcaaccagggagttccgatcgtgcagagtactaggacaggaaacggagaggtgccgtattcggctgaggggggtatttcgagcgggttcctgaacccagctaagtcgaggattttgttgggattgctgttggcccagggagggaagggcactgaagaaattagggcggtgtttgggaaggttgctgtttga

SEQ ID NO: 41582 - protein, 378 aa, Aspergillus nidulans FGSC A4
MGLRVKALAVAALATLSQASPVLYTREDTTSNTTYAFTNSNGLNFTQMNTTLPNVTIFATGGTIAGSAASNTATTGYQAGALGIQTLIDAVPEMLSVANIAGVQISNVGSPDVTSTILLEMAHRLNKVVCEDPSMAGAVVTHGTDTLEETAFFLDATVNCGKPIVIVGAMRPATAISADGPYNLLQAVTVASTKEARNRGAMVVMNDRIASAYYVSKTNANTMDTFKAVEMGYLGAIISNTPFFYYPAVQPSGKTTVDVSNVTSIPRVDILYSFQDMTNDTLYSSIENGAKGVVIAGSGAGSVDTAFSTAIDDIISNQGVPIVQSTRTGNGEVPYSAEGGISSGFLNPAKSRILLGLLLAQGGKGTEEIRAVFGKVAV

SEQ ID NO: 41583 - DNA, 996 bp, Clostridium difficile 630
  CDS (1)..(996): transl_table=11
atgagtattaagaaaaaagttgccatagtttttactggtggaactatatctatgacagtagatgataaagtcggagcagctataccaactttatcaggtgaacaaatactatcaatggttaccaacattgataaagttgcagatgttgaagtttttaattttgatgaaattccaggacctcacataacaccttatagaatgatggaattgaaaaactatgtaaatgatttattagcaagaaaagatattacaggtgttgtaataacacatggtacagatagtttagaggaaacagcttatttcctagaccttacaattgacaacatcaaacctgtaatagtcacaggtgctatgagaagtagttctgaacttggatatgatggttcaagtaatttatctgcatcagtttgtactgcagtatccaaagatgctatgggaaaaggagtccttgtagttttaaacaatgaagtattattagcttctgaagctactaaaacaaatactctttctctaaatacatttaaatctctaactagtggtccattgggaataattgactgcaacgaacttgtccttacaagagatattgtaaatagaacaattatagatactgataaggtagaatctaaagttgccttatttaaagcatatgtaggagaaaatgctgactttataagatttgctgttgatagtggttataaaggtatagttattgaggcaatgggtagaggtaatattcctcctcaaatgctttctggagttgaatatgctagagaaaaaggacttcctgtagttatagtttctagatgtcattcaggtagagtattcgatagttatggttactttggttctggtagagatttaaaaaatcttggttgtatatttggtggagacttaccaggtcaaaaagctagaataaaacttatcttagcacttggaaaaactgataaccttgatgaaatcaaagacttctttgaaaaaggaatctattgttaa

SEQ ID NO: 41584 - protein, 331 aa, Clostridium difficile 630
MSIKKKVAIVFTGGTISMTVDDKVGAAIPTLSGEQILSMVTNIDKVADVEVFNFDEIPGPHITPYRMMELKNYVNDLLARKDITGVVITHGTDSLEETAYFLDLTIDNIKPVIVTGAMRSSSELGYDGSSNLSASVCTAVSKDAMGKGVLVVLNNEVLLASEATKTNTLSLNTFKSLTSGPLGIIDCNELVLTRDIVNRTIIDTDKVESKVALFKAYVGENADFIRFAVDSGYKGIVIEAMGRGNIPPQMLSGVEYAREKGLPVVIVSRCHSGRVFDSYGYFGSGRDLKNLGCIFGGDLPGQKARIKLILALGKTDNLDEIKDFFEKGIYC

SEQ ID NO: 41585 - DNA, 1050 bp, Herminiimonas arsenicoxydans
  CDS (1)..(1050): transl_table=11
atgacgaaactaaaaaagaccgtactcagcctgttattagcagcaaccttgcctgccttcgcacaaagcaaaccggtcgtgcaattcattgcaaccggcggcacgatcgcgatgaagatcgacccggtgaaaaatgcgccggtacctgccatctccggcgatgatctgctggccaccgtgccggatgtagcgaaatacgcgagcatcgaagtcaacaatctgtccaatgtgccatcggattacatggacccgacgcgctgggtcgcattgaccaaggccgtgcaaactgcactggatcgcccggaagtggccggcgccatcgtctcgcacggtacggacacgctggaagaaaccgcatactggctggatttgacggtgaaatccagcaagccggtgatcctgatcggcgcccagcgcaatgcgtcggtttccgactttgacggtccgcgcaatctgctgaacgcggtacgcatcgccgtcgatacgcaatccaaggacaaaggcgtgttgctggccatgaacaaccagatcaatgcagcgcgttcggtcaccaaaacgcacactgccaacgtcgaaacattcaagtcaggcgatttcggttttctgggcgaagtctatccggaccgcgtgatttacgcttccacgccagtgcgtcgtcaatacattccgattcgcaccgacaagatgcctgaagtagagattttcgccatgtatggcggtgccaacggcatagccgtgcgcaatgcggtcgatcgtggcgtcaagggtatcgtggtcgaggctttgggcatgggcaatatgaacgtcgccatgctggatgccgtgaaatatgcggttgccaaaaaagtgccggtcgtcgtcaccacccgcgtacacaatggccgtgtcatgcctagctacggttttgaaggcggcggcaagacttcttttgaagctggcgccgtcatggccgacgatctgaaggcagccaaggcacgcatcctgctgatgctggcgctgcaaaacggcgtcaacaaccaggccgatctgcaagcaacattcagccgctaa

SEQ ID NO: 41586 - protein, 349 aa, Herminiimonas arsenicoxydans
MTKLKKTVLSLLLAATLPAFAQSKPVVQFIATGGTIAMKIDPVKNAPVPAISGDDLLATVPDVAKYASIEVNNLSNVPSDYMDPTRWVALTKAVQTALDRPEVAGAIVSHGTDTLEETAYWLDLTVKSSKPVILIGAQRNASVSDFDGPRNLLNAVRIAVDTQSKDKGVLLAMNNQINAARSVTKTHTANVETFKSGDFGFLGEVYPDRVIYASTPVRRQYIPIRTDKMPEVEIFAMYGGANGIAVRNAVDRGVKGIVVEALGMGNMNVAMLDAVKYAVAKKVPVVVTTRVHNGRVMPSYGFEGGGKTSFEAGAVMADDLKAAKARILLMLALQNGVNNQADLQATFSR

SEQ ID NO: 41587 - DNA, 1023 bp, Burkholderia vietnamiensis G4
  CDS (1)..(1023): transl_table=11
atgaacacttcgaacattgcatctccttcgtccgcgccggcgttgccgcgcatcgccgtactcgcgaccggcggcacgatcgccggcgccgcgccggacgccgccagcacggccggctatcaggccggcgcgctcggcgtcaacttcctgctcgacgcggtgccggcgctggcatcggtcgcgcgcgtcgacgccgagcaggtcgcgagcatcgacagcaaggatctcgccctgccgctgtggaatacgctcgcggcgcgcatcgacgcgctgatggccgacccggcgatcgacggcatcgtgatcacccacggcaccgacacgctcgaggaaaccgcttacgcgctccatctcgtcgtgaccggcgacaaaccggtcgtgctgaccgccgcgatgcggccggctaccgcgctgtcgtccgacggcccgctgaacctgctgaacgcagtgacggtcgccgcgcatccggccgcgcgcgggcagggcgtgctgctcgccttcaacaatcgcatccatgccgcgcgcgacgtcgtgaagacgagcacctacgcggtcgacgcattccattcgccggagctcggtgcgctcggctgggtgcaggacggtcgcgtcgagttcgcgcgccgcgcgacgcgcagccgcgacgcgcaactgaagatcgcggccgcgtggccggcggtcgaagtcgtcgcgagctatgcgggcgcgacgcgcacggcggtcgacgcgctggtcgcggccggcgtgcgcggcctggtcgtcgcgggcaccggcaacggctcgatccatgcgacgctgcaggcggcgctcgccgatgcggcgaacgcgggcgttgccgtggtgcgtgcgtcgcgcgtcggctcgggccacgtgatgcgcaacggcgccgccaacgacgatgcgctcggcttcgtgagcgccgggtcgctgaatccgttcaaggcgcgcgtgctgctgatgctcgcgctcgcgaacggcatcgacgggcgcgacgcattgcagcgcgtgttcgatacgctgtga

SEQ ID NO: 41588 - protein, 340 aa, Burkholderia vietnamiensis G4
MNTSNIASPSSAPALPRIAVLATGGTIAGAAPDAASTAGYQAGALGVNFLLDAVPALASVARVDAEQVASIDSKDLALPLWNTLAARIDALMADPAIDGIVITHGTDTLEETAYALHLVVTGDKPVVLTAAMRPATALSSDGPLNLLNAVTVAAHPAARGQGVLLAFNNRIHAARDVVKTSTYAVDAFHSPELGALGWVQDGRVEFARRATRSRDAQLKIAAAWPAVEVVASYAGATRTAVDALVAAGVRGLVVAGTGNGSIHATLQAALADAANAGVAVVRASRVGSGHVMRNGAANDDALGFVSAGSLNPFKARVLLMLALANGIDGRDALQRVFDTL

SEQ ID NO: 41589 - DNA, 999 bp, Synechococcus sp. WH 7803
  CDS (1)..(999): transl_table=11
atggccatgcaacatcctcggctcctcctgcttggcaccggtggcaccatcgccggaacagcgcctgaatcaacgcagctcaaccgctacgccgcgggggtgattgctgccgagggcctgctggacgccttgccggagctggctttgctcgccgagatccaggtggagcagatcgccaatgtggacagcgccgaccttggtttcagccactggcgctctctggtggaacggatccgccagtccctggcggctgatcctggcctggcgggggtggtgatcacccatggcaccaacaccctggaggaaacggcctggctgctgcacctcctgatcgatgaccctcggccggtggtgctggtgggagcgatgcggcctgcctccgctctcagtgccgatggccctctcaacctctaccaggctgttcaggtggccatcagtgcggaggcgcgcggccgcggcgtgttggtggtgatggatggccagatccactgcgcccgagcggtcagcaaacgcgccacccagggggtaggggcctttcacagttcgggtcgaggccccctgggctgggtggatgatctcggtgttcatttgcctgaagtggaacggagtgagcccgcactttttgccggtctgtccctcccgagggtctggccccaggtggtgatcctgcatggatgtgtggagcctccccaggcgttgatcccagcgttgctctccgctggggtgcagggtctggtgttcacaggtactggagctgggcagctgtcggttgtggagcgggatgccctggcgcagtgggatggtcaaccgcccctgatgctgcgcgcgaaccgttgcggttcggggccggtgcaccgctgtgaggaccacgccaagcttggcttgctccccgccggtgatctcagtcctcagaaggcgcgagtgctgttgctgttggccttgatggcaggagatgatcgcaatgctttggcagcccggctcaaaaccctctcaggatga

SEQ ID NO: 41590 - protein, 332 aa, Synechococcus sp. WH 7803
MAMQHPRLLLLGTGGTIAGTAPESTQLNRYAAGVIAAEGLLDALPELALLAEIQVEQIANVDSADLGFSHWRSLVERIRQSLAADPGLAGVVITHGTNTLEETAWLLHLLIDDPRPVVLVGAMRPASALSADGPLNLYQAVQVAISAEARGRGVLVVMDGQIHCARAVSKRATQGVGAFHSSGRGPLGWVDDLGVHLPEVERSEPALFAGLSLPRVWPQVVILHGCVEPPQALIPALLSAGVQGLVFTGTGAGQLSVVERDALAQWDGQPPLMLRANRCGSGPVHRCEDHAKLGLLPAGDLSPQKARVLLLLALMAGDDRNALAARLKTLSG

SEQ ID NO: 41591 - DNA, 990 bp, Bartonella quintana str. Toulouse
  CDS (1)..(990): transl_table=11
atgaaaaaaatagccataggaacattaggcggaacaattgcaatggctgctgacaattttggacaaatgcaaccgactttaacctcagatatactcatcaaaagtgttcctgatttaaataacattgctgatattcatgcgcaaacactaacacaattaccgagtggatctttatctttcaaaattctttttgaaatcatagaatgggcaaaacaacaaataaaagctggcgcagaaggtgttgttttagcccaaggtactgatacactggaagaaacggctttttttctttccctttactggaataaagctgaaccactcattgtaactggtgctatgcgtataccctgtgaagcaggcgctgatggacccgctaatattttagcagcaacccgcgttgccgctcatccaaaaagtcgtaacagaggtgttttagttgtaatcaatgataccattcactcaccttattgggtccagaaaagccataccgtcaaaatcgagacatttcagtcagggctaacaggtattttaggtactattttggaaggaaaactggtttattttaatgatcgaaattttttcccgacaacatttgaccttcctcaaaacgacgatcaccaagttgcacttctatactcttctttatcctctggtacacagttaatgaaattctgccttgaaagcgggcattatgctggacttgtcattgccggttttggatcaggacactgcagttttgaagaagcagatatcgtgcgacaatatgctcaaaaaatgccgatcattatcgctagccgtacctgcactggctcaacaacccgtacaacttatggttataaaggttcagaagtcgatatgattgcctctggagctctcatgtctggttatttatcagcagtaaaagcacgtttacttttatgggcttttttggcacaaaaactatcattggcacaaatcaatgcacattggaatgactggactatcagttaa

SEQ ID NO: 41592 - protein, 329 aa, Bartonella quintana str. Toulouse
MKKIAIGTLGGTIAMAADNFGQMQPTLTSDILIKSVPDLNNIADIHAQTLTQLPSGSLSFKILFEIIEWAKQQIKAGAEGVVLAQGTDTLEETAFFLSLYWNKAEPLIVTGAMRIPCEAGADGPANILAATRVAAHPKSRNRGVLVVINDTIHSPYWVQKSHTVKIETFQSGLTGILGTILEGKLVYFNDRNFFPTTFDLPQNDDHQVALLYSSLSSGTQLMKFCLESGHYAGLVIAGFGSGHCSFEEADIVRQYAQKMPIIIASRTCTGSTTRTTYGYKGSEVDMIASGALMSGYLSAVKARLLLWAFLAQKLSLAQINAHWNDWTIS

SEQ ID NO: 41593 - DNA, 990 bp, Bartonella henselae str. Houston-1
  CDS (1)..(990): transl_table=11
atgaaaaaaatagccatagggacattgggtggaacaattgcaatggctgctgacaatttgggtcaaatgcaaccgattttaacttcagatatactgatcaaaagtgttcctgatttagatagcgttgctgatattcatgctcaaacattaatacaaataccaagtggctctttatctttcaaaagtctttttgaaattatagagtgggcaacacaacaaataaaagcgggggcagaaggtattgttttaacccaaggtaccgatacagtggaagaaacagctttttttctttccctctactggaataaagccgaaccacttattgtaactggtgctatgcgtctacctcatgaagcaggtgctgatggaccagctaatattttggccgcaacccgtgtcgctgctcatccacaaagtcgaaatagaggtgttttagttgtaatcaacgatacaattcattcaccttattgggtccagaaaagccataccatcaaaattgagacatttcagtcaagtccggtaggtgttctaggcattattttggaaggaaaactgatttattttactgatcgaaatttttttccaacaacttttgatcttcccaaaaactatgatcaccaagttgcaattctatactcttctctatcctctgatacacagttaatgaaattctgctttgaaagtggccattatgctggagttgttattgcaggttttggatcaggacactgcagctttgaagaagcagatatcgtgcgacaatatacacaaaaaatgccaatcattatcgctagccgtacctacactggccctacaacccgcaaaacttatggctataaaggttcagaagtcgatatgattgcttctggcgccctcatgtctggttatttatcagcactaaaagcacgtttacttttatgggcttttttggcacaagggctctcattggaacaaattaatgcacattgggatgactggactataagctaa

SEQ ID NO: 41594 - protein, 329 aa, Bartonella henselae str. Houston-1
MKKIAIGTLGGTIAMAADNLGQMQPILTSDILIKSVPDLDSVADIHAQTLIQIPSGSLSFKSLFEIIEWATQQIKAGAEGIVLTQGTDTVEETAFFLSLYWNKAEPLIVTGAMRLPHEAGADGPANILAATRVAAHPQSRNRGVLVVINDTIHSPYWVQKSHTIKIETFQSSPVGVLGIILEGKLIYFTDRNFFPTTFDLPKNYDHQVAILYSSLSSDTQLMKFCFESGHYAGVVIAGFGSGHCSFEEADIVRQYTQKMPIIIASRTYTGPTTRKTYGYKGSEVDMIASGALMSGYLSALKARLLLWAFLAQGLSLEQINAHWDDWTIS

SEQ ID NO: 41595 - DNA, 1068 bp, Acinetobacter sp. ADP1
  CDS (1)..(1068): transl_table=11
atgattcataaagctgttaaatcattcggtttagggttaacactacttgctgcctcagtttcactctatgcaaaaaataacgtcgttgtagtcgcaacaggtggaacaattgccggtgccggtgccagctcgaccaacagtgcaacctatactgcagcaaaagtaccagtcgatgcactgatcaatgcagtacctcaaatcaaagatttggccaatgtaagcggcattcaagctttacaaatcgcgtctgaaagtattactgacaaagaattattatctcttgcccgccaagttaatgatcttgttaaaaaaccatctgtaaatggtgttgtgattacacatggtacagatacgcttgaagaaacagctttctttttaaatcttgtgattcatacggataaaccaattgttctggttggttctatgcgcccatcaacagcactttcagcagatggcccacttaacctttatagtgcggttgcgcttgctgcttcagatgaagcaaaaaataaaggcgtgatggtattgatgaatgattcaatctttgcagcacgtgatgtcaccaaaggaatcaacatccataccaatgcatttgtaagtcaatggggagaactcggtacgctggttgaaggtaaaccttactggtttagaagctcagtcaaacgccataccaatgcgtctgagtttaatattgaaaatatcaaaggcgaccaacttcctctcgttcaaatcgtatatggttcagactccatgattcctgatgcgtatcttgcctatgccaaggcaggcgctaaagcgattatcaatgctggtacaggtaatggctctgtaggtaactatattgtgcctacattaaagaaattacatgatgaacaagggattcaaatcatccgctcatcacgtgtaccgcaaggtttcgtattgcgtaatgccgaacagcctgatgatcaatatggctgggtggttgcacatgatttaaatccacaaaaagcacgtctgcttgctgctttagcactgacaaaaaccaatgatgccaaagaaatccagcgtatgttctggcaatattaa

SEQ ID NO: 41596 - protein, 355 aa, Acinetobacter sp. ADP1
MIHKAVKSFGLGLTLLAASVSLYAKNNVVVVATGGTIAGAGASSTNSATYTAAKVPVDALINAVPQIKDLANVSGIQALQIASESITDKELLSLARQVNDLVKKPSVNGVVITHGTDTLEETAFFLNLVIHTDKPIVLVGSMRPSTALSADGPLNLYSAVALAASDEAKNKGVMVLMNDSIFAARDVTKGINIHTNAFVSQWGELGTLVEGKPYWFRSSVKRHTNASEFNIENIKGDQLPLVQIVYGSDSMIPDAYLAYAKAGAKAIINAGTGNGSVGNYIVPTLKKLHDEQGIQIIRSSRVPQGFVLRNAEQPDDQYGWVVAHDLNPQKARLLAALALTKTNDAKEIQRMFWQY

SEQ ID NO: 41597 - DNA, 1041 bp, Erwinia carotovora subsp. atroseptica SCRI1043
  CDS (1)..(1041): transl_table=11
atgtttaacgcattattcgttgttgtttttgtttgtttttcgtctctggcaaatgcggcagaaaatctacctaacattgtcattctggcaacaggcggtacgattgccggttcggcagcagccaatacgcaaaccactgggtataaagcgggtgcgctgggcgtagagacgctgattcaagcggtgcctgagctgaaaacgcttgccaatatcaaaggtgagcaggttgccagcatcggcagtgaaaatatgaccagcgatgtgttgttaacgctgagcaagcgcgtgaacgagctgctggcacgcagcgatgttgatggcgtggtcattacgcacggtacggatacgctcgacgaatctccttattttctgaacctgacggtgaaaagcgacaagccagtagtctttgttgctgcgatgcgtccggcaacggcaatcagtgccgacggcccgatgaacctgtacggtgcagtaaaagtggcagcggataaaaactcccgcggtcgcggtgtactggtcgtgctgaacgaccgcattggttctgcccgtttcatcagcaaaaccaacgcctctacgttggatacctttaaagcgccagaagaaggttatctgggcgtgattatcggtgacaaaatatactaccagacccgtctggataaagttcacaccacgcgttccgtgtttgatgtgaccaacgttgataagctgccagccgtcgacattatttatggttatcaggacgatccagaatatatgtatgacgcctctatcaaacacggcgtaaaaggcatcgtgtatgcgggcatgggtgcaggcagcgtatccaagcgcggcgacgctggcatccgtaaagcggaaagcaaaggcattgttgtcgtacgttccagccgtaccggcagcggtatcgtcccaccggatgcaggccaacccggtctggttgccgattctctgagtccagcaaaatcacgtattttactgatgctggcgctgacgaaaacgacgaacccagctgtgattcaggattacttccacgcttattaa

SEQ ID NO: 41598 - protein, 346 aa, Erwinia carotovora subsp. atroseptica SCRI1043
MFNALFVVVFVCFSSLANAAENLPNIVILATGGTIAGSAAANTQTTGYKAGALGVETLIQAVPELKTLANIKGEQVASIGSENMTSDVLLTLSKRVNELLARSDVDGVVITHGTDTLDESPYFLNLTVKSDKPVVFVAAMRPATAISADGPMNLYGAVKVAADKNSRGRGVLVVLNDRIGSARFISKTNASTLDTFKAPEEGYLGVIIGDKIYYQTRLDKVHTTRSVFDVTNVDKLPAVDIIYGYQDDPEYMYDASIKHGVKGIVYAGMGAGSVSKRGDAGIRKAESKGIVVVRSSRTGSGIVPPDAGQPGLVADSLSPAKSRILLMLALTKTTNPAVIQDYFHAY

SEQ ID NO: 41599 - DNA, 1050 bp, Erwinia carotovora subsp. atroseptica SCRI1043
  CDS (1)..(1050): transl_table=11
atgcaactctcatttatcgcccgcaccatcaccgccgcttgcctgatgctgtcgtctcatgcgctgctagccgatgacgccaaacctggcgtcactatctacgctaccggcggcaccattgctggaaaggcagaatccaatacggccacgacaggttataaggcgggcgctatcggcatccaggaactgttgaacgccgttccggctattggcgatgtcgctacggtgacaggcgagcaaatcgccaataccgccagcggaaatatcgatcaagcgattctgttaaagctatccaaagcgattaacaaacagctaggcgattcaaatacgcacggcgtcgtcattactcacggcaccgatacgttggaagagaccgcgttctttttggatctgacggtaaaaagcgagaaaccagtggttgtcgtcggcgcaatgcgtcccgccaccgccatcagcgcggatggtcctatgaacctgctggaagccgtcacgctggcaaccagtaagaacgcggaaaaacgcggcgcgctggtgttgctgaacgatcgcatcggctccgcattctacaccaccaaaaccaatgccacggcgctggacacgttcaaagccaatgaacaaggctatctgggcgcattctacggcggcgttccgcgcttcttttatcagcctgctgcccccgaaaacaaaccgttctttgacgtaagcaataaggacacgctggcgaaggtcgacattctctacggctatcaggatcaagacagtggtctgctgaatgccgccattgaacagggcgcaaaaggcatcattatcgcgggtagcggtaacggtgcgacgcccacgcgtatcaaagaagacatcaagaaagcggtagccaaaggcattccggtggtgatcagtacgcgcaccggcagcggctatgttaccgataagaagaaagacggtgcgatcggcagcggattctacaacccacaaaaagcacgcattctgctttcgctagcgctgtctaacggcgacgacatcgagaaaatccgtacctatttcgagcagtaa

SEQ ID NO: 41600 - protein, 349 aa, Erwinia carotovora subsp. atroseptica SCRI1043
MQLSFIARTITAACLMLSSHALLADDAKPGVTIYATGGTIAGKAESNTATTGYKAGAIGIQELLNAVPAIGDVATVTGEQIANTASGNIDQAILLKLSKAINKQLGDSNTHGVVITHGTDTLEETAFFLDLTVKSEKPVVVVGAMRPATAISADGPMNLLEAVTLATSKNAEKRGALVLLNDRIGSAFYTTKTNATALDTFKANEQGYLGAFYGGVPRFFYQPAAPENKPFFDVSNKDTLAKVDILYGYQDQDSGLLNAAIEQGAKGIIIAGSGNGATPTRIKEDIKKAVAKGIPVVISTRTGSGYVTDKKKDGAIGSGFYNPQKARILLSLALSNGDDIEKIRTYFEQ

SEQ ID NO: 41601 - DNA, 1098 bp, Desulfotalea psychrophila LSv54
  CDS (1)..(1098): transl_table=11
ttgactgtaaggggagagccaatatcatcctcagtgataaggccagcctcggagtcggaacctactccttgtcgaagtttccacttttcaagccaccctgcccaggaagatcccatgaaaaacaacaaaattgcagtgttcattaccggcggaaccattggcatgagcccaagcgatagtggacttggtgtctctcctgataataattttgaacagatcctggcaagccttgcccctcgggacgatattgaagtagaggccattttctgggctgatattcccagcccacatatgactcctgaacatatgctccaacttgcccacgacatcgaccaactcctcgaaaagaatgactactccggtgctgtcgtccttcatggcacagacctgcttgccgaaacctcctttgtcctcaatgtctccctgaccaccagcaaacctgttataacaacaggatcaatgcgacacctcggcgaggctggctacgatggaatccgcaacctgcaaaatggcctcattgcctgcactagcctgccaccaggcggtgatgtcctggtacaaatggctgactggttattttcagcccaagatgccataaaacaggactccctctccgtggacccctttgtcagccaaagcaggggtgctgtgggcaggattgccgcaggcaccctgattctcaaccaaaatatcagcaaaagagccaataagatcggcaaaaaagtagaagggatttcagccaatgttgtcctggtcaccgcctatcccggtatgcccggatcactactcatcaacctactaaaccaagggatagaaggccttgtcatcgaaggctttggcgcaggcaatattcctccaactgccgtgggggcagtgcggcatatactgcaggccggcattcccgttgtcctggcaagccgctgcattcgaggtggggttgcccccatctatgactacccgggtggtggcgccgaactcattgatatgggctgtatctctgccggagcccttaatggcaccaaggccctgttgctcctcaaaatagcaatcagcaaccaggtagacaggagttcactccaagagctcttttctctctaa

SEQ ID NO: 41602 - protein, 365 aa, Desulfotalea psychrophila LSv54
MTVRGEPISSSVIRPASESEPTPCRSFHFSSHPAQEDPMKNNKIAVFITGGTIGMSPSDSGLGVSPDNNFEQILASLAPRDDIEVEAIFWADIPSPHMTPEHMLQLAHDIDQLLEKNDYSGAVVLHGTDLLAETSFVLNVSLTTSKPVITTGSMRHLGEAGYDGIRNLQNGLIACTSLPPGGDVLVQMADWLFSAQDAIKQDSLSVDPFVSQSRGAVGRIAAGTLILNQNISKRANKIGKKVEGISANVVLVTAYPGMPGSLLINLLNQGIEGLVIEGFGAGNIPPTAVGAVRHILQAGIPVVLASRCIRGGVAPIYDYPGGGAELIDMGCISAGALNGTKALLLLKIAISNQVDRSSLQELFSL

SEQ ID NO: 41603 - DNA, 1038 bp, Yersinia pseudotuberculosis IP 32953
  CDS (1)..(1038): transl_table=11
atgaaatatataaagctaacggtactcgccggaatatttgtagggatcagtagcccggtttttgctctgcctaatatcactttattggcaaccgggggcaccatcgcagggggaggtgattctgctacaaaatccaattataccgccggtaaattgggggtagatgcgctggtagaggccgtcccggccataaaagacattgcgaatatccagggcgaacaagtggtgaatatcggctcacaagatatgaatgacgatgtttggctcacattggcgaaaaaaatcaataaagactgcacgaaaacagacggttttgtcatcactcatggaacggatactttagaagaaacggcttatttcctcgatttaaccgtcaattgtgataaacccgtggtgatagtcggcgcaatgcgcccggcaacggcattaggggccgacggcccgttgaacctctacaacgcggtggtggtcgccagtgaggcagactcggctaaacggggtgtgctggtggcgatgaatgacatggttttcactgggcgtgatgtggtaaaaaccaacaccacatcagtgcaaacattccaatcaccgaatacagggccattggggtatatctatgatggtaaagttaattatttgcatcaaccagcagcaagacaacccgcgtttgatatcagtaagctaaatacgttaccgaaagttggcattatttataactatgcaaatgcatcggacatacccgcaaaggcattgattgccgatggttatcaggggattgtcagtgctggcgtggggaacggtaatctctatcatacggttttcgatacgctggcaaccgccgcaagtcacggggttgcagttgtgcgctcgtctcgtgtgcccagtggttcaaccacagaaggtgctgaaattgatgacgctaaatacggctttgtcgctgcgggtgcacttaatccacagaaagcacgggttttattacagttagcattaacgcaaactcaaaaaccacaagaaattcaaaaattattccacacatattga

SEQ ID NO: 41604 - protein, 345 aa, Yersinia pseudotuberculosis IP 32953
MKYIKLTVLAGIFVGISSPVFALPNITLLATGGTIAGGGDSATKSNYTAGKLGVDALVEAVPAIKDIANIQGEQVVNIGSQDMNDDVWLTLAKKINKDCTKTDGFVITHGTDTLEETAYFLDLTVNCDKPVVIVGAMRPATALGADGPLNLYNAVVVASEADSAKRGVLVAMNDMVFTGRDVVKTNTTSVQTFQSPNTGPLGYIYDGKVNYLHQPAARQPAFDISKLNTLPKVGIIYNYANASDIPAKALIADGYQGIVSAGVGNGNLYHTVFDTLATAASHGVAVVRSSRVPSGSTTEGAEIDDAKYGFVAAGALNPQKARVLLQLALTQTQKPQEIQKLFHTY

SEQ ID NO: 41605 - DNA, 975 bp, Bacillus cereus E33L
  CDS (1)..(975): transl_table=11
ttgaaaagaatcctagttttacacacaggtggaacaattgcaatggaggaagataaagaaactggggtcgtacaaccaggtgaaaaaaatcctcttttaaaattcattcctgatttagaaggcgatgttgatttaatcgttgaagatgtgttccatctaccatctcctcatatgacaccgagcgaaatgttacaattacaagtcatcattgatgaaagagtaaaacaagacaacattcatggcgtagtcattacgcatggtacggatacattagaagaaacagcctatttcttagatttaacagtacaagcaactattccaatcgttgtaacaggtgcaatgcgatctagtaatgaattaggtgctgatggtctatataacttcttatcagctgtaaaagtcgctagcagtagtgaagccgcagaaaaaggtgttttagtcgtattaaacgacgaaattcattgcgctacaaacgtaacgaaaacacatacaagcaatgtagcaacattccaaagtccacagtatggaccaattggtatggtaacaaagcgcggcgttgtattccaccatgctttagtacatcatgaaacatattcagtaaataaaatttctaaaaatgtagtcgttctaaaagcgtacgctggtatggacgatacattgttagcagcaattgaaaatcttccagtagacgggattgttattgaagcacttggacaaggtaatttacctccaagaacacttcctagtctagaacgattaataaacaaaggaattcccgtcgtattagtttctcgctgtttcaacggcatcgttcaagatgtatattcatatgaaggtggcggcaaacaattaaaagatatgggtattgtattcacatacggtttaaacgctcaaaaagcacgtattaaattattagttgcattagagaatacaacttctcatgaaacaatccaaaacatgtttatgcatgattaa

SEQ ID NO: 41606 - protein, 324 aa, Bacillus cereus E33L
MKRILVLHTGGTIAMEEDKETGVVQPGEKNPLLKFIPDLEGDVDLIVEDVFHLPSPHMTPSEMLQLQVIIDERVKQDNIHGVVITHGTDTLEETAYFLDLTVQATIPIVVTGAMRSSNELGADGLYNFLSAVKVASSSEAAEKGVLVVLNDEIHCATNVTKTHTSNVATFQSPQYGPIGMVTKRGVVFHHALVHHETYSVNKISKNVVVLKAYAGMDDTLLAAIENLPVDGIVIEALGQGNLPPRTLPSLERLINKGIPVVLVSRCFNGIVQDVYSYEGGGKQLKDMGIVFTYGLNAQKARIKLLVALENTTSHETIQNMFMHD

SEQ ID NO: 41607 - DNA, 1068 bp, Mannheimia succiniciproducens MBEL55E
  CDS (1)..(1068): transl_table=11
atgaaattaactaaacttgcactaacaatgagcttaggtttaggcgtatcttttgctaatgcggcggaattacctaatattacgattttagcaacgggcggtacaatcgccggtagtggtgcgacttcggtaagttcctcatataaagcggggcagttaaccgtgcaaaccttaattgaagcggtgcccgaaatgaaagatctcgccaatattaccggtgaacaagtggttaatatcggttcgcaggatatgagcgatgaggtgtggctgaaactggcaaaaaccattaatgccaaatgtaacgaaaccgacggttttgtgattacgcacggcacggatactatggaagaaaccgcctattttctggatatgacggtaaaatgtgaaaaaccggtggtattagtcggggcaatgcgtccggcaaccgaaaaaagtgccgacggtccgcttaatttatataatgccgttgtggtggcgacggacaaaaaatccgcagggcgcggcgtgttagtagcgatgaatgataaggttctgggtgccagagatgtgacaaaaacaagcaccaccgcggtagaaacgtttaattcgccgaatttcggcagcttgggttatatccataacagcaaagtggattatgaacgttcgccggaaagtaaacatacgaccgcaacaccgtttaatgtggataatttaactgcgttacctaaagtcggtattgtttacgcttattccaatatgccgacagaaccgctgaaagcattattagatgcgggatatgaaggcattgtaaccgccggcgtcggcaacggtaatgtgaatcaggctaattccgctatcctggaaaaagcggcgaaagacggtgttgccgtagtgcgttcttcccgtgtgccgaccggttatactacccgtaacggcgaagtggatgataacgccttagggttcgccgcatcaggcaccctcaacccgcaaaaagccagagtgttattgcagcttgccttaacgcaaaccaaggatattaacaaatccaacaatattttgatgatttctaaatcgggcagatcaacataa

SEQ ID NO: 41608 - protein, 355 aa, Mannheimia succiniciproducens MBEL55E
MKLTKLALTMSLGLGVSFANAAELPNITILATGGTIAGSGATSVSSSYKAGQLTVQTLIEAVPEMKDLANITGEQVVNIGSQDMSDEVWLKLAKTINAKCNETDGFVITHGTDTMEETAYFLDMTVKCEKPVVLVGAMRPATEKSADGPLNLYNAVVVATDKKSAGRGVLVAMNDKVLGARDVTKTSTTAVETFNSPNFGSLGYIHNSKVDYERSPESKHTTATPFNVDNLTALPKVGIVYAYSNMPTEPLKALLDAGYEGIVTAGVGNGNVNQANSAILEKAAKDGVAVVRSSRVPTGYTTRNGEVDDNALGFAASGTLNPQKARVLLQLALTQTKDINKSNNILMISKSGRST

SEQ ID NO: 41609 - DNA, 1056 bp, Burkholderia pseudomallei K96243
  CDS (1)..(1056): transl_table=11
atgacgctgacaattgggggcttcacgactgcggccaacgcacagcaagccagcgcgcccccgccgcaaaacctgccgaggattctcgtgctggcaacgggtggcacgatcgcaagcacctccgatcctcgctcggcaattggctacaacgccggcggcattaccggcgatcagctcctcgcgagcgttcccggcctcgacaagatcgcgtccatcaaagcggagcagatttcgaatgtcggctcacaggacatgaacggcaagatctggtatcagctcgcaatccgcatcaaacaggccattgaccggaacgaggtcgacggcattgtcattacgcacggcaccgacacaatggaagaaaccggcttcttcctcgatcacgttctctcgaccagcaagccagttgttctcgtcggttccatgcgtccgggtggttcgaccagcgccgatggcccgatgaatctctacgaagcggcggaagttgctgccagcccccagtccgtcaaccgtggcgtgctgatggttatgaatgacacaattaacagcccgcgttgggcaaccaaaaccaacaccacgtcggtgcagaccttccagaatccgaacgctggcccgcttggctatgtcgacgctgcctcgatccgctacctctctcctgcgccgaccagtcataggaaggcattggagctgccaagcggtgggctgccccgcgtggacatcgtgtacgcgcacgcggatatggacgcgacgcagattcaagacgctgttcaacacgacgcgaagggcattgtcctcgcaggtgtcggcgatggaaacgcgtcgaaggccgcactggacgcgatggaagcagcagctcgcaaaggcatcgtcgtggtccgttccacgcgtgtgagcagcggattcgtcaatcggaatgtcgaagtgcccgacgacaagagcggcttcgtcgcgtcctatgacctgaaccctcaaaagtcgcgtgttctcgcgcaattgctcatcgccaacggtgtgacttcaccagacaaggttcagaaagccttccagtcaacgtactga

SEQ ID NO: 41610 - protein, 351 aa, Burkholderia pseudomallei K96243
MTLTIGGFTTAANAQQASAPPPQNLPRILVLATGGTIASTSDPRSAIGYNAGGITGDQLLASVPGLDKIASIKAEQISNVGSQDMNGKIWYQLAIRIKQAIDRNEVDGIVITHGTDTMEETGFFLDHVLSTSKPVVLVGSMRPGGSTSADGPMNLYEAAEVAASPQSVNRGVLMVMNDTINSPRWATKTNTTSVQTFQNPNAGPLGYVDAASIRYLSPAPTSHRKALELPSGGLPRVDIVYAHADMDATQIQDAVQHDAKGIVLAGVGDGNASKAALDAMEAAARKGIVVVRSTRVSSGFVNRNVEVPDDKSGFVASYDLNPQKSRVLAQLLIANGVTSPDKVQKAFQSTY

SEQ ID NO: 41611 - DNA, 1086 bp, Azoarcus sp. EbN1
  CDS (1)..(1086): transl_table=11
atggccggcatcgaaacccggagagcctgtgcgatgaattccggcaacacggctggcgcagcggaaggaggatcgcgcgccgcgacgggcgaagggcagccggcgctgccgcgcatcgcgctgctcggcaccggcggcacgatcgcggcggtggcgagcgatgcgacgcagctccacgactacaccgtcggcgcgaccaccgacgaactgctcgccgcggtgccgcaactgcgggcgctcgccgaggtgggcggcgaacagctcgccaatgtcgacagccgcgacatcgacaatgcgctgctgctgaagatcgcccgccgcgtcgacgcgctgctcggccagcccgatgtcgacggcatcgtcatcacgcacggcaccgacaccctcgaggagacggcgtatttcctcaacctcgtgctcaagagcgcgaagccggtcgtgctcgccggcgcgatgcgtccggcgagcgcgctgagcgccgacgggccgctgaacctgtacaacgcttttctcgtcgccacctgcgcggcggcgcacggcaaaggcgtgctggtgatgatgaacgaccgcatcggtgccgcgcgtttcgtcaccaaggcggcgacgaccgtgcccgacgcgtttcgcgcgttcgagcagggcaacctcggcgaagtcgccgtgggcagcgtgcatttcttcaccgcgccgttatgccggcacaccgtcgacagcgagttctcgctcgctgcgatcggcgagctgccgcacgtcgacatcctctacgatcaccagggcgcgggactgcaccagtatcgcgccgcgatttccgccggcgcgcgcggcatcgtcatcgccggctgcggcaacggcagcctgtcgccggcggcacgcgccggcgccgaagaggcggcacgccacggcgtcgcggtcgtgcgctcgagccgggtcggacagggcgtggtcacgacgtcggccgacgacgcgctgctcggcactgtcgcggcgaactcgttgaatccgcacaaggcgcgcatcctgctgatgctcgcgctcgggcgttcgcacgacgccggcgagctgcagcgctgtttcgaccagtactga

SEQ ID NO: 41612 - protein, 361 aa, Azoarcus sp. EbN1
MAGIETRRACAMNSGNTAGAAEGGSRAATGEGQPALPRIALLGTGGTIAAVASDATQLHDYTVGATTDELLAAVPQLRALAEVGGEQLANVDSRDIDNALLLKIARRVDALLGQPDVDGIVITHGTDTLEETAYFLNLVLKSAKPVVLAGAMRPASALSADGPLNLYNAFLVATCAAAHGKGVLVMMNDRIGAARFVTKAATTVPDAFRAFEQGNLGEVAVGSVHFFTAPLCRHTVDSEFSLAAIGELPHVDILYDHQGAGLHQYRAAISAGARGIVIAGCGNGSLSPAARAGAEEAARHGVAVVRSSRVGQGVVTTSADDALLGTVAANSLNPHKARILLMLALGRSHDAGELQRCFDQY

SEQ ID NO: 41613 - DNA, 996 bp, Campylobacter jejuni RM1221
  CDS (1)..(996): transl_table=11
atgaaaaaagctaaatcaaggattgctattttaggaacaggcggaacgatagcaggcttcattgatagcactattgctacaacaggatatacggccggagccattgatatagatgtattaattaaagcagttccgcaaattagagatttagcagatattagttgggagcaaatagcaaatattgatagttcaaatatgtgtgatgaaatttggttaaggcttgctaaaaaaattgctaagctttttgctgaggggatagacggtgtggtgataactcatggtactgatactatggaagaaactgcttattttttaaatttaaccattaaaagtgataagcccgtagttctagttggcgctatgcgtccatcaactgctataagtgcggatggtccgaaaaatctttataatgcagtggcattagttgccaataaagaagctaagaataagggtgttatggtagctataaatgataaaattttaagcgctagaggcgtagtaaaaactcatagtttaaatgttgatgctttctcttctcctgattttggggatttgggttatatagtagatggtaaagtctttttctataataatgttactaaagctcacacaaaaaacgctccttttgatgtaagcaaactcacaagtttgccaaaagtagatattctttatagctattcaaatgatggtagtggtgtcgctgcaaaagctttatttgaacatggaactaagggcatagttgttgcaggaagtggagcaggaagtatacacaaaaatcaaaaagatgttttaaaagagcttttaaaaaaagggcttaaggttgttgtaagttcaagggttgtagcaggttgtgttgctgtgagtgattcagatgaaaaattaggttttattagtgctgaagatttaaatcctcaaaaagcaagagttttgcttatattagcacttacaaaaacaagtgatcctaaaaaaattcaagagtattttttaaaatattaa

SEQ ID NO: 41614 - protein, 331 aa, Campylobacter jejuni RM1221
MKKAKSRIAILGTGGTIAGFIDSTIATTGYTAGAIDIDVLIKAVPQIRDLADISWEQIANIDSSNMCDEIWLRLAKKIAKLFAEGIDGVVITHGTDTMEETAYFLNLTIKSDKPVVLVGAMRPSTAISADGPKNLYNAVALVANKEAKNKGVMVAINDKILSARGVVKTHSLNVDAFSSPDFGDLGYIVDGKVFFYNNVTKAHTKNAPFDVSKLTSLPKVDILYSYSNDGSGVAAKALFEHGTKGIVVAGSGAGSIHKNQKDVLKELLKKGLKVVVSSRVVAGCVAVSDSDEKLGFISAEDLNPQKARVLLILALTKTSDPKKIQEYFLKY

SEQ ID NO: 41615 - DNA, 969 bp, Staphylococcus epidermidis RP62A
  CDS (1)..(969): transl_table=11
atgaaacgtctacttatcatacatactggtggcacaataagtatgtcacaagatcaaactaataaagtgataacgaatgaagaaaatccaatatcacaacatcaaaatatcattagtcaatatgcagaggttgacgaaatcaatcttttaaatataccctcgccgcatatgacaatttcgaatgttgtgcgattaagagacgaaatcattacatattctaaagaaaatatatatgatggatttgtcattactcatggaacagatacacttgaggaaacagcttttttaatagatttattaattgatattcaagagcctatagtaattactggagcaatgagatcatccaatgaaattggttccgatggtctctataattttatttctgctataagggttgcttcttcatctgaggctaatcataaaggtgttatggtcgtatttaatgatgagattcacactgctcgtaatgtgacaaagacacatacttcgaatattaatacatttcaaagtcctaatcaggggcctctaggtgtacttaccaagaatcgagtacaattttatcatcatccttacagacaaactacctaccaatatatcgatgtaaatttacgtgttccacttgtaaaagcatacatgggtatggaagatgatgtactatcattttattcacaacaacacgttgatggtatagtcatcgaagcactaggacaaggtaaccttccaaaaagttgtcttaatggactacagcaatgtctaaagaaaaacattcctctagttctcgtatctagatcattcaatggtattgttagtcctgtatatgcttatgaaggtggtggcgcagatttgaaaaataatggtgttattttttcgaacggtttaaatggaccaaaggcaaggctaaaattactagttggtttgagtcaagacatgactcaaaatcaattagagcgatatttcgaagagtaa

SEQ ID NO: 41616 - protein, 322 aa, Staphylococcus epidermidis RP62A
MKRLLIIHTGGTISMSQDQTNKVITNEENPISQHQNIISQYAEVDEINLLNIPSPHMTISNVVRLRDEIITYSKENIYDGFVITHGTDTLEETAFLIDLLIDIQEPIVITGAMRSSNEIGSDGLYNFISAIRVASSSEANHKGVMVVFNDEIHTARNVTKTHTSNINTFQSPNQGPLGVLTKNRVQFYHHPYRQTTYQYIDVNLRVPLVKAYMGMEDDVLSFYSQQHVDGIVIEALGQGNLPKSCLNGLQQCLKKNIPLVLVSRSFNGIVSPVYAYEGGGADLKNNGVIFSNGLNGPKARLKLLVGLSQDMTQNQLERYFEE

SEQ ID NO: 41617 - DNA, 1125 bp, Ralstonia eutropha JMP134
  CDS (1)..(1125): transl_table=11
atgaaacgtttcgcccgcaccacgactctggccgccgccctgctcgccgccagcctgatcaccggtactgcccacgctcagcttgccccggccgctccgtcatcgggaacgcccgctgggacccaggcggaagcccgcaaggccaatatcgtcatcatcggcacgggcggcaccattgccggcgccggcgcatcggcgaccaacacggcggcctaccagtccgcggtggtgccggtcgacaagatcattgcctcggtgccagagatctcgaaggtcgcgaacgtcaagggcgagcagattttccagatcggttcggagagcttcaacaacgagcgcctgctgaaactgggcaagcgtgtttcggaactgctcaagcagcccgacgttgatggcattgtcatcacgcatggcaccgacaccatcgaggaaacggcctacttcctgaacctgacgctcaagagcgacaagcccgtagtggtggttggctcgatgcgtcccggtacggcgctcggtgccgatggcgcgctgaacctgtatgacgccgtgctggttgcttccaatcccgcgtcccgcggcaagggcacgctggcggtgctgaacgacgaaatccacaccggccgcgatgtgaccaagagcaataccttcaagaccgaaaccttccgctcgccgtttggcccgctcggctacgtcgtggaaggccgcacgctgttctaccggctgccggctcgcccgcacaccacgcagaccgagttcgacatcgacaagatcgacaagcttcctgaagtcgcggtggtctatgcctatggcaacgtgaaccccggcagcgtcgacgctgctgtgaagaacggcgccaaggcgatcatctatgccgccaccggcaacggcagcgtcggcgactacatggtcgagccgttgaaggcggcgcgcgctaagggcgtgcagatcgtgcgtgcctcgcgcaccggcagcggtgtggtgatccgcaacgccgagcaaccggacgacaagtacgactggatcgtcaccgacgaccagcttccgcagaaggcgcgcatcctgatggcgctggcgctgaccaagaccaacgacagcaagcagctgcagcaggtcatgtggaagtactga

SEQ ID NO: 41618 - protein, 374 aa, Ralstonia eutropha JMP134
MKRFARTTTLAAALLAASLITGTAHAQLAPAAPSSGTPAGTQAEARKANIVIIGTGGTIAGAGASATNTAAYQSAVVPVDKIIASVPEISKVANVKGEQIFQIGSESFNNERLLKLGKRVSELLKQPDVDGIVITHGTDTIEETAYFLNLTLKSDKPVVVVGSMRPGTALGADGALNLYDAVLVASNPASRGKGTLAVLNDEIHTGRDVTKSNTFKTETFRSPFGPLGYVVEGRTLFYRLPARPHTTQTEFDIDKIDKLPEVAVVYAYGNVNPGSVDAAVKNGAKAIIYAATGNGSVGDYMVEPLKAARAKGVQIVRASRTGSGVVIRNAEQPDDKYDWIVTDDQLPQKARILMALALTKTNDSKQLQQVMWKY

SEQ ID NO: 41619 - DNA, 1137 bp, Ralstonia eutropha JMP134
  CDS (1)..(1137): transl_table=11
atgcctgtgattttatacagtatcggcacaagcgcaagcagaatttcagagccgtctgctcgacttcgggtttgccggcatgccgcaggtagaatcggcgaacctttacttcctcgtgccctgcccatgtcacgatccatgtcccagcttccccgcgtcgtcattctggctaccggcggcaccattgccggcgcttccgccaatccggccagcagtgcgcgctatcaggctgcaacggtgccggtgacgacgctgctggctgccgtgccggcgctgcaatccgtggccagggtcgaggccgagcaggtggcgcaggtcgacagcaaggacatggtgttctctctatggtcgacgctggcggcgcgcgtgcagcactggtcgggccagccggacgtcgcgggtattgtcattacgcacggcaccgacacgctggaagaaaccgccatgttcctgcacctgacgcaggcttgcccggtgccggtggtgctgactgcggcgatgcggccgtcgacctcgctgtccgccgatggtccgctaaacctgctcgatgcggttcgggttgcggcccatcccgatgcctgcggcaagggcgtgctggtcgtgctgaaccagcagatccacgcggcgcgcgacgtggtcaaggcgcatacgtccgcggtagatgctttcgtatcggtaccatgcgggccgcttggcttcgtgcaggacgagctggtgcgcattgcccgcgcgccggtgcggtctggcgtgggggtgttgccagtgccgcagcattggcccgatgtggagatcatcgccagctatgcgcaacctggccgcatggtggtggatgccctcgtcggcgctggtgtgcgggggatcgtcgtagcggcggcgggcaacggctcggtacacgagacgctcgtggccgcgctcagggatgccgtggccgctggcgtcgcggtggtccgcagttcgcgtaccgcggcgggtcatgtggcgattccgccagttgttgatcctctcggcggggcattcctttccgccgccgatctcaatccctataaggccagggtcctgctgttgctggccctggcgcaggatccggggctcgcttccgacccggaacgcctgcaagggcagtttgcctcttcgtga

SEQ ID NO: 41620 - protein, 378 aa, Ralstonia eutropha JMP134
MPVILYSIGTSASRISEPSARLRVCRHAAGRIGEPLLPRALPMSRSMSQLPRVVILATGGTIAGASANPASSARYQAATVPVTTLLAAVPALQSVARVEAEQVAQVDSKDMVFSLWSTLAARVQHWSGQPDVAGIVITHGTDTLEETAMFLHLTQACPVPVVLTAAMRPSTSLSADGPLNLLDAVRVAAHPDACGKGVLVVLNQQIHAARDVVKAHTSAVDAFVSVPCGPLGFVQDELVRIARAPVRSGVGVLPVPQHWPDVEIIASYAQPGRMVVDALVGAGVRGIVVAAAGNGSVHETLVAALRDAVAAGVAVVRSSRTAAGHVAIPPVVDPLGGAFLSAADLNPYKARVLLLLALAQDPGLASDPERLQGQFASS

SEQ ID NO: 41621 - DNA, 1089 bp, Pseudomonas fluorescens PfO-1
  CDS (1)..(1089): transl_table=11
atgacatctgctttgaagagtttcgttccgggcgctttggccctcctcctgctcctgccaaccgccctccaggcaaaagaagctgaaacccagaccaaactggccaacgtggtggtactggccaccggcggcaccattgccggcgcaggcgccagcgctgccaacagcgcgacctatcaggctgcgaaagtgggcatcgaacaattgatcgccggcattcccgaactgagcacgctggccaatgtacgcggcgaacaggtcatgcaaatcgcctcggaaagcatcaccaacgaaaacctcctgcaattgggtcgtcgcgtttccgaactggccgacagcaaagatgtcgatggcatcgtcatcactcacggcaccgacactctggaagaaaccgcgtacttcctgaatctggtggaaaaaaccgacaagccgatcatcgtcgtcggctccatgcgcccgggcaccgccatgtcggcggacggcatgctgaacctgtacaacgccgtggctgtcgccagcagcaaagaagctcgcggtaaaggcgtactggtgaccctgaacgatgaaatccagtcgggtcgcgacgtcagcaagatgatcaacatcaagaccgaagccttcaaaagcgcctggggcccgctcggcatggtggttgaaggcaaatcctactggttccgcctgccagccaagcgccacaccatggattcggaattcgatatcaaaaacatcaagagccttcctgatgtagaaatcgcctattcctacggcaatgtcagcgacacagcctacaaggccctcgcccagtccggcgccaaggcgatcatccatgccggtaccggcaacggttcggtttcctcccgcgtggttccgaccctgcaggcgctgcgcaaggacggcgtgcagatcattcgctcgtctcacgtcaatgccggtggtttcgtcctgcgcaacgccgaacagcctgacgacaagtacgactgggtggttgcccacgatctgaacccgcagaaagcccgcatcctggccatggtcgcgctgaccaagaccaacgacagcaaagagctgcaacggatgttctgggaatactga

SEQ ID NO: 41622 - protein, 362 aa, Pseudomonas fluorescens PfO-1
MTSALKSFVPGALALLLLLPTALQAKEAETQTKLANVVVLATGGTIAGAGASAANSATYQAAKVGIEQLIAGIPELSTLANVRGEQVMQIASESITNENLLQLGRRVSELADSKDVDGIVITHGTDTLEETAYFLNLVEKTDKPIIVVGSMRPGTAMSADGMLNLYNAVAVASSKEARGKGVLVTLNDEIQSGRDVSKMINIKTEAFKSAWGPLGMVVEGKSYWFRLPAKRHTMDSEFDIKNIKSLPDVEIAYSYGNVSDTAYKALAQSGAKAIIHAGTGNGSVSSRVVPTLQALRKDGVQIIRSSHVNAGGFVLRNAEQPDDKYDWVVAHDLNPQKARILAMVALTKTNDSKELQRMFWEY

SEQ ID NO: 41623 - DNA, 1023 bp, Burkholderia sp. 383
  CDS (1)..(1023): transl_table=11
atgaatactccgaattccgcatctccttcgtccgcggcggccctgccgcgcatcgccgtgctcgctaccggcggcacgatcgccggcgccgcacccgacgcggccagcacggccggctaccaggccggtgcgctcggcgtcaatttcctggtcgacgcggtgccggcgctcgcgtccgtcgcgcgcatcgacgccgagcagatcgccagcatcgacagcaaggatctcgcgctgccgctgtggaatgcgctcgccgcgcggatcgacgcgctgatggccgatcctgcggtcgacggcatcgtgatcacccacggcaccgacacgctcgaggaaaccgcgtatgcgctgcatctggtcgttaatggcgacaagccggtcgtgctgacggccgcgatgcgcccggcgaccgcgctgtcgtccgacggcccgctgaacctgctgaacgcggtgacggtggctgcgcatccgtccgcgcgcgggcagggcgtgctggtcgcgttcaacaaccggatccacggcgcgcgcgacgtcgtgaagacgagcacctacgcggtcgatgcattccagtcgccggagctcggcgcgctcggctgggtgcaggacggccgggtcgaattcgcacgccgcgtgacgcgttcgcgcgacacgcaactggcgatcgccgccgtgtggccgcccgtcgaagtcgtcgcgagctacgcgggcgtgacgcgtacggccgtcgatgcgctcgttgcagccggcgtgcgcggtctcgtcgtcgcgggcaccggcaacggctcgatccatgcgacgctgcaggcggcgctggccgatgcggtaaacgcaggcgttgcggtggttcgcgcgtcgcgcgtcgggtcggggcacgtgatgcgcaacggcgccgcgagcgacgatgcgctcggcttcgtgagcgcggggtcgctgaacccgtacaaggcgcgcgtgctgctgatgctcgcgctcgcgaacggcatcgacggtcgcgacgcgctgcaacgcatgttcgatacgctgtaa

SEQ ID NO: 41624 - protein, 340 aa, Burkholderia sp. 383
MNTPNSASPSSAAALPRIAVLATGGTIAGAAPDAASTAGYQAGALGVNFLVDAVPALASVARIDAEQIASIDSKDLALPLWNALAARIDALMADPAVDGIVITHGTDTLEETAYALHLVVNGDKPVVLTAAMRPATALSSDGPLNLLNAVTVAAHPSARGQGVLVAFNNRIHGARDVVKTSTYAVDAFQSPELGALGWVQDGRVEFARRVTRSRDTQLAIAAVWPPVEVVASYAGVTRTAVDALVAAGVRGLVVAGTGNGSIHATLQAALADAVNAGVAVVRASRVGSGHVMRNGAASDDALGFVSAGSLNPYKARVLLMLALANGIDGRDALQRMFDTL

SEQ ID NO: 41625 - DNA, 984 bp, Synechococcus sp. CC9605
  CDS (1)..(984): transl_table=11
atgaagcgcctgctgctgctggccaccggcggcaccattgctggctgtgcggagaacagcgcaatgctgaacgattacaccgcgggcgtgctggggggcgacgccctgctggcggcggtgccgcagctgcaggacctggccacgatcagcgttgagcagatcgccaatgtcgacagcgccgacctattgtttgtccattggcgagcgctggtggggcgcattcgcgatgcctttgcggcagatccagagctggccggggtggtgatcacccatggcaccaacaccctggaggaaaccgcctggttgctgcagttgttgatcgacgatccccggccggtggtgctggtgggggcgatgcggccggccacggccctcagtgccgatgggccgctcaacctttttcaaggcgtgcaggtggcgttgagccccgaagcgcgcggccagggcgcgttggtggtgatggatggacagatccatgccgccgagcgggttaccaagctggccacccagggggtgggggcctttgctagcccccttagcgggcccttgggctgggtggacgacgttggcgttcatctgtcaacagcgcgcggacttcggcaggtgcccttcgctgatctcgctttaccggagcaatggccccaggtgccgatcgtctacggctgtgtggagcctgagccgcttctgctaagtgcttgtctcaaggccggtgttgcgggcctggtgttcaccggcacgggtgccggccagttgtcggtggctgagcgttcggcgcttcaggcttggccagggaagcgaccgttgatgctgcgggccaaccgctgtgggtcggggtccgtgcattgcgattccgaggatcaacggcttggtctgctgtcagcaggcagcctcaatccccagaaagccagggtggtgcttttgatggctttgctggcgggttgggaccgagatcagctggatgcgctgatcactgcatcaccgtga

SEQ ID NO: 41626 - protein, 327 aa, Synechococcus sp. CC9605
MKRLLLLATGGTIAGCAENSAMLNDYTAGVLGGDALLAAVPQLQDLATISVEQIANVDSADLLFVHWRALVGRIRDAFAADPELAGVVITHGTNTLEETAWLLQLLIDDPRPVVLVGAMRPATALSADGPLNLFQGVQVALSPEARGQGALVVMDGQIHAAERVTKLATQGVGAFASPLSGPLGWVDDVGVHLSTARGLRQVPFADLALPEQWPQVPIVYGCVEPEPLLLSACLKAGVAGLVFTGTGAGQLSVAERSALQAWPGKRPLMLRANRCGSGSVHCDSEDQRLGLLSAGSLNPQKARVVLLMALLAGWDRDQLDALITASP

SEQ ID NO: 41627 - DNA, 1044 bp, Burkholderia thailandensis E264
  CDS (1)..(1044): transl_table=11
atgaacgcaccgacatcttcccatccccctcatgtgacgaacccggcgccgcgcgcgctgccgcgcatcgccgtccttgcgacgggcggcacgatcgcgggcgccgcgcccgacgccgcgcagacggccggctatcacgcgggcgcgctcggcgtcgacaggctgctcgccgccgtgcccgcgctcgcgcagatcgcgacgatcgaggccgagcagattgcgagcatcgacagcaaggacctgtccgtcgcgctgtggacgacgctcgtcgagcggatcaacgcgcttgccgcgagcgaggcgatcgacggcatcgtgatcacgcacggcaccgacacgctcgaagaaaccgcgtacctgctgcacctgaccgtgaagaccgcgaagcccgtcgtgatgacggcggcgatgcgcccggcgaccgcgctgtcgtccgacggcccgctcaacctgctgaacgcggtggcggtcgcgggcagcgcggcggcgcgcgggcagggcgtgctcgtcgcgttcaacaaccggatccacagcgcgcgcgacgtcgtgaagacgagcacctacgcggtcgacgcgtttcattcgccggagctcggcgcgctcggctgggtgcaggacggccgcatcgagttcgcgcgccgcgcgacgcgtgcgcatacgctcgacacgcgcttcgcgatcggcgcggcctggccgcaggtcgacgtcgtcacgagctatgcgggcgcgtcgcgcgtgatcgtcgacgcgtgcgtcgcggccggcgcgcgcgggcttgtcgtcgcaggcacgggcaacggttcgatccacgcggcggtgcagacggcgctcgccgatgcggcggcgaaaggcgttgcgatcgtgcgcgcgtcgcgtgtcggctcggggcatgtgatgcgcaatggcgcggcgaacgacgatgcgctcggcttcgtgagcgcaggctcgctcaatccgtacaaggcgcgcgtgctgctgatgctcgcgctcgcggcgggcatgaccgacgtgcacgaattgcagcaggcgttcgatacgtattga

SEQ ID NO: 41628 - protein, 347 aa, Burkholderia thailandensis E264
MNAPTSSHPPHVTNPAPRALPRIAVLATGGTIAGAAPDAAQTAGYHAGALGVDRLLAAVPALAQIATIEAEQIASIDSKDLSVALWTTLVERINALAASEAIDGIVITHGTDTLEETAYLLHLTVKTAKPVVMTAAMRPATALSSDGPLNLLNAVAVAGSAAARGQGVLVAFNNRIHSARDVVKTSTYAVDAFHSPELGALGWVQDGRIEFARRATRAHTLDTRFAIGAAWPQVDVVTSYAGASRVIVDACVAAGARGLVVAGTGNGSIHAAVQTALADAAAKGVAIVRASRVGSGHVMRNGAANDDALGFVSAGSLNPYKARVLLMLALAAGMTDVHELQQAFDTY

SEQ ID NO: 41629 - DNA, 984 bp, Desulfitobacterium hafniense Y51
  CDS (1)..(984): transl_table=11
atgcaaaagattaaactcattgccaccggggggacgattgccatgcgcaaggactcctttggcaagaccgtaccggcggttaccggacatgatcttttagaaagtataccggaattgcaggaatcagccttttgggatgtggaagaattcagcaatcttgccagctgtaattttaatcctgagcggatgcttcagttggcacggcgtgtgaaagaggctttcgccgatcccgactgcatggggatcatcatcacccacggaacggataccttggaggaaacggcttattttctggagcttacagtcaaagacagccggcccgtcatattgacagcctcccaaagagatgcttcagagagagattccgacggcccccgcaatttacataactccatgcgcattgccatggatccccacgctaaggaacgaggggtgttgatcgctctcaatgaagagattcatgccgccagggatgtgcggaaattacacaccagccacgtggatgcttttagttccggcgaagtaggttcattgggaagcattgaccatgatgaggtgttatggcatcgcaaacctgagccctcggtaaaatttgacctccctgaaaaactggccaaggtcatgatctgcaaaggctataccggcatggacggcagaatgctggaatgtatggtggacgctcaagtggagggaatagtcatcgaggcctttggccggggaaatctccccccggaggttgttccttcgatagggaagattacggcggaaaatatacctgtggtcattacgtcacgttgtttatttggacgaactgctcctgtctacggctatcccggcggcggagcagagcttcaacgccggggggcactttttgccggggatctttctacagagaaggttcgtttgctcctgagtattgccttggggcagaacgtttcccacacccggcttaaagagattttgagtcgtggcggagtaaagtag

SEQ ID NO: 41630 - protein, 327 aa, Desulfitobacterium hafniense Y51
MQKIKLIATGGTIAMRKDSFGKTVPAVTGHDLLESIPELQESAFWDVEEFSNLASCNFNPERMLQLARRVKEAFADPDCMGIIITHGTDTLEETAYFLELTVKDSRPVILTASQRDASERDSDGPRNLHNSMRIAMDPHAKERGVLIALNEEIHAARDVRKLHTSHVDAFSSGEVGSLGSIDHDEVLWHRKPEPSVKFDLPEKLAKVMICKGYTGMDGRMLECMVDAQVEGIVIEAFGRGNLPPEVVPSIGKITAENIPVVITSRCLFGRTAPVYGYPGGGAELQRRGALFAGDLSTEKVRLLLSIALGQNVSHTRLKEILSRGGVK

SEQ ID NO: 41631 - DNA, 1041 bp, Burkholderia xenovorans LB400
  CDS (1)..(1041): transl_table=11
atgaatacttcgattccttcctccaccacatcttcagacgaaggcgccacgctgctgccgcgcatcgccgtgctggcaaccggcggcacgattgccggcgcggctgcggacgccaccaatacgtccggctaccaggccggcgtggtcggcgtcgagcaattgctggcggtggtgccggctttgtccgcggtggcgcgcgtcgcgcccgagcagattgccagcatcgacagcaaggacatggcgttgccgctttggaccacgctcgcacaacgcatcaacgcgctgctcgccgacgacgacatcgacggcgtggtggtcacgcacggcacggacacgctcgaagaaaccgcctacctgctgcacctgaccatcaagtcggacaaaccggtcgtgctgacggcggccatgcgcccggcctcggcgctctccgccgacggtccgctgaatctgctcaacgccgtgacggtcgcggcgcacgtggcgtcgcgcgggcagggcgtactggtggccttcaacaacaggattcacagcgcgcgcgacgtggtgaagacgagcacctacgcggtcgatgcattccattcgccggaaatcggcgcgctcggctgggtgcaggacggccgcgtcgaattccagcgcagcgtggtgcggccgcatacgctcgccaccgaattcgtgatcggcgcgaagtggccgcacgtggagatcgtcgtgagctacgcgggcgtttcgcggattgccgtggatgcgctggttgccgccggcgtgcgcggtatcgtggtggcaggcacgggcaacggttcgattcatgcctcggtgcagcaggcgctggccgatgccgcctcgcagggcgtagcggttgtgcgtgcgtcgcgcgtgggttcggggcatgtgatgcgcaacggcgcggccgccgacgacgcgctcggcttcgtcagtgcgggttcgctgaatccgtacaaggcgcgtgtgttgctgatgctggcattggccgcgggcgccgcggggccgatggtgttgcagaagatattcgatacgtactga

SEQ ID NO: 41632 - protein, 346 aa, Burkholderia xenovorans LB400
MNTSIPSSTTSSDEGATLLPRIAVLATGGTIAGAAADATNTSGYQAGVVGVEQLLAVVPALSAVARVAPEQIASIDSKDMALPLWTTLAQRINALLADDDIDGVVVTHGTDTLEETAYLLHLTIKSDKPVVLTAAMRPASALSADGPLNLLNAVTVAAHVASRGQGVLVAFNNRIHSARDVVKTSTYAVDAFHSPEIGALGWVQDGRVEFQRSVVRPHTLATEFVIGAKWPHVEIVVSYAGVSRIAVDALVAAGVRGIVVAGTGNGSIHASVQQALADAASQGVAVVRASRVGSGHVMRNGAAADDALGFVSAGSLNPYKARVLLMLALAAGAAGPMVLQKIFDTY

SEQ ID NO: 41633 - DNA, 1128 bp, Ralstonia metallidurans CH34
  CDS (1)..(1128): transl_table=11
atgcaacgcactgcccgtctcaaacccctggccgccctgctgctttcggccagcctgctcactggcgtggctcacgcccagctcagccccgcaccggccgccagcgccaatgcgccggcaggcaccaccgccgaagcacgcaaggccaacatcgtcatcatcggcactggcggcaccatcgccggcgcgggtgctgccgccaccaataccgcggcctatcagtccgccgtggtgccggtcgacaagatcatcgcttccgtgccggagatctcgaagatcgccaacgtcaagggtgaacaggtcttccagatcggctccgagagcttcaacaacgagcgcctgatcaagctggccaagcgcgtctccgaactgctcaagcagcccgacgtcgacggcatcgtgatcacgcacggcactgacacgatcgaggaaaccgcatacttcctgaacctgacgctcaagagcgacaagccggtggtggtggtcggctcgatgcgcccgggcaccgcactgggcgccgatggcgcgctgaacctgtacgacgccgtgctggtggcgtcgaaccccgcctcgaagggcaagggcacgctggtggtgctcaatgacgagatccagaccggccgtgacgtgacgaagaccaacacgttcaaggtcgagacgttccgctcgccgtttggcccgctcggctacgtggtggaaggccgcacgctgtatttccgcctgccggcccggccgcacacgacgcagacggagttcgacatcgacaagatcgacaagctgcctgaagtggccgtggtctacgcgtacggcaacatgaaccctgccgcgatcgatgccgctgtgaagagtggcgccaaggccatcatcttcgacgccaccggcaatggtagcgtcggcgactacatggtcgaaccgctcaaggccgcccgtgccaagggcgtgttcattgtgcgtgcctcgcgcacgggcagcggcgtcgtgatccgtaacggcgaacagcccgacgacaagtacgactggatcgtcaccgacgaccagatcgcgcagaaggctcgcatcctgatggcgctggcactgaccaagaccaacgacccgaaggcactgcaagagatcttctggaagtactga

SEQ ID NO: 41634 - protein, 375 aa, Ralstonia metallidurans CH34
MQRTARLKPLAALLLSASLLTGVAHAQLSPAPAASANAPAGTTAEARKANIVIIGTGGTIAGAGAAATNTAAYQSAVVPVDKIIASVPEISKIANVKGEQVFQIGSESFNNERLIKLAKRVSELLKQPDVDGIVITHGTDTIEETAYFLNLTLKSDKPVVVVGSMRPGTALGADGALNLYDAVLVASNPASKGKGTLVVLNDEIQTGRDVTKTNTFKVETFRSPFGPLGYVVEGRTLYFRLPARPHTTQTEFDIDKIDKLPEVAVVYAYGNMNPAAIDAAVKSGAKAIIFDATGNGSVGDYMVEPLKAARAKGVFIVRASRTGSGVVIRNGEQPDDKYDWIVTDDQIAQKARILMALALTKTNDPKALQEIFWKY

SEQ ID NO: 41635 - DNA, 1002 bp, Ralstonia metallidurans CH34
  CDS (1)..(1002): transl_table=11
atgtccgtactcctgcctcgtatcgttgtgctcgcgactggtggcaccatcgccggttcgtccgcaaatcctgccagtagcgcgcactatcaggctgcgacagtgcccgtatcgcaacttgtacaggcagtgcccgcgctggccgatgtggcgcgagtcgaggcggagcaggtggcgcaggtggacagcaaggacatgatgttcgatctctggcggatgcttgccgcgcgaatcgggtattggtccgcgcaggacgatgtcgccgggatcgtgatcacacatggcactgacacgctggaagagacggcgatgttcctgcatctgacacaggcttgcccgttgcctgtcgtgatgacggcggccatgcgcccatcgacgtcgctttccgctgacgggccgctgaacctgctcgatgcggtgcgcgtggcggcaagcccggtggcagttggcaaaggtgcgctcgtggtgctgaatcagcagattcatgccgcgcgtgatgtcgtcaaggcgcatacgtcggctgtcgatgctttccattcgccagttgccggtccgctgggttttgtgcaggacacctatgtccatttctcgcgcaccccgggtcctgatcaggcgccgcgcttgccggtgcccgctgcatggccgttggtggagatcgtcgccagctacgcgcagccggggagggtgggtatcgatgcgatggtggccgccggcgtgctcgggtttgtcgtggccgcggccggcaacggttccgtgcacgaaacgctgacggccgcgctggtcgatgctgcggcatgtggcgttgcggtggctcgaagctcgcgtaccggtgctggtcatgtggcaatccccgcaccgccgcgaccggcaggtggcgtatttgtctcggcgggcgacctcaatccctacaaagcgcgcgtgctgctgctgctggcgttggccggcgacccttcgctggggcgcgatgcggcccggcttcaggcgctcttcgagcggtactga

SEQ ID NO: 41636 - protein, 333 aa, Ralstonia metallidurans CH34
MSVLLPRIVVLATGGTIAGSSANPASSAHYQAATVPVSQLVQAVPALADVARVEAEQVAQVDSKDMMFDLWRMLAARIGYWSAQDDVAGIVITHGTDTLEETAMFLHLTQACPLPVVMTAAMRPSTSLSADGPLNLLDAVRVAASPVAVGKGALVVLNQQIHAARDVVKAHTSAVDAFHSPVAGPLGFVQDTYVHFSRTPGPDQAPRLPVPAAWPLVEIVASYAQPGRVGIDAMVAAGVLGFVVAAAGNGSVHETLTAALVDAAACGVAVARSSRTGAGHVAIPAPPRPAGGVFVSAGDLNPYKARVLLLLALAGDPSLGRDAARLQALFERY

SEQ ID NO: 41637 - DNA, 990 bp, Rubrobacter xylanophilus DSM 9941
  CDS (1)..(990): transl_table=11
atggtgctctcaaaagtggtggtgctgtctttgggcgggactatctcttcgataccgagctccggcccgggggtggtgccgaggttgacgggtaaagacctggtggagagcgttccgcaggttgcggaggtggcggaggtcgaggcggagtcgctgcgccagatgccgagctcggatctcacgctcgaggatctcacagaagtagctcttgaggtgaaggagaggatcgatggcggggccagcggcgtggtcatcacccagggcaccgactccatagaagagaccgccttcgcgatggacctgctcgtgcagggggatgcgccggtggtggtgaccggcgccatgcgcaaccccacgctgcccggggccgacggcccggccaacctgctggcctccgtgcgggtcgccgctagccgcgccgcgagggggctgggcgctctcgtcgtgatgaacgacgagatccatgccgcccgcttcgtcaaaaagacccatacccagagcccctccactttccagtccccttcgaccggtccgatagggtgggtctccgagggagatgtgcgggtggcgctgcggctccccgcacggcacgtgctgggcatgccccccgacggggccggccattccgtggccctcctcaagctggcccttggtgaggacggaaggctcctccccgccgtgagacaggccggatatgcggggctcgtcgtggaggccttcggcggggggcacgtcccctcggggatggtcggtgccctggagcagctcgcctcggagatgcccgtcgtgctcgcctcgcgcaccgggagcggcgacgtgctcaggaggacgtacggcttcgccggctcggagatggacctcctctctcgcggcctcatctggggcggcatgctggacgggctcaaggcccggctgctgctcaccttcctgttgcgccacggaaaagaccgcgaggagatccgggctgctttcgagaagtggtacatctag

SEQ ID NO: 41638 - protein, 329 aa, Rubrobacter xylanophilus DSM 9941
MVLSKVVVLSLGGTISSIPSSGPGVVPRLTGKDLVESVPQVAEVAEVEAESLRQMPSSDLTLEDLTEVALEVKERIDGGASGVVITQGTDSIEETAFAMDLLVQGDAPVVVTGAMRNPTLPGADGPANLLASVRVAASRAARGLGALVVMNDEIHAARFVKKTHTQSPSTFQSPSTGPIGWVSEGDVRVALRLPARHVLGMPPDGAGHSVALLKLALGEDGRLLPAVRQAGYAGLVVEAFGGGHVPSGMVGALEQLASEMPVVLASRTGSGDVLRRTYGFAGSEMDLLSRGLIWGGMLDGLKARLLLTFLLRHGKDREEIRAAFEKWYI

SEQ ID NO: 41639 - DNA, 1002 bp, Rhodococcus sp. RHA1
  CDS (1)..(1002): transl_table=11
atgccgttgcgaatagcgatcatcgctaccggaggcacaatcgcctccacgacctccgagggcggtgtcgtcgcgaaccagacggcggccactcttctcgagggcaccggcatagccggcgtcgagatcgaaacgatcgacctgatgaccatcggctcgtaccagatgacgctcggtcacctgcgccagatcagtgaccaagtcgccgacctgctcgctcgcgagcacgagcgtgtcgacggaatcgtcatcacccacggcaccgacacgatggaggagacagcgatcctcctcgatctcgtgcacgacgatccccgccccctcgtgttgaccggcgcacagcatccccgtgacgctgtcgccggtgacggcccccgcaatcttgcggacgccgtgcgggttgcggcctcgcccgacgcccgcgagctgggtgtgctgatcgccttcgccgggcggattctccccgctcggggaacgcgcaagatgcacacgaccgctctggcggcgttcgactcgatggtcggcggcagcgtcggcaacgtcagcggaggcgccgtgtcgatcatctccgccccccgccgtcccaagccgctaccgcggcccaccctcgcgttcgacgacacccgcgtcgatctggtcgagatgtatccgggcggcgacgccgcgttgatccatgcagccgtcgcggccggggcgaagggtgtgatcgtggccggcaccggcatcggcaacgccaacccggcggtggtcgcagccgcgcgggatctcttgccgcgaggagtattcctcgtgctgtccacccgagtccccgaaggtccggtcgccggcgtgtacggaaatggtggcggggccgacttggtggccgcgggcgttcctgcggcgtcaggcctgccggccacgcagctccgaatactcctggccctctggctgtcccagcgagtggatgcctcggagcaggtcaactccctgatcgatatctacgcagacaacaaggaggactga

SEQ ID NO: 41640 - protein, 333 aa, Rhodococcus sp. RHA1
MPLRIAIIATGGTIASTTSEGGVVANQTAATLLEGTGIAGVEIETIDLMTIGSYQMTLGHLRQISDQVADLLAREHERVDGIVITHGTDTMEETAILLDLVHDDPRPLVLTGAQHPRDAVAGDGPRNLADAVRVAASPDARELGVLIAFAGRILPARGTRKMHTTALAAFDSMVGGSVGNVSGGAVSIISAPRRPKPLPRPTLAFDDTRVDLVEMYPGGDAALIHAAVAAGAKGVIVAGTGIGNANPAVVAAARDLLPRGVFLVLSTRVPEGPVAGVYGNGGGADLVAAGVPAASGLPATQLRILLALWLSQRVDASEQVNSLIDIYADNKED

SEQ ID NO: 41641 - DNA, 963 bp, Rhodococcus sp. RHA1
  CDS (1)..(963): transl_table=11
gtgccgaaagtcgccatcgtcaccaccggaggcaccatcgccagcatgcgggacgggcagggtgtcagcaggccggtggtcgcaggcccggacctgctgggcaatgcgtggaccgggacggaactccgtgtcgtcgacgtgatgtcgaaggacagttcgagcatcacgttcgccgatatggaccgggtgcgcgacgccgtcaccgcggaacttcgcgatcccgatctcgacgcggtagtcgtgctccacggaaccgacaccatggaggagacggccttcctggtcgacctccaccacgccgacccgcggccggtggtgttcacgggtgcgcaacgcacgttcgaccacccggaatccgatgcccagaccaatctggccgacgcggtcgccgcgggatcggaccccgctctgcgcggagcaggtgtgctcatcgcgttcggaggcgccctgcacccggcgtcgggtacgcggaaggtcgacacgacgtcactcgacgcgttccgatccgtccaccccgccggtgtcaccccgcggcgacgtctcgatccactgccgtggcatccgatctccggaacccgcgtcgacatcgtcgccgcctatccgggggccgaccgcgtccagatcgacgcgtgccgggccgccggggcccaggggctggtgctcgacgggctcggatccggaaatgcgaacccggcgatcgtcgaggcggtgcgggactgcgcgtccgccgggatcccggtcgtggtcaccacccgggtgccgaacggcccgacctccgccacgtacggcggtgggggcggcgggcacgacctcgtctcggcgggtgcactgttctccaccgacctcagagcaggtcaggcccgcatcctcctcgcggcgctgctcgccgaccccgagcacaccgacctcgacaaggaattcgatcgacgctcacgcatcgaccccgcaccgaggatcagctga

SEQ ID NO: 41642 - protein, 320 aa, Rhodococcus sp. RHA1
MPKVAIVTTGGTIASMRDGQGVSRPVVAGPDLLGNAWTGTELRVVDVMSKDSSSITFADMDRVRDAVTAELRDPDLDAVVVLHGTDTMEETAFLVDLHHADPRPVVFTGAQRTFDHPESDAQTNLADAVAAGSDPALRGAGVLIAFGGALHPASGTRKVDTTSLDAFRSVHPAGVTPRRRLDPLPWHPISGTRVDIVAAYPGADRVQIDACRAAGAQGLVLDGLGSGNANPAIVEAVRDCASAGIPVVVTTRVPNGPTSATYGGGGGGHDLVSAGALFSTDLRAGQARILLAALLADPEHTDLDKEFDRRSRIDPAPRIS

SEQ ID NO: 41643 - DNA, 1020 bp, Synechococcus sp. CC9311
  CDS (1)..(1020): transl_table=11
ttgagggtcgagcagcccaccccacccccgagcttgctcctgcttgccacgggtggcacgatcgccggccgtggtgtcaccagcacctctctcagctcctacaccgcgggggcgatgtctggatcggagctccttcaggagctgccgcagctgcaagaagcggcccagattcaggtggaacaactggtcaatttggatagtgctgatttgcagtttcagcattggaagcgtctggcgacgcgaatccgtgaggcttttgccgagtcctgcgagttggcgggagtcgtgatcacccacggcaccaacaccttggaagaaaccgcctggttgttggagttactcattgatgatccgcggccagtggtgttggtgggagcgatgcgtccggccacagccctcagtgctgatggtccgctgaatctttttcaagccgtgcaagtggcagctagccctcaggcctgcgggcatggggtgcttgtcgtgatggatggccagatccatggagccagggctgtcaccaaagtggcaacacaaggtgtaggtgcgtttcaaagtccagatttgggccccctgggttgggtggatgacagcggagtgcacctgccggtggcatccgggttccgatccgttcctttcgccacgcttgcattgccagaccagtggcccgaagtggccatcctttacggctgtgtgaatccttcgttggctttggtttcgtccctctttcaggcaggcgtgaaggggatggtctggactggcaccggggccggccagttatctgcaggggaacgtgaggccatcaaaacctggcctggtgtgttgcccctgatgttgcgcgcgaatcgttgcggtaggggtcctgtccatccctgtgcgcttcaggatgagcttggcttgttgccggcaggaaccctcaaccctcagaaggcgaggattcttctcctcttggccttgattgctgggatggaacgagccgaactgtcagcgctgttggtgacgatgtcgatgaatgtggggtga

SEQ ID NO: 41644 - protein, 339 aa, Synechococcus sp. CC9311
MRVEQPTPPPSLLLLATGGTIAGRGVTSTSLSSYTAGAMSGSELLQELPQLQEAAQIQVEQLVNLDSADLQFQHWKRLATRIREAFAESCELAGVVITHGTNTLEETAWLLELLIDDPRPVVLVGAMRPATALSADGPLNLFQAVQVAASPQACGHGVLVVMDGQIHGARAVTKVATQGVGAFQSPDLGPLGWVDDSGVHLPVASGFRSVPFATLALPDQWPEVAILYGCVNPSLALVSSLFQAGVKGMVWTGTGAGQLSAGEREAIKTWPGVLPLMLRANRCGRGPVHPCALQDELGLLPAGTLNPQKARILLLLALIAGMERAELSALLVTMSMNVG

SEQ ID NO: 41645 - DNA, 1014 bp, Shewanella sp. MR-7
  CDS (1)..(1014): transl_table=11
atgactaaacgctccatttacgtcgcctatacgggcggcaccataggcatgcaaaaaaccgcgaatggttttgctccggtggcaggttttttgacccaatgcgtccaatccatgcccgagttctaccatgacgaaatgcctgagtttgtgatccacgagtactgcccgctcatcgactcatcaaacatggcaccgaccgactggcaaatgatcgccgatgatattaaggccaattacgataagtacgatggctttgtgatcctccacggcacagataccatggcctacaccgcatcggccttatcctttatgcttcaaggtctgtcaaagcctgttattgtcactggctcccaaattcctttggcacagctgagatccgacggtcaaaccaacctgcttaactctttgtatatcgccgccaactatccggtggcggaagtgtgtttattctttaataacaaactgttccgtggcaatcgttctaccaaagcccacgccgatggctttgatgcctttgcctcgccaaacttccctttactccttgaagcggggatcaaaattaatctgcgtgcaggtaaaattgccaccccaagcgataagccattagaagtggctaatatcagcccgcagcccgtcggtgtggtgactctctatcctggcatttcgacgcaaatctttgaaaatatcctgcagcaacccgttaaggcgctcattttactgacctttggcgtgggcaatgcaccgcaagataaagcattactcgatactctaaagcaagcggatgagcgtggaattgtgttagtgaatctaactcaatgtttccaaggcaaagtgaatatgggcggttacgctacgggcaatgccctcgccaaagcgggggtgatcagtggtgcagacatgaccattgaggcagcactggctaagttgcattatctgctatcaaaaaacctaaagccgggcgaaattaaaacggccatgttgcaaaacttggttggtgagctcagccccgactaa

SEQ ID NO: 41646 - protein, 337 aa, Shewanella sp. MR-7
MTKRSIYVAYTGGTIGMQKTANGFAPVAGFLTQCVQSMPEFYHDEMPEFVIHEYCPLIDSSNMAPTDWQMIADDIKANYDKYDGFVILHGTDTMAYTASALSFMLQGLSKPVIVTGSQIPLAQLRSDGQTNLLNSLYIAANYPVAEVCLFFNNKLFRGNRSTKAHADGFDAFASPNFPLLLEAGIKINLRAGKIATPSDKPLEVANISPQPVGVVTLYPGISTQIFENILQQPVKALILLTFGVGNAPQDKALLDTLKQADERGIVLVNLTQCFQGKVNMGGYATGNALAKAGVISGADMTIEAALAKLHYLLSKNLKPGEIKTAMLQNLVGELSPD

SEQ ID NO: 41647 - DNA, 1089 bp, Pseudomonas aeruginosa UCBPP-PA14
  CDS (1)..(1089): transl_table=11
atgaagccattgctccacgcgttcgcccccggtgttatggccctgatgctcctgctgccgcaggccgcccaggccaaggaagtcgcaccgcaacagaaactgtccaacgtggtcatcctggccaccggcggtaccatcgccggcgccggcgccagcgccgccaacagcgccacctacaccgccgccaaggtgccggtcgaccagttgctggccagcgtgccgcagctcaaggacatcgccaacgtccgcggccaacaggtgttccagatcgcctcggaaagcttcaccaacgagaacctgctggaactgggcaagaccgtcgccaagctggccgatagcgacgacgtcgacggcatcgtgatcacccacggtaccgacaccctggaagagactgcctacttcctgaccctggtcgagcacaccgagaagcccatcgtggtggtcggctcgatgcgcccgggcaccgcgatgtccgccgacggcatgctcaacctgtacaacgccgtggcggtggccggcgacaagtcggcgcgcggcaagggcgtgctgatcaccatgaacgacgagattctctccggccgcgacgcgagcaagatggtcaacatcaagaccgaagcgttcaagagcccgtggggcccgctgggcatggtggtcgagggtaagagctactggttccgcgcaccggtgaagcggcacacggtgaactccgagttcgacatcaagcagatctccgcgctggctccggtggaaatcgcctacagctacggcaacgtcagcgacaccgcctacaaggccctggcccaggccggcgccaaggcgatcatccatgccggcaccggcaacggctcggtgcccgcgcgcgtggtgccgaccctgcaggaactgcgcaagcagggcgtgcagatcatccgctcctcgcacgtcaatgccggcggcttcgtcctgcgcaacgccgagcagccggacgacaagaacgactggatcgtcgcccacgacctgaacccgcagaaggcgcgcatcctggccgcggtcgcgatgaccaagacccaggacagcaaggagctgcaacggatcttctgggaatactga

SEQ ID NO: 41648 - protein, 362 aa, Pseudomonas aeruginosa UCBPP-PA14
MKPLLHAFAPGVMALMLLLPQAAQAKEVAPQQKLSNVVILATGGTIAGAGASAANSATYTAAKVPVDQLLASVPQLKDIANVRGQQVFQIASESFTNENLLELGKTVAKLADSDDVDGIVITHGTDTLEETAYFLTLVEHTEKPIVVVGSMRPGTAMSADGMLNLYNAVAVAGDKSARGKGVLITMNDEILSGRDASKMVNIKTEAFKSPWGPLGMVVEGKSYWFRAPVKRHTVNSEFDIKQISALAPVEIAYSYGNVSDTAYKALAQAGAKAIIHAGTGNGSVPARVVPTLQELRKQGVQIIRSSHVNAGGFVLRNAEQPDDKNDWIVAHDLNPQKARILAAVAMTKTQDSKELQRIFWEY

SEQ ID NO: 41649 - DNA, 972 bp, Pediococcus pentosaceus ATCC 25745
  CDS (1)..(972): transl_table=11
atgaagaaaatactagcattacatacaggtggaacgatttcgatgtctgccagcaatgatactgttaaaactaatgaacaaaacccattactagatagccaatttatcaacaaaaatattgacctagttaatgaagtgattttgaataaaccttcagaacacattacgccagatgatatgttaattattaaaaaaagggtcaaaaaggcactagataacaatgagtgtgatggcattgtaatcacgcacggaacggataccttggaagaaactgcgtactttttagatttaacgatcgaaaataaaattccagttgtgctaacgggggccatgcgctcttccaacgaactaggttcggatggtgtgtataatttccaaagtgcaattctgacggctgcttctgatgaagccagtgataaaggggttttagtggtcatgaatgatgagatccatactgcccgttttgttacgaaaacccatactactaatgtagatacgtttagaaccccaacttttgggccgctcggaattgtttataaacgggatatccgattctttcaagctttagttaatcagcatgtttgtgatattgaccaccttgaaaaaggagtctatttaattaaagcttacgcaggaatccctaaagaaatatttgaaattattaatcgcccagggaccaaggggattgtaattgaagggctaggagctggaaatctaccagtagaagtagtcgagcccattcaagcattaattgataatgatattacggttgtaatggtttcacgttgttacaatggcttggccgaacccatctacgattatgtgggcggcggaattgatttagagagaatgggcgttgtattctgccaaggtctcaatggtcaaaaagcacgtattaagttacaagtggcagtaagtgctggtatgaattccaaagatattgctaagtatatgcatgacgcggtgtcatag

SEQ ID NO: 41650 - protein, 323 aa, Pediococcus pentosaceus ATCC 25745
MKKILALHTGGTISMSASNDTVKTNEQNPLLDSQFINKNIDLVNEVILNKPSEHITPDDMLIIKKRVKKALDNNECDGIVITHGTDTLEETAYFLDLTIENKIPVVLTGAMRSSNELGSDGVYNFQSAILTAASDEASDKGVLVVMNDEIHTARFVTKTHTTNVDTFRTPTFGPLGIVYKRDIRFFQALVNQHVCDIDHLEKGVYLIKAYAGIPKEIFEIINRPGTKGIVIEGLGAGNLPVEVVEPIQALIDNDITVVMVSRCYNGLAEPIYDYVGGGIDLERMGVVFCQGLNGQKARIKLQVAVSAGMNSKDIAKYMHDAVS

SEQ ID NO: 41651 - DNA, 963 bp, Leuconostoc mesenteroides subsp. mesenteroides ATCC 8293
  CDS (1)..(963): transl_table=11
atgaaaaaaattttggttttgcataccggtggtacaatttctatgcatgaagatgctgatggcgatgtcgaaacaggagatgaaaatcctttagttcaagcaaaggttacctttccaaatatcgaactagaagttgagaacatttttaatttaccaagtgaacatattggtccgtctcatatgctacaattgcaaaaacgtatctctgaagccaaaaatgattttgatggtgtggtcattactcatggtactgataccttggaagagacagcattctttctggatagcacattaaaagtttcgtttcctattgttataacgggagcaatgcgttcatccaatgaacttggttcagatggtttgtacaattatcaatctgcgctacgtgtagcggcagatgatacatccaaaaaccgtggtgtgatagttgtgatgaatgatgaaatacatgccgctcgatttgtaactaaaacacacactactaatgtggcaacgtttgcgtcaccacttagtggcacgatggggctactaacgaaacgacaaattatttacttttatgacctgccacaacgagaagtattaccagatgtggatattaacaaaaatatccctgttttaaaggcgtacgctggcatggatggccaattattgaaaattttggctgatgctaatattgacggcattattattgaagcacttggtgctggtaatttatctcgcgaagcagctcgcggagtagcatatttattagcgaaaaatacgccagtggtcattgtgtcaagaagcttcaatggtgttgctgcaccagtatatgattatttaggtggcggcgttcaattagagaaatctggagcaatctttgcgtccagcattaatgggcctaaagcgcgactaaagctattaatcggactatcaaacaacttaagtaaagaacatctagaaacgtatttacatggtatttaa

SEQ ID NO: 41652 - protein, 320 aa, Leuconostoc mesenteroides subsp. mesenteroides ATCC 8293
MKKILVLHTGGTISMHEDADGDVETGDENPLVQAKVTFPNIELEVENIFNLPSEHIGPSHMLQLQKRISEAKNDFDGVVITHGTDTLEETAFFLDSTLKVSFPIVITGAMRSSNELGSDGLYNYQSALRVAADDTSKNRGVIVVMNDEIHAARFVTKTHTTNVATFASPLSGTMGLLTKRQIIYFYDLPQREVLPDVDINKNIPVLKAYAGMDGQLLKILADANIDGIIIEALGAGNLSREAARGVAYLLAKNTPVVIVSRSFNGVAAPVYDYLGGGVQLEKSGAIFASSINGPKARLKLLIGLSNNLSKEHLETYLHGI

SEQ ID NO: 41653 - DNA, 1014 bp, Shewanella sp. ANA-3
  CDS (1)..(1014): transl_table=11
atgactaaacgctccatttacgtcgcctatacgggcggcaccataggcatgcaaaaaaccgcgaatggctttgcaccggtggcaggctttttgacccaatgtgtccaatccatgcccgagttttaccatgatgaaatgcctgagtttgtgatccatgagtactgcccgctcatcgactcatcaaacatggcaccaaccgactggcaaatgatcgccgatgatatcaaggccaattacgacaagtacgatggctttgtgatcctccacggcacagataccatggcctatactgcatcggccttatcctttatgcttcaaggtctgtcaaagcctgttatcgtcaccggctctcaaattccattggcacagctgagatcagacggtcaaaccaacctacttaactctttatatatcgccgccaattatccggtggctgaagtgtgtttattctttaataacaaactgttccgcggtaatcgttccaccaaagcccatgccgatggcttcgatgcctttgcctcgcctaacttccccttactgcttgaggcagggattaaaattaatctgcgtgcaggtaaaattgccacgccaagtgataagccgttagaagtggcgaatatcagcccgcagcctgtcggagtggtgactctctatcctggtatttcgacacaaatttttgagaacattctacagcaacctgtaaaggcgctgattttactaacctttggcgtgggcaatgcaccacaggatgcggcattactcgataccctaaagcaagcggatgagcgtggaattgtgttagtgaacctaactcagtgtttccaaggcaaagtgaatatgggcggttacgctacgggcaatgccctcgccaaagcgggggtgatcagtggtgcagacatgaccattgaagccgcactggctaagttgcattatctgctatcgaaaaacttaaagccgagcgaaattaaaactgccatgctgcaaaacttggttggtgagctcagccccgactaa

SEQ ID NO: 41654 - protein, 337 aa, Shewanella sp. ANA-3
MTKRSIYVAYTGGTIGMQKTANGFAPVAGFLTQCVQSMPEFYHDEMPEFVIHEYCPLIDSSNMAPTDWQMIADDIKANYDKYDGFVILHGTDTMAYTASALSFMLQGLSKPVIVTGSQIPLAQLRSDGQTNLLNSLYIAANYPVAEVCLFFNNKLFRGNRSTKAHADGFDAFASPNFPLLLEAGIKINLRAGKIATPSDKPLEVANISPQPVGVVTLYPGISTQIFENILQQPVKALILLTFGVGNAPQDAALLDTLKQADERGIVLVNLTQCFQGKVNMGGYATGNALAKAGVISGADMTIEAALAKLHYLLSKNLKPSEIKTAMLQNLVGELSPD

SEQ ID NO: 41655 - DNA, 939 bp, Mycobacterium avium 104
  CDS (1)..(939): transl_table=11
atggcccgcctcaccgtgatcgccaccgggggcaccatatcgaccggcaccggcgccgacggggtgcaccggccctgctacaggggggcggatctgacggccccgttccgcgccgatcacgacgtcgaggtggtcgacctgctggcggtggacagctcggagctgaccctggccgactgggatcggatgcgcggcgcggtgacggcggcgctggacggcggcgccgacggcgtggtgatcctgcacggcaccgacaccatggaggagaccgcgctgtggctcgatctgacctacgacgggccggcgccggtggtgttgaccggcgcgatgcgcagcgccgacgcgccggacgcggacggtccgggcaacgtgcgcgacgccctggcggtggccgcgcatccggccgcccgcgggctgggcgtgctgctgtgtttcgccggccgggtgctgcagccgctgggcctgtccaaggtggccaccgaggacttgagcggcttcgccggccggctggtgggcacggtcgccggcgatgtcgcgctgaccggcccgaaaacccggccctacctcggtgacctgggtgccgccgcggccccgcgggtggacatcgtcgcggcgtatctgggcagcgacgcggtggccctggacgcctgcgtggccgccggggcccgggccgtggtgctcgaggcgctgggttcgggtaacgccgggccggcggtggtcgacgcggtgcgccggcactgcggcaccggggtggtgatcgcggtgtccacccgggtgcccggcgggcgggtcggcgcgagctacgggcccgggcacgagatggccgccgcgggggcggtgccggtgcccacgctgcggccgccgcaggcccgggtgctgctgatcgccgcgctggccgccgggctaccggccgccgacgttctcggccggtggggctga

SEQ ID NO: 41656 - protein, 312 aa, Mycobacterium avium 104
MARLTVIATGGTISTGTGADGVHRPCYRGADLTAPFRADHDVEVVDLLAVDSSELTLADWDRMRGAVTAALDGGADGVVILHGTDTMEETALWLDLTYDGPAPVVLTGAMRSADAPDADGPGNVRDALAVAAHPAARGLGVLLCFAGRVLQPLGLSKVATEDLSGFAGRLVGTVAGDVALTGPKTRPYLGDLGAAAAPRVDIVAAYLGSDAVALDACVAAGARAVVLEALGSGNAGPAVVDAVRRHCGTGVVIAVSTRVPGGRVGASYGPGHEMAAAGAVPVPTLRPPQARVLLIAALAAGLPAADVLGRWG

SEQ ID NO: 41657 - DNA, 975 bp, Azoarcus sp. BH72
  CDS (1)..(975): transl_table=11
ttgccacgccagcccgtcatcgccctcgtcgccaccggcggcaccatcgcaggtaccgctgacaccccgggggcggtcacgggctataccgccggcgtgctcggcgccgaggccttgctcgcggccttccccgggctgggcgagatcgccgcgctgcgggccgagaccctgttcagcctggacagcaaggacatggcgccggcgcactggctggcgctggcacaacgggtgcaggcgctggccgacgacccggcggtcgacggcgtggtgatcacgcacggcacggacacgctggaggaatcggcgttcttcgtgcatctgacggtggccaccgccaagccggtggtgtttaccgcggcgatgcgaccggcgaccgcgctgtcggccgacgggccgatgaacctgctcgcggcggtgcgggttgcggcggcgcccgccttccacggcctcggcacgctggtggcgatcaacgaccgggtctatgccgcgcgcgacgtgcagaagcagcgcacccacggcctggatgcgtttggcgcgggcgaaggcgccgcggtgggacgcagcgacccggcgcggcccggcctgctggtgaatcgcgatggcggcagttgcgcggcggcgctggccagcgctgcgctacccgcggtcgaggtgctttacgttgccgccggggcatcgcccgcgctgctcgacgccgtgcgcggcagcggtgcggccggcgcggtgctcgcctttcccggcaacggcagcgtgcccgaggcctggaagccggcgatcgacgcggcgctgcacgccggcatggtgctggtgcgcgccagccgggtgcccgccgggccggtgggccacgacacccgcctgcccgcgtcgttgctcagcgcgggcgacctgccgccatcgaaggcgcgggtggcgctgatgctggcgctggcctgcgaccgcccgcagcgcttctgcaccctcgccgccccgcactga

SEQ ID NO: 41658 - protein, 324 aa, Azoarcus sp. BH72
MPRQPVIALVATGGTIAGTADTPGAVTGYTAGVLGAEALLAAFPGLGEIAALRAETLFSLDSKDMAPAHWLALAQRVQALADDPAVDGVVITHGTDTLEESAFFVHLTVATAKPVVFTAAMRPATALSADGPMNLLAAVRVAAAPAFHGLGTLVAINDRVYAARDVQKQRTHGLDAFGAGEGAAVGRSDPARPGLLVNRDGGSCAAALASAALPAVEVLYVAAGASPALLDAVRGSGAAGAVLAFPGNGSVPEAWKPAIDAALHAGMVLVRASRVPAGPVGHDTRLPASLLSAGDLPPSKARVALMLALACDRPQRFCTLAAPH

SEQ ID NO: 41659 - DNA, 1098 bp, Azoarcus sp. BH72
  CDS (1)..(1098): transl_table=11
atgcccctctcctcccaactccgccacttgctcctccctgccctcgccgcggcggccttgctgctgccgcccgccgcccacgcgcgtgaagccgcagcgccggcacgcctcgccaaggtggtgatcctcgccaccggcggcacgattgccggcgccggcgccgacgcggcctccagcgccacctaccaggccgccaaggttccggtcgaaaaactcgtcgccggcatcccggagctgaagaaccttgccgaagtgcgcggcgagcaggtgttccagatcgcctccgagagcttcaccaacgagcacctgctgcagctcggccgccgggtcgcggagctgagcgccagcgcggatgtggacggcatcgtgatcacccatggcaccgatacgctggaggagacggcgttcttcctcaacctggtgatccgcagcgacaagccggtggtggtggtcggttcgatgcggccgggcaccgcgctgtcggccgacggcgcgctcaacctctacgacgcggtggcggtggcggcgagcagcgacgcgcgcggcaagggcgtgctggtgacgatgaacgacgagatccacagcggccgcgacgtcagcaaggcggtgaacatccgcccggacgcgttccgcagtccgtggggtccgctgggcatggtggtggaaggcaagccctactggttccgcctgccggccaagcgccacacgctgaattccgaattcgacatcgcccgcatccagtcgctggcgccggtcgagatcgcctacggctacggcaacgtaagcgacaccgcctacaaggccttcgccgccgcgggcgccaaggccatcatccatgccggtaccggcaacggctcggtgtcgaaccgggtggtgccggggctgcaggcgctgcgcgcgcagggcgtccacatcgtgcggtcgtcgcgggtggatggcggcggcttcgtgctgcgcaatgccgaacagccggacgacaagtacgactgggtcgccgcgcacgacctcaacccgcagaaggcccgcatcctcgccgcggtggcgctgaccaccaccagcgacagccgcgagctgcagcgcatcttctgggaatactga

SEQ ID NO: 41660 - protein, 365 aa, Azoarcus sp. BH72
MPLSSQLRHLLLPALAAAALLLPPAAHAREAAAPARLAKVVILATGGTIAGAGADAASSATYQAAKVPVEKLVAGIPELKNLAEVRGEQVFQIASESFTNEHLLQLGRRVAELSASADVDGIVITHGTDTLEETAFFLNLVIRSDKPVVVVGSMRPGTALSADGALNLYDAVAVAASSDARGKGVLVTMNDEIHSGRDVSKAVNIRPDAFRSPWGPLGMVVEGKPYWFRLPAKRHTLNSEFDIARIQSLAPVEIAYGYGNVSDTAYKAFAAAGAKAIIHAGTGNGSVSNRVVPGLQALRAQGVHIVRSSRVDGGGFVLRNAEQPDDKYDWVAAHDLNPQKARILAAVALTTTSDSRELQRIFWEY

SEQ ID NO: 41661 - DNA, 930 bp, Mycobacterium sp. KMS
  CDS (1)..(930): transl_table=11
gtgagccttgtcgtgatcaccaccggcggcacgatcgccaccagcaccgacgccgacggcgtacgccggcccacccgccgcggcgccgacctgaccgccggtctggacgtgacggtggtcgacgtgctcaacaaggacagctcgcagctcacccccgccgactgggaccgcatccgcgacgcggtgctggccggcacggcgggcggcgccgccgacggcgtcgtcgtcacccacggcaccgacaccatggaggagacggcgctgtggctcgaactcacctacgacggcaccaccccggtggtgctgaccggtgcgcagcgcggggccgacgcacccgatgccgacggcccggccaacctgcgggacgcggtgacggtcgccggcgatcccgaggcccgcggactcggggtgctcgtcagcttcgccggtacggtccgccggccgctgggcctgcgcaaggtggcgaccgaggacctcgacggtttcgacggaccggtggtgggtcgggtcgccgacggccggttcaccgtgaccgggcccaaggtgcgtccgtacctgggcgacgtgtctgcggaacgcgcaccgcgcgtcgacatcgtcaccacctatccgggcggcgacgccgccgccctgtccgcttgcgcggccgccggggcgcgggcggtcgtcctcgaggcgctgggtgccggcaacgccgcgcaaccggtgatcgacggggtacgccggctgtgcgccgacggggtgctcgtggcggtgtcgacgcgggtgccgggtgggcgggtccgtcccgcctacggtcccgggcgcgacctcgccgacgcgggtgcgctcatggtgccgaccctgcggcccgcgcaggcgcgggtgctgctgatggccgcactcgccgcggacgtcccggccgccgaggtgctcgccgaatggggctga

SEQ ID NO: 41662 - protein, 309 aa, Mycobacterium sp. KMS
MSLVVITTGGTIATSTDADGVRRPTRRGADLTAGLDVTVVDVLNKDSSQLTPADWDRIRDAVLAGTAGGAADGVVVTHGTDTMEETALWLELTYDGTTPVVLTGAQRGADAPDADGPANLRDAVTVAGDPEARGLGVLVSFAGTVRRPLGLRKVATEDLDGFDGPVVGRVADGRFTVTGPKVRPYLGDVSAERAPRVDIVTTYPGGDAAALSACAAAGARAVVLEALGAGNAAQPVIDGVRRLCADGVLVAVSTRVPGGRVRPAYGPGRDLADAGALMVPTLRPAQARVLLMAALAADVPAAEVLAEWG

SEQ ID NO: 41663 - DNA, 972 bp, Acidovorax sp. JS42
  CDS (1)..(972): transl_table=11
atgcaagtggcagctgcaagaaaaatcgtcgttatgggcaccggcggcacgattgcgggctcttccgcggtgcaaggtgccaacgtgggctacacggccgggcagatcggcgtggagcaattgctggccgcggtgcccgggctggtgcaggccgcgggcggcgcgctggtggctgaacaggtggtgcagctggacagcaaggacatgggctttgacgcgtgggcgcgcctggccggtcgttgcgccgcacacctggccgacccggccgtggccggcgtcgtcatcacccacggcacggatacgctggaggaaaccgcctggctgctgcacaacctgctcgataccaccgccaagccggcggtactgacctgtgccatgcgtccggccacggcgctcgcgccggacgggccgcagaacctgctggatgccgtcacgctggcggccgatccctcagcgcggggggttctgatggcggccgctggcgtggtgcatggggcacgcgaggtgagcaaggtgcacccgctgcggctggacgcgttcgactccggcgatgccgggcctctgggctggatggaagcggggcgcgtgcgctgggcccgcggccttgcgccgcaggtggaacagcccgcgcatggcgcgctggtgccgatcctgccagatgccgcctggccacgcgtggaaattgttctcagccacgccggcgcggatggcgcgttggtggactggctggtggagaagggcgtgcacggcctcgtggtggccgccaccggcaatggcacgctgcaccatgcgctggaggccgcgctcgcgcgtgccgtggaggccggggtgcaggtgcgcgtggcttcgcgctgcccgcaggggcggatgatggacctgacgggcacgccctggcgcgatgcggatgggctgagccccgtgaaggcgcgggtcagcctggtgctggagttgatgcagtccgctaattcataa

SEQ ID NO: 41664 - protein, 323 aa, Acidovorax sp. JS42
MQVAAARKIVVMGTGGTIAGSSAVQGANVGYTAGQIGVEQLLAAVPGLVQAAGGALVAEQVVQLDSKDMGFDAWARLAGRCAAHLADPAVAGVVITHGTDTLEETAWLLHNLLDTTAKPAVLTCAMRPATALAPDGPQNLLDAVTLAADPSARGVLMAAAGVVHGAREVSKVHPLRLDAFDSGDAGPLGWMEAGRVRWARGLAPQVEQPAHGALVPILPDAAWPRVEIVLSHAGADGALVDWLVEKGVHGLVVAATGNGTLHHALEAALARAVEAGVQVRVASRCPQGRMMDLTGTPWRDADGLSPVKARVSLVLELMQSANS

SEQ ID NO: 41665 - DNA, 1101 bp, Acidovorax sp. JS42
  CDS (1)..(1101): transl_table=11
atgtcgctggtggccgctgccatcaccgttgccggttttgtcggcgcccccaccctcgcccacgcgcaggacacgcgcgccacggcggccacgcaggcccagccggccgccgccaagccccgcgtggtagtgctggccacgggcggcacgatcgccggcgccggcgcctcggccatgaacagcgccacctacacggccgccaaggtgcccgtggacaagctgctggccggcctgcccgagctgtccaacgtcgcccaggtgtcgggcgaacaggtgttccagatcgcttccgagagcttcaccaacgaacacctgctgaagctggcccagcgcgtgtcgcaactggccaagcagggcgacgtggacggcatcgtcatcacccatggcaccgacacgctggccgagaccgcctacttcttgagcctgacagtgcgcaccgacaagccgatcgcgctggtcggctccatgcgcccgggtactgccctgtcggccgacggcgcgctgaacctggtcaacgccgtgagcgtggcggcctccaaggatgcgcgcggcaagggcgtgctggtcaccatgaacgacgagatcaacaccgcgcgcgacgtgaacaaggacatcaacatccagaccagcgccttcaagagccagtggggcccgctgggcatggtggtggaggggaagaattactggttccgcgcgccggtgaagcgccacaccacgcaatcggaattcgacatcgacagcatcacctcgctgccccaggtggacatcgtctatgcctacggcaacgtgcagcccacggccgtgaacgcgctggtggccggcggcgccaaggccatcatccatgccggcacgggcaacggctcagtggccgaccgcatggtcaagccgctgcaggacgcgcgcgctaagggcgtggtcatcgtgcgttcggcgcgcgtgccctacggcttcgtgctgcgcaacgccgagcagcccgacgacaagcacgactgggtggtggcccacgatctgcgccccgaaaaggcgcgcatcctgaccatgctcgcgctggccaagggcgccagcacgcaggaactgcagcgcatgttctgggagtattga

SEQ ID NO: 41666 - protein, 366 aa, Acidovorax sp. JS42
MSLVAAAITVAGFVGAPTLAHAQDTRATAATQAQPAAAKPRVVVLATGGTIAGAGASAMNSATYTAAKVPVDKLLAGLPELSNVAQVSGEQVFQIASESFTNEHLLKLAQRVSQLAKQGDVDGIVITHGTDTLAETAYFLSLTVRTDKPIALVGSMRPGTALSADGALNLVNAVSVAASKDARGKGVLVTMNDEINTARDVNKDINIQTSAFKSQWGPLGMVVEGKNYWFRAPVKRHTTQSEFDIDSITSLPQVDIVYAYGNVQPTAVNALVAGGAKAIIHAGTGNGSVADRMVKPLQDARAKGVVIVRSARVPYGFVLRNAEQPDDKHDWVVAHDLRPEKARILTMLALAKGASTQELQRMFWEY

SEQ ID NO: 41667 - DNA, 1011 bp, Actinobacillus pleuropneumoniae serovar 1 str. 4074
  CDS (1)..(1011): transl_table=11
atggcaatttcgagtgtgtatgccgcggagttaccgaatatcacaatattggcaaccggcggaacgattgccggcagcggacaaagtgcggtgagttcggcttaccaagcaggacaattgaacattgataccttaattgaagccgtaccggaaatgaagacgttggcaaacattaaaggtgaacaagtagtcaaaatcggttcacaagatatgagtgatgaggtatggctaaaattagcgaaaaccgttaatagtcagtgcgctaatacggacggttttgtcattactcacggcacggatacgatggaagaaaccgcttatttcctcgatatgacggtaaaatgcgataaaccggtggtactggtcggcgcaatgcgtccggcaacggagaaaagtgcggacggcccgctgaatttatataattcaattgtagtagcgaaagataaaaaatcggcaaaacgtggtgtgttagtcgcaatgaatgatgtggtactgggtgcgagagacgtgaccaaaaccagtaccaccgccgtacaaacattcagttcgccgaacttcggtacgctcggctatattcataacagcaaagtcgattacgaacgtgcgccggaaagtaaacatacgttaaataccccgtttacgattgataacctcaatgaactgccgaaagtcggtattatctacgcttattcaaatatgccgaccgagccgcttaaagccttattggatgcgggctatcaagggattgtggttgccggtgtcggtaacggtaatatgaatgcggcgaatttagcgttactggaacaagcggctaaaaacggtgttgcggtggttcgttcttcacgagtgccgaccggctataccactcgtgatgcggaagtggacgattctaaatacggttttgcggcatccggtacgctcaacccgcaaaaagcacgtgtattattacaacttgccttaacccaaaccaaagacattaatacgattcaacaatattttgaagacttctag

SEQ ID NO: 41668 - protein, 336 aa, Actinobacillus pleuropneumoniae serovar 1 str. 4074
MAISSVYAAELPNITILATGGTIAGSGQSAVSSAYQAGQLNIDTLIEAVPEMKTLANIKGEQVVKIGSQDMSDEVWLKLAKTVNSQCANTDGFVITHGTDTMEETAYFLDMTVKCDKPVVLVGAMRPATEKSADGPLNLYNSIVVAKDKKSAKRGVLVAMNDVVLGARDVTKTSTTAVQTFSSPNFGTLGYIHNSKVDYERAPESKHTLNTPFTIDNLNELPKVGIIYAYSNMPTEPLKALLDAGYQGIVVAGVGNGNMNAANLALLEQAAKNGVAVVRSSRVPTGYTTRDAEVDDSKYGFAASGTLNPQKARVLLQLALTQTKDINTIQQYFEDF

SEQ ID NO: 41669 - DNA, 969 bp, Exiguobacterium sibiricum 255-15
  CDS (1)..(969): transl_table=11
atgaaaaaattacttttgattcataccggaggcaccatcgcgatggcgcaaaatcattccggtcacgttttaccgaatgagatcaatcctctggacgcctcgttgccacgtgcgaccgatatcgccgacattacgacgcgtcacttctcgaacctgccgtctccacacatcacaccggaaatcatgttgcggctggctcatttcattaaagaggagttacagaccggtggatatgacggagtcgtcatcacgcacggcacagatacattggaagaaaccgcttattttcttcagctcacaatcggagctcctatcccaatcgtcttgaccggtgccatgcgttcgtctaacgaagtcggatcagacggtgaatttaatttgattaccgccttacgggttgccgtcagtgcggctgctcaagacaaaggcgtcctcgtcgtctttaacggagaaatccactcggcgtttaatgtcacgaaaacccatacttcttcagtcgatacgttcaaatccgtccattttggaaatttagggatggtcacaaaagatcacgtgtacttatttaatactccgcttcttaaaccgactcatatggtgacacaattgagtaaacgtgtcgctgtcttgaaagtctatgccgggatggaaccggacttactgcttgcgatcagcgaactcggatacgacggtctagtgctcgaagttctcggtcaaggaaacgtgccgcctagcctggtcgatgcgatccagtcgttaaccgaacagatgcctgtcgtcatcgtcagccgttgttttaacgggattgtccaggacgtatacggctatacgggaggcggtcaacagttaaaagaactgggcgtgatcttctcgaatggattgaattctcaaaaagcacggttgaagttaatgattgaacttgaaatcggtgccaatcatcatgctttggaagaatctttccgcgtcgaataa

SEQ ID NO: 41670 - protein, 322 aa, Exiguobacterium sibiricum 255-15
MKKLLLIHTGGTIAMAQNHSGHVLPNEINPLDASLPRATDIADITTRHFSNLPSPHITPEIMLRLAHFIKEELQTGGYDGVVITHGTDTLEETAYFLQLTIGAPIPIVLTGAMRSSNEVGSDGEFNLITALRVAVSAAAQDKGVLVVFNGEIHSAFNVTKTHTSSVDTFKSVHFGNLGMVTKDHVYLFNTPLLKPTHMVTQLSKRVAVLKVYAGMEPDLLLAISELGYDGLVLEVLGQGNVPPSLVDAIQSLTEQMPVVIVSRCFNGIVQDVYGYTGGGQQLKELGVIFSNGLNSQKARLKLMIELEIGANHHALEESFRVE

SEQ ID NO: 41671 - DNA, 960 bp, Streptococcus suis 89/1591
  CDS (1)..(960): transl_table=11
atgaaaaaaattctagtactgcatacaggtggaaccatttctatgcaagccaatcatcagggtgaagttgcatcgagtaaaatcaatccaatgacccaaattgatagcccactagaagaaattcaagtgacatccttggattttctcaatgttccaagtccacacattcgcttagaacacatgatgactctataccaaaaaattaaagaagaacaaatgaacttcgatggttttgtcattacacatggcacagatactctagaagaaactgcctatttccttgatacgatggctattccagaaaaaccaattgtattgaccggagccatgcgttcctcaaatgaactaggtagcgacggaatttataactaccgaacagccctacgtgtggctgctgatgataaatccgcagataaaggtgttctagtggtcatgaacgatgaaattcatgctgctaaatatgttacaaaaacgcataccaccaatgtctcaacctttcaaacaccaacccatggaccactgggattagtcaccaaacgagagattctctattttaaaactgctgaaccacgtgttcgatttgacttatcaacagtcacaggaacggtcccaatcataaaagcttatgcagatatggactccattctccttgattctctcactgcaagctcaatttccggtttagtcattgaagcactcggcgccggaaatcttccgcctaccgtccttccagccattaagaaactccttgatcaaaagatacccattattctggtatctcgctgttttaacggaattgctgagcctgtctatgcctaccaaggaggtggcatccaactggagcaagacggcattctatttgttaaagaattgaatgctcaaaaagcccgactcaaactccttatcgctctcaatgcaggcttggaagagcaaagcttggcagattacatccaaggttaa

SEQ ID NO: 41672 - protein, 319 aa, Streptococcus suis 89/1591
MKKILVLHTGGTISMQANHQGEVASSKINPMTQIDSPLEEIQVTSLDFLNVPSPHIRLEHMMTLYQKIKEEQMNFDGFVITHGTDTLEETAYFLDTMAIPEKPIVLTGAMRSSNELGSDGIYNYRTALRVAADDKSADKGVLVVMNDEIHAAKYVTKTHTTNVSTFQTPTHGPLGLVTKREILYFKTAEPRVRFDLSTVTGTVPIIKAYADMDSILLDSLTASSISGLVIEALGAGNLPPTVLPAIKKLLDQKIPIILVSRCFNGIAEPVYAYQGGGIQLEQDGILFVKELNAQKARLKLLIALNAGLEEQSLADYIQG

SEQ ID NO: 41673 - DNA, 981 bp, Erythrobacter sp. NAP1
  CDS (1)..(981): transl_table=11
atgacgaacactagaatccttgtcctcgggaccggaggtacaattgcaggtatcgctggcgacgcgatgcggcacgactatcagcccgggcagatcgggattgacgaatggcttgaggatgcggggcgctatactctcgatgtcgattttgtcggtcgccagatcgccaatgtcgggtctgagaacatggggcctcagatatggaaggttcttcacgaagtgatctgcgaggcgatggaggatgacgcgctcgacgggatcatcgtcacccacggaaccgataccgctgaggaaaccgcctttctgctcgatctgacgctgccattgacgaagccagttgtactggtcggagcgatgcgacctgcggatgcggtgggcagcgacgggatgcgcaatttcgtgaatgccgtgcgcgtggcgagtgccgagagctcgaaaggacgcggcgtgctgctggtcatgggtgatcgtgtgctggcggcacgcgatgcgcgaaaggtgcgcacccgcggcaccgacgatgcgtttcgcggcttcccgcgcggatctgttgcgatcgtgacgccaagcgcgctcgaatggttcggcaatccttggagggacgatcctagcccacgtttcgcgtttccaagcgagtttcctgaagtgccgatcctctacgccgctggagggatcaggccgagcatggcagggcgcctgcttgaagacgcgcaaggggtggtcgtcgccggagtgggtgagggcaacatgcccgaagcggtgcgcgccatgctggcaaagcgtgccgctaatggtcttctggtcatccgcgcgagccgggtcgacgaaggtctggtcgaccgcgagccagaggacgatgcgaaccgcttcgtcgcctcacgcgcgctcaacccgcagaagtcgcggatactggcgatggttctgctggcaaatggcgtcaccgatcctgcaaaagttcaggcggtgttcgaccggccttga

SEQ ID NO: 41674 - protein, 326 aa, Erythrobacter sp. NAP1
MTNTRILVLGTGGTIAGIAGDAMRHDYQPGQIGIDEWLEDAGRYTLDVDFVGRQIANVGSENMGPQIWKVLHEVICEAMEDDALDGIIVTHGTDTAEETAFLLDLTLPLTKPVVLVGAMRPADAVGSDGMRNFVNAVRVASAESSKGRGVLLVMGDRVLAARDARKVRTRGTDDAFRGFPRGSVAIVTPSALEWFGNPWRDDPSPRFAFPSEFPEVPILYAAGGIRPSMAGRLLEDAQGVVVAGVGEGNMPEAVRAMLAKRAANGLLVIRASRVDEGLVDREPEDDANRFVASRALNPQKSRILAMVLLANGVTDPAKVQAVFDRP

SEQ ID NO: 41675 - DNA, 1056 bp, Synechococcus sp. RS9917
  CDS (1)..(1056): transl_table=11
atgaacgagcgctccctccagtcccagccgcggcttctggtgctctgcaccggtggcaccatcgctggtgcgggggtctccagttgcgatctcgagacctacagcgctggcgtgcgcagcggcgaacagttgttggcagctcttccggaagcccgtgccgtggcggcgctcacggtggagcagatcgccaatatcgacagcgccgacatgagccattcactctggttccggttgctgcaacggatcgatgccgccttcagggccgatccagacctcacgggtgtggtgatcacccatggcaccaacaccctggaggaaaccgcctactggttgcatctcgccctggcccatgcgcgaccggtggtgctggtgggggcgatgcgaccggccacggccctcagtgcggatggccctctgaatctgttgcaggcgcttcagctggcggtggatccgcaggcggcgggccggggtgtgctggtggtgatggatggtgtgatccatggcgcgcgggaggtgaccaaagcggcctgcgccggcgtcggtgccttccgctcgccaggtcatggtcgcctcggcacggtcgatggtgagggggtgcgcttcacccgcacacccagccatcggcacaccgtggcgtcgaccttggctgttcgtggcgccagcctcaaggcctggcccgaggtgaaggcctggccttcggtggagatcctctacggctacgtgcagccttccgccacctggctcgcctgttggctgcaaagcggtgttgatgccctggttgtggccggaacgggggctggtcagctgtcctgtttcgagcgcgatgccctggaggaggcctgtcgccagcggcagcaggccggccaggcgactccgctgatcgtgaggtcctcacgcacggggaacggtcgggtgccagcccgcaaggacgatgcctcgctcggattgttagccgcagacgacctaagcccccagaaggccagggtgttggtgttgctggctctgttgcaggggatcgatcgcggtcggatcgctgagctgttgctgacgcactga

SEQ ID NO: 41676 - protein, 351 aa, Synechococcus sp. RS9917
MNERSLQSQPRLLVLCTGGTIAGAGVSSCDLETYSAGVRSGEQLLAALPEARAVAALTVEQIANIDSADMSHSLWFRLLQRIDAAFRADPDLTGVVITHGTNTLEETAYWLHLALAHARPVVLVGAMRPATALSADGPLNLLQALQLAVDPQAAGRGVLVVMDGVIHGAREVTKAACAGVGAFRSPGHGRLGTVDGEGVRFTRTPSHRHTVASTLAVRGASLKAWPEVKAWPSVEILYGYVQPSATWLACWLQSGVDALVVAGTGAGQLSCFERDALEEACRQRQQAGQATPLIVRSSRTGNGRVPARKDDASLGLLAADDLSPQKARVLVLLALLQGIDRGRIAELLLTH

SEQ ID NO: 41677 - DNA, 996 bp, Synechococcus sp. WH 7805
  CDS (1)..(996): transl_table=11
gtgactgggcccagcatcccacgccttctgctgctcggcaccggtggcaccatcgccggtacggctcctgagtccacccagctgaatcgttacgccgcgggggtgatcggtgctgaggcgttgttgacaactctgcctcagttgaatcggctcgccgagatccaggtggagcagatcaccaatgtcgacagcgctgaccttggcttcaaccactggcgcgatctggtgagtcgtctgaggcagatcctggctgaggatccaggtttggttggcgtggtgatcacccatggcaccaacacgcttgaagaaaccgcctggttgctgcagcttcttattgatgatccccggccggtggttttggtgggagcgatgcggcctgcgtccgctctcagtgccgatggccccctcaacctctaccaggccgtgcaggtggcctgcagtgctgattctcgcggtcgcggcgtgatggtggtgatggatggccagatccacagtgcccgtgatgttgcgaaacgcgccacgcagggagtcggtgcttttcacagtgcaacacgaggccccctgggttgggtcgatgatttcggtgttcatctgtctggagtggaacggagcgcgtcggttccttttgctggtctgtcgcttccgacgatctggcctcaggtggtgatcctgcacggatgcgtgcaaccgtctgaagcgttgattccagcgttgctgtcggctggggtggagggcctggtgtttaccgggaccggcgctgggcaattgtcagcagtcgaacggaacgcgcttgcgcaatggcagggtcctcggcctctcatgcttcgtgcgaaccgttgcgggatggggcctgtgcaccgctgtgaggatcacgcgcggcttggtctgctgccagcgggtgatctcagtccccagaaagcgcgggtgctgctactgctggcgctgatcaacggggatgaccggaacacgctggcttctcgactcatggttgtttga

SEQ ID NO: 41678 - protein, 331 aa, Synechococcus sp. WH 7805
MTGPSIPRLLLLGTGGTIAGTAPESTQLNRYAAGVIGAEALLTTLPQLNRLAEIQVEQITNVDSADLGFNHWRDLVSRLRQILAEDPGLVGVVITHGTNTLEETAWLLQLLIDDPRPVVLVGAMRPASALSADGPLNLYQAVQVACSADSRGRGVMVVMDGQIHSARDVAKRATQGVGAFHSATRGPLGWVDDFGVHLSGVERSASVPFAGLSLPTIWPQVVILHGCVQPSEALIPALLSAGVEGLVFTGTGAGQLSAVERNALAQWQGPRPLMLRANRCGMGPVHRCEDHARLGLLPAGDLSPQKARVLLLLALINGDDRNTLASRLMVV

SEQ ID NO: 41679 - DNA, 1068 bp, Photobacterium sp. SKA34
  CDS (1)..(1068): transl_table=11
atgaaaaagaatttaatttgcttaggtatcttggttgctggtttaagttttcaatcatcctcttttgctcaaggcacagaactaccgaatattaagatattagcaacgggaggaacaatagccggtgcaggtcaatcagcaacgggcagtgcgtatacttcaggacaagtcggtattgatgcccttattaatgctgtacctgaaatggcaaaaattgcagatattagtggtgagcaagttgctaatattggttcgcaagacatgaacgataaggtatggctgacgttagctaaacgtgtcaatgaactcttggcgaaagatgatgttgacggtattgttattacacatggtactgacaccatggaagagacagcatacttcttaaacttaacagtgaaaagtgataagcctgttgtattagtaggggcaatgcgaccatcaaccgctatgagtgcagatggacctgttaacttatacaacgctgtgatcaccgcagctgacactgactcaaaaggtcgtggtgttttaatggctatgaatgatgtgattttggatgcgagagatgtcactaagaccaatacgacagctgttgatacatttaaatcacctaattttggtgagttaggctatatccataatggcgatgctgtgtatcaacgcagccctgagcgtcataatacgaaagattctaagtttgatatatcggaagtgaaagccttacctaaagttgggatcgtttataattattctaacgcttcagacttaccagtgaaggcgctgatcgatgcaaaatttgatggtatcgtgagtgctggtgtaggcaatggtaatatctataaaggtattttcgaacaactcgccaaagcaagtaaagacgggattatggtcgttcgtagttctcgtgtgcctactggcgcgacaacacttgcagcagagatcgatgacagtaaatatggttttgttgcatccggaaccttaaacccccaaaaagcccgtattttattgatgctctctttaacgcaaacaaagaattatcgtgatgtacaaaagatgtttcagtattactaa

SEQ ID NO: 41680 - protein, 355 aa, Photobacterium sp. SKA34
MKKNLICLGILVAGLSFQSSSFAQGTELPNIKILATGGTIAGAGQSATGSAYTSGQVGIDALINAVPEMAKIADISGEQVANIGSQDMNDKVWLTLAKRVNELLAKDDVDGIVITHGTDTMEETAYFLNLTVKSDKPVVLVGAMRPSTAMSADGPVNLYNAVITAADTDSKGRGVLMAMNDVILDARDVTKTNTTAVDTFKSPNFGELGYIHNGDAVYQRSPERHNTKDSKFDISEVKALPKVGIVYNYSNASDLPVKALIDAKFDGIVSAGVGNGNIYKGIFEQLAKASKDGIMVVRSSRVPTGATTLAAEIDDSKYGFVASGTLNPQKARILLMLSLTQTKNYRDVQKMFQYY

SEQ ID NO: 41681 - DNA, 984 bp, Desulfitobacterium hafniense DCB-2
  CDS (1)..(984): transl_table=11
atgcagaagattaaactgattgccaccggggggacgattgccatgcgcaaggactcctttggcaagaccgtgccggcggttaccggacatgatcttttagaaagtataccggaattgcaggaatcagccttttggaatgtggaagaattcagcaatgtcgccagctgtaattttaatccggagcggatgcttcagttggcacggcgtgtggaagaggctttcgccgatcccgactgcatggggatcatcatcacccacggaacggataccttggaggaaacggcttattttctggagcttacagtcaaagacagccggccggtcatattgacagcctcccaaagagatgcttcagagagagattctgacggcccccgaaatttacataactccatgcgcattgccatggatccccacgctaaggaacgaggggtgttgatcgctctcaatgaagagattcatgccgccagggatgtgcggaaattacacaccagccacgtggatgcttttagttccggcgaagtaggttcattaggaagcattgaccatgacgaggtgttatggcatcgcaaacctgagccctcgataaaatttgacctccctgaaaaactggccaaggtcatgatctgcaaaggctataccggcatggatggaagaatgctggaatgtatggtggatgctcaagtggagggaatagtcatcgaggcctttggccggggaaatctccccccggaggttgttccttcgatagggaagattacggcggaaaatatacccgtggtcattacgtcacgttgtttatttggacgaactgctcctatttacggctatcccggcggcggagcagagcttcaacgccggggggcactttttgccggagatctttctacagagaaggttcgtttgctcctgagtattgccctggggcagaacgtttcccacacccggcttaaagagattttgagtcgtggcggagtaaagtag

SEQ ID NO: 41682 - protein, 327 aa, Desulfitobacterium hafniense DCB-2
MQKIKLIATGGTIAMRKDSFGKTVPAVTGHDLLESIPELQESAFWNVEEFSNVASCNFNPERMLQLARRVEEAFADPDCMGIIITHGTDTLEETAYFLELTVKDSRPVILTASQRDASERDSDGPRNLHNSMRIAMDPHAKERGVLIALNEEIHAARDVRKLHTSHVDAFSSGEVGSLGSIDHDEVLWHRKPEPSIKFDLPEKLAKVMICKGYTGMDGRMLECMVDAQVEGIVIEAFGRGNLPPEVVPSIGKITAENIPVVITSRCLFGRTAPIYGYPGGGAELQRRGALFAGDLSTEKVRLLLSIALGQNVSHTRLKEILSRGGVK

SEQ ID NO: 41683 - DNA, 1017 bp, Synechococcus sp. RS9916
  CDS (1)..(1017): transl_table=11
atgggggagcctgcggtgcagcggcctgcgctgctgttgctcagcacgggaggcacgattgccggctccggggcgaccagcacccaggtcaatacctatgccgctggcgccctcagcggtgatgccctgttggcggcggtgcccgaattgcagcagctggcgacgatccgggtggaggccatcgccagcgtcgatagtgccgacctgcagttcgcccattggcgcctgttggtggcacggattcgtgaggcgtttcagacgcaacctgacctcgccggggtggtgattacccatggcaccaacaccctggaggaaaccgcctggttgcttcagctcttgatcgatgaccccaggccggtggtgctggtgggggcgatgcgaccggccaccgccctcagcgccgatgggccgttgaacctctaccaggcggttgaggtggcgatcgatccgcaagcacgcgggcgcggcgtgcttgcggtactcgatggcgagatccatggggcccgtgccgtgaccaaggtcgccacccagggggtgggcgccttccgcagcactggggcgggcccgttggggtgggtggatgatgccggcgtgcactggccggctgcggcaggggcgccgatggtgcccttcgctgccctcccgctctcatcaatgtggccccaggtggcgatcctgcatggctgcgtggagcctccagcggcgctgatccctgcgctgctccaggccggtgtgcagggattggtcttcaccggcaccggtgcaggccagctgtcggcggtggaacgcaccgccatcgaccagtggaatggccctttgccattgatgctccgcgccaatcgctgtggttccgggccggtgcatcgctgcgccgaccatgcccgtttagggctgttgccggcgggtactctcagccctcagaaggcccgtgtcctgctgctgttggcgctgatcgccggctacacccgcgctgatctggagggtgaactccaacgcctgggtttgatggcggtctga

SEQ ID NO: 41684 - protein, 338 aa, Synechococcus sp. RS9916
MGEPAVQRPALLLLSTGGTIAGSGATSTQVNTYAAGALSGDALLAAVPELQQLATIRVEAIASVDSADLQFAHWRLLVARIREAFQTQPDLAGVVITHGTNTLEETAWLLQLLIDDPRPVVLVGAMRPATALSADGPLNLYQAVEVAIDPQARGRGVLAVLDGEIHGARAVTKVATQGVGAFRSTGAGPLGWVDDAGVHWPAAAGAPMVPFAALPLSSMWPQVAILHGCVEPPAALIPALLQAGVQGLVFTGTGAGQLSAVERTAIDQWNGPLPLMLRANRCGSGPVHRCADHARLGLLPAGTLSPQKARVLLLLALIAGYTRADLEGELQRLGLMAV

SEQ ID NO: 41685 - DNA, 1065 bp, Vibrio sp. Ex25
  CDS (1)..(1065): transl_table=11
atgacgaaaaatcttttccgcctcagtacgataactctcggtttatgcatcagttcgttctcttttgcgcaatccgatcttccgaacattaaaattcttgccactggcggcaccatagcaggcgcaggtcaatctgcgacagagtcaaactacaccgcaggtaaagtcggtgtcgaatcattgatttctgcggtacctagcatgaccaacattgccgatatttctggagagcaagtggtcagtatcggttcacaagatatgaatgatgaggtatggcttaaattagccaaacgcgtcaacgaactgctcgctcaagatgatgttgacggtatcgtcatcacgcatggtaccgatacgttagaagaaaccgcttacttccttgatctgaccgtcaagagcaaaaaaccagtcgtgattgtcggtgcaatgcgtccttccaccgcaatgagtgctgatggcccagttaatttatacaacgccgtcgtgacagccaccgatgaagattctgaagggcgcggcgtgttagtcgcgatgaatgacactatattcgatgcgcgagacgtaactaaaacaaacaccacttccgtcagtactttccagtcacctaactttggccctatcggttacattcataatagcgatgccaaatatcaacgaagcccagagcgtaaacacaccacagaaacaccattcgatgtatcaaaactcaacacactacctaaagtcggcattgtttataactatgcaaatgcgtcgagcttaccagtcaaagcctttgttgatgccaaatttgacggtattgtaagtgctggtgtgggtaatggtaacttgtaccacacggtctttgatgagctagaaaaagcgagcaaagatggcgttgttgtcgtaagaagctctcgcacaccaaccggttcaaccactttggatgctgaaattgatgacgacaaatatggctttgttgcctcaggcacactaaacccacaaaaagcacgtatcttactgatgctgtcacttactcaaaccaaaaactatcaagacatccaaaagatgttccaatactattaa

SEQ ID NO: 41686 - protein, 354 aa, Vibrio sp. Ex25
MTKNLFRLSTITLGLCISSFSFAQSDLPNIKILATGGTIAGAGQSATESNYTAGKVGVESLISAVPSMTNIADISGEQVVSIGSQDMNDEVWLKLAKRVNELLAQDDVDGIVITHGTDTLEETAYFLDLTVKSKKPVVIVGAMRPSTAMSADGPVNLYNAVVTATDEDSEGRGVLVAMNDTIFDARDVTKTNTTSVSTFQSPNFGPIGYIHNSDAKYQRSPERKHTTETPFDVSKLNTLPKVGIVYNYANASSLPVKAFVDAKFDGIVSAGVGNGNLYHTVFDELEKASKDGVVVVRSSRTPTGSTTLDAEIDDDKYGFVASGTLNPQKARILLMLSLTQTKNYQDIQKMFQYY

SEQ ID NO: 41687 - DNA, 990 bp, Pseudomonas putida GB-1
  CDS (1)..(990): transl_table=11
atgattgagcattcaagcctgcccaggctgtcgatcgccagcttagggggcactgtcagtatgcaggccggggctgctgggtgtggcgtggccccagccctggattgtgagcagcaactgctgcaagtcccacagttgcgcgaaatggcgcagttgaacgttgcttcattatccctgctccccagtgcatcgctgggcttcgtggcgttgttggatttgctggtctgggcccgcagcgaggtagagcgcggtgcccaggccgtgatcctgacccaaggcactgacagccttgaggaaacggcctatttccttgatctgctctggccattcgatgcaccgttggtgatgaccggtgccatgcgctcggccagccaggtgggcaacgatggcccggccaacctgctggctgcggcacaggttgcattggcacaaggcagccgtgggcgtggtgtactggtggtgatgaatgatcaggtccattgcgcggcaagggttcgcaagatggccagcctggcgatggcggctttcgagtcaccaggcttcggcccttcggcggaagttgtagagggtgttgtggtctatcgccatccgccaggtcgtcgggctgtgctgccgttaccgggccgaaccgaccagcgcgttgcccttctggaggcttgtctggatgtggacacagcgctgctgcaggctgtggctccattgggctatgaagggctggtcattgctggtttcggtgctgggcacgtttccggtacttggtccgatgtgctggagcatctggcgcccaccttgccggtcattgtagccacccgcacaggtagaggccctacagcccggacaacatacgggtttgcaggctccgagatcgacctgcagcgcaaaggcgtgcaaatggccgggcacctctgcccgcgcaagtgccgcatcttgctttggctgctgattggcaccgaacggcagcatgagttgcagggctggttggccatctga

SEQ ID NO: 41688 - protein, 329 aa, Pseudomonas putida GB-1
MIEHSSLPRLSIASLGGTVSMQAGAAGCGVAPALDCEQQLLQVPQLREMAQLNVASLSLLPSASLGFVALLDLLVWARSEVERGAQAVILTQGTDSLEETAYFLDLLWPFDAPLVMTGAMRSASQVGNDGPANLLAAAQVALAQGSRGRGVLVVMNDQVHCAARVRKMASLAMAAFESPGFGPSAEVVEGVVVYRHPPGRRAVLPLPGRTDQRVALLEACLDVDTALLQAVAPLGYEGLVIAGFGAGHVSGTWSDVLEHLAPTLPVIVATRTGRGPTARTTYGFAGSEIDLQRKGVQMAGHLCPRKCRILLWLLIGTERQHELQGWLAI

SEQ ID NO: 41689 - DNA, 1089 bp, Pseudomonas putida GB-1
  CDS (1)..(1089): transl_table=11
atgaatgccgcactgaaaaccttcgcccccagcgcactcgcgctgctgctgatcctgccagccaccgcctcggccaaagaagccgaaacccagcagaagctggccaacgtggtcatcctcgccaccggcggcaccattgccggcgccggtgccagcgccgccaacagcgcgacctaccaggctgccaagctgggcgtcgacaaactcatcgccggcgtgccggagcttgcagacatcgccaacgtgcgcggtgagcaagtgatgcagatcgcgtctgaaagcatcagcaacgacgacctgctaaagctgggcaaacgcgtcgccgagctggccgaaagcaaggacgtcgacggaatcgtcatcacccacggcaccgacaccctggaagaaaccgcctacttcctcactctggtggaaaagaccgacaagccaatcgtggtggtcggctcgatgcgcccaggtaccgccatgtccgctgacggcatgctcaacctgtataacgccgtggccgtggccagcgacaagcagtcgcgtggcaagggcgtgctggtgaccatgaacgacgagatccagtccgggcgtgacgtgagcaagtcggtcaacatcaaaaccgaagcgttcaagagcgcctggggccccatgggcatggtagtggaaggcaagtcctactggttccgcctgccggccaagcgccatacggtcaattccgagttcgatatcaagcagatcagcagcctgccccaggtggacattgcctatggctatggcaacgtcaccgacactgcctacaaggcactggcgcaaaacggtgccaaggcgctgattcatgccggcaccggcaacggttcggtatcgtcgcgggtggtgccggcgctgcaagagctgcgcaagaacggcgtgcagatcatccgttcgtctcacgtcaaccagggtggcttcgtgctgcgcaacgccgaacagccggacgacaagaacgactgggtggtggcccacgacctgaacccgcaaaaggcgcgaattctggcgatggtagcgatgaccaagacccaggacagcaaggaactgcagcgaatcttctgggagtattga

SEQ ID NO: 41690 - protein, 362 aa, Pseudomonas putida GB-1
MNAALKTFAPSALALLLILPATASAKEAETQQKLANVVILATGGTIAGAGASAANSATYQAAKLGVDKLIAGVPELADIANVRGEQVMQIASESISNDDLLKLGKRVAELAESKDVDGIVITHGTDTLEETAYFLTLVEKTDKPIVVVGSMRPGTAMSADGMLNLYNAVAVASDKQSRGKGVLVTMNDEIQSGRDVSKSVNIKTEAFKSAWGPMGMVVEGKSYWFRLPAKRHTVNSEFDIKQISSLPQVDIAYGYGNVTDTAYKALAQNGAKALIHAGTGNGSVSSRVVPALQELRKNGVQIIRSSHVNQGGFVLRNAEQPDDKNDWVVAHDLNPQKARILAMVAMTKTQDSKELQRIFWEY

SEQ ID NO: 41691 - DNA, 1071 bp, Herbaspirillum seropedicae
  CDS (1)..(1071): transl_table=11
atgcagcaggcacaattcaagaaaatcggcgctgtgatgatcctctcgctggcctgcgccttctcggcgcaagcacaggacaagaagcccaacgtcgtcgtcatcggcaccggcggcaccatcgctggcgccggcgcgtccagcgtcaacaccgccgcctatcaatcggccgtggtgccggtggacaagatcatcgcggccgtgcccgagatcagcaagatcgccaacgtgcgcggcgaacagatcttccagatcggcagcgaaagcttcaatgacgaacgcctgatcaagctgggcaagcgcgtctccgaactgttgaagcagaacgacgtggacggcatcgtcatcacccacggcaccgacaccatcgaagagacggcctatttcctgaacctggtcttgaagagcgacaagccggtggtggtggtcggctccatgcgtccgggcaccgcgctgggcgcggatggcgcgctgaacctgtatgacgccgtgctggtggccggcagcaaggaagccgctggcaagggcaccctggtggtgatgaatgacgagatccattccggccgcgacgtcaccaagagcaataccttcaaggtcgagaccttccgttcgccctatggcccgctgggctatgtggtggaaaacaagctgagcttctaccgcctgccggcgcgtccgcacaccacgcagaccgagttcgacatcgacaagatcagcagcctgccgcgcgtggacatcgtctacaactacggcaacgtcagccgcactgcctatgacgccttcgtggccgcgggcgccaaggccatcatccatgacggcaccggcaacggcagcgtggccgagcagatcgtgccggtgctgcaggaagtgcgcagcaagggcgtgcaggtgatccgcgcctcgcgcaccggcagcggcgtggtcatccgcaatggcgagcagcctgatgacaagttcgactgggtcgtgaccgacgaccagaatgcccagaaggcgcgcatcctggctgaactggcgctgaccaagaccaatgatcccaaggaactgcagaagatcatgtggaagtattga

SEQ ID NO: 41692 - protein, 356 aa, Herbaspirillum seropedicae
MQQAQFKKIGAVMILSLACAFSAQAQDKKPNVVVIGTGGTIAGAGASSVNTAAYQSAVVPVDKIIAAVPEISKIANVRGEQIFQIGSESFNDERLIKLGKRVSELLKQNDVDGIVITHGTDTIEETAYFLNLVLKSDKPVVVVGSMRPGTALGADGALNLYDAVLVAGSKEAAGKGTLVVMNDEIHSGRDVTKSNTFKVETFRSPYGPLGYVVENKLSFYRLPARPHTTQTEFDIDKISSLPRVDIVYNYGNVSRTAYDAFVAAGAKAIIHDGTGNGSVAEQIVPVLQEVRSKGVQVIRASRTGSGVVIRNGEQPDDKFDWVVTDDQNAQKARILAELALTKTNDPKELQKIMWKY

SEQ ID NO: 41693 - DNA, 1215 bp, Ostreococcus tauri
  CDS (1)..(1215)
atggacgcccccgaaaaagtggactccgccgtcggtctcgccccgggcgccatcccgcgccctgaatccgtcgaaaacttgcgtcgacagcggtcgctcggattactccctggaccaaccaaggatgcgcgccccgagctcgcgccccggccgcgcgtgctgatgtttcactgcggtggaacgctcggcatgggcgccgagtcgttcgccgaggacgagcggtgcgcgtcgcctcgaccggttccgatgcgagggggtgggaagtaccgggcgctgggctcgaacaagttcctattggacgtactcgacgtggtgccggaattaacgtcattggcggacatcgaggtggtggtactgatgaataaggactcgagtgagatggacgcgagggattggaaagcgctgggactggcgttgcacgaaaagcgcgagagttacggggggttcatcatcgcgcacggtacggatacgatggcgtacacagcgagcgcgttgagtttgatgctcgaggggttcgggaagccgatcgtgttgacgggatcgcagttaccgctcgcgtacccgaggagtgatgcgaggcaaaatttattggacgcgctcacgtgcatcgtgggatcgaagagttgcggaggggtggttgatttttacgaagtcgctatttgtttcaacgggaaacttctgcgagggaatcgcgcgcaaaagacaagcgcaacggtgtacgcggcgttttcgagcccgtcgtatccagctctcgcgcgtttgggcgtcggcgtggattggaaccacgcgagattgctcccgcgtcaggagcagtacacgcctcgattcgatgtcaatccgaatgtcatcagagtgccggtgattcctgggctcgacatcgcggcggcgtacggcgacgtctacgaaagaggcgttcgaggcattgtcttagaagcgttcggtgtcggtaactttccctcatccctcatcccctggctcacagagcaaacggcaaagggtcttcgtgtccacctctcaacgcagtgtcagagcggcgagctcagaccagagctctacgccgccggtctcggcgccctcgccgtgggcgcaagatcgggaccagtgatgactatagagtgctccgtggtgaagatgatgctctgcctcgccaatcccggtttcgatctggaccgctccgtcgcgggcgaaaccgatacggtcgatttttgcatatga

SEQ ID NO: 41694 - protein, 404 aa, Ostreococcus tauri
MDAPEKVDSAVGLAPGAIPRPESVENLRRQRSLGLLPGPTKDARPELAPRPRVLMFHCGGTLGMGAESFAEDERCASPRPVPMRGGGKYRALGSNKFLLDVLDVVPELTSLADIEVVVLMNKDSSEMDARDWKALGLALHEKRESYGGFIIAHGTDTMAYTASALSLMLEGFGKPIVLTGSQLPLAYPRSDARQNLLDALTCIVGSKSCGGVVDFYEVAICFNGKLLRGNRAQKTSATVYAAFSSPSYPALARLGVGVDWNHARLLPRQEQYTPRFDVNPNVIRVPVIPGLDIAAAYGDVYERGVRGIVLEAFGVGNFPSSLIPWLTEQTAKGLRVHLSTQCQSGELRPELYAAGLGALAVGARSGPVMTIECSVVKMMLCLANPGFDLDRSVAGETDTVDFCI

SEQ ID NO: 41695 - DNA, 1137 bp, Aspergillus oryzae
  CDS (1)..(1137)
atgggtgtcaatttcaaagttcttgccctgtcggccttagctactattagccatgcttcgcctctcctatatcctcgagccacagactcgaacgtcacctatgtgttcaccaaccccaatggcctgaactttactcagatgaacaccaccctgccaaacgtcactatcttcgcgacaggcggcacaatcgcgggctccagcgccgacaacaccgcaacaacaggttacaaagccggtgcagtcggcatccagacactgatcgacgcggtcccggaaatgctaaacgttgccaacgtcgctggcgtgcaagtaaccaatgtcggcagcccagacatcacctccgacattctcctgcgtctctccaaacagatcaacgaggtggtctgcaacgaccccaccatggccggtgcagtggtcacccacggcaccgacacgctcgaagaatccgccttcttcctcgacgccacggtcaactgtcgcaagcccgtggtcatcgtcggcgccatgcgcccttcaaccgccatctcggctgacggccccctcaacctcctgcaatccgtcaccgtcgccacgagccccaaggcccgagaccgcggcgccctgattgtcatgaacgaccgcatcgtatccgccttctacgcctccaagacgaacgccaacaccgtcgatacattcaaggccatcgaaatgggtaacctgggcgaggtcgtctccaacaaaccctacttcttctaccccccagtcaagccaacaggcaagacggaagtagatatccggaacatcacctccatccccagagtcgacatcctctactcatacgaagacatgcacaatgacaccctttactccgccatcgacaacggcgcaaagggcatcgttatcgccggctccggctccggctccgtctccacccccttcagcgccgccatggaagacatcacaaccaaacacaacatccccatcgtagccagcacgcgcaccggaaacggggaggtgccgtcctccgccgagtcgagccagatcgcaagcgggtatttgaaccccgcaaagtcacgcgttttgcttggcttgttgcttgcccaggggaagagtattgaggaaatgagggcggtttttgagcggattggggttgcttga

SEQ ID NO: 41696 - protein, 378 aa, Aspergillus oryzae
MGVNFKVLALSALATISHASPLLYPRATDSNVTYVFTNPNGLNFTQMNTTLPNVTIFATGGTIAGSSADNTATTGYKAGAVGIQTLIDAVPEMLNVANVAGVQVTNVGSPDITSDILLRLSKQINEVVCNDPTMAGAVVTHGTDTLEESAFFLDATVNCRKPVVIVGAMRPSTAISADGPLNLLQSVTVATSPKARDRGALIVMNDRIVSAFYASKTNANTVDTFKAIEMGNLGEVVSNKPYFFYPPVKPTGKTEVDIRNITSIPRVDILYSYEDMHNDTLYSAIDNGAKGIVIAGSGSGSVSTPFSAAMEDITTKHNIPIVASTRTGNGEVPSSAESSQIASGYLNPAKSRVLLGLLLAQGKSIEEMRAVFERIGVA

SEQ ID NO: 41697 - DNA, 1047 bp, Erwinia chrysanthemi
  CDS (1)..(1047): transl_table=11
atggaacgatggtttaaatctctgtttattattgctttcttctttatttctacggccaatgcggcagataagctgccaaacatcgtcattctggcgaccggcggtactattgccggctcggcggcgacgggtacccagactaccggttacaaggccggcgcgcttggcgtggatacgctgatcaacgccgtgcccgaggtgaaaaaactggctaacgtaaaaggcgagcaattcgccaacatggccagcgaaaacatgaccggcgatgtggtgctgaaactgagccagcgcgtgaatgcgctgctggcgcgtgacgatgtggacggcgtggtgattacccacggtacggacacgctggaggagtcggcctatttcctccacctgacggtgaaaagcgacaagccggtagtgtttgcggcggcgatgcgcccggccacggccattagcgccgacggcccgatgaacctgctggaagcggttcgcgtggcgagcgacaaacagtctcgcggccgcggcgtgctggtagtgctcaacgaccgtatcggttccgcccgttatatcaccaagagcaatgcctcgacgctggacagtttccgggcgaatgaagaaggttatctgggcgtggtgatcggtaaccatatctattaccagaatcgcctcgacaaactgcataccaaccgttcggtattcgatgtgcgcggcctggcctcgctgccgaaagtcgatattctttatgggtatcaagatgactcggaatacctgtacgacgccgccatcagccacggcgtgaaaggcatcgtttatgccggtatgggcgcgggttcggtatcggtgcgcggcatagccggaatgcgcaaggcgcaggataaaggcgtggtggtgatgcgctcttcccgcaccggcaacggcatcgtgccgccggatgaagcgctgccgggcctggtcgcggattcgctcaacccggcgcatgcccgaatcctgttgatgctggcattgacccgcaccagcgatccggcggtgatccaggactatttccacacctattga

SEQ ID NO: 41698 - protein, 348 aa, Erwinia chrysanthemi
MERWFKSLFIIAFFFISTANAADKLPNIVILATGGTIAGSAATGTQTTGYKAGALGVDTLINAVPEVKKLANVKGEQFANMASENMTGDVVLKLSQRVNALLARDDVDGVVITHGTDTLEESAYFLHLTVKSDKPVVFAAAMRPATAISADGPMNLLEAVRVASDKQSRGRGVLVVLNDRIGSARYITKSNASTLDSFRANEEGYLGVVIGNHIYYQNRLDKLHTNRSVFDVRGLASLPKVDILYGYQDDSEYLYDAAISHGVKGIVYAGMGAGSVSVRGIAGMRKAQDKGVVVMRSSRTGNGIVPPDEALPGLVADSLNPAHARILLMLALTRTSDPAVIQDYFHTY

SEQ ID NO: 41699 - DNA, 1083 bp, Schizosaccharomyces pombe
  CDS (1)..(1083)
atgtggagatcaataatcagttttctattcttttctgtggcattatgtcagccatttttgtttcagaagcgctcttctaatatttcggacttcatttcatttaacgcctcacttcccaatgttacgatttttgcaatgggaggaactatcgctggatatgcttcatccagcactgaaacagttgactatgccgctggctctgtaggaatagcaacactggttgatgcagttcctgctatcaagaacttttcaaacattcgtggagtccaagttactaatgttggcagtgaagaactgacacctgctaacgttttgaatcttactcagttgattctagccgaagttgccaaacccgatgttcatggtattgttgttacacatggtacagattcacttgaagaaaccgcgatgtttttggacatgactgtcaatactacaaagcccattgtagttgttggagcaatgagaccttctactgcaattagcgctgatggccctatgaacttgttaaatgctgtagtggtagcggcctctaatcgatctattggtcgcggtactatgatcttattaaatgatcgtattggatctgccttttatactacaaagacaaatggaaatatgcttgataccttcaagtcatatgaggcaggattccttggtatgattcttgatcaaagaccacatttcttctatagccctgctacaccaactggtaaagttcattttgacgttagcaacactactgaattaccagcagttgaaattttgtatggatatcagggactgaatcctaacttggcaaaggctgcagtagatctgggagccaaaggtttagtcttagctggcatgggtgcagcttcctggacggatcctggtaatgaagtgattgatggattgattagtaaccaaagtattccggttgtgtacagccacagaacaatggatggattttctgactattattacaacggaattccttcttatttccaaaatccgcaaaaagctagatatatgcttatgctttccatcaacgctggctattccattcaaaacattactgatatattcagccttgagtattag

SEQ ID NO: 41700 - protein, 360 aa, Schizosaccharomyces pombe
MWRSIISFLFFSVALCQPFLFQKRSSNISDFISFNASLPNVTIFAMGGTIAGYASSSTETVDYAAGSVGIATLVDAVPAIKNFSNIRGVQVTNVGSEELTPANVLNLTQLILAEVAKPDVHGIVVTHGTDSLEETAMFLDMTVNTTKPIVVVGAMRPSTAISADGPMNLLNAVVVAASNRSIGRGTMILLNDRIGSAFYTTKTNGNMLDTFKSYEAGFLGMILDQRPHFFYSPATPTGKVHFDVSNTTELPAVEILYGYQGLNPNLAKAAVDLGAKGLVLAGMGAASWTDPGNEVIDGLISNQSIPVVYSHRTMDGFSDYYYNGIPSYFQNPQKARYMLMLSINAGYSIQNITDIFSLEY

SEQ ID NO: 41701 - DNA, 1452 bp, Saccharomyces cerevisiae
  CDS (189)..(1334)
ttcctaaactcacttctttcctccctatctgctttgtttattacagttgaagctacttgtgccgttcgtgtgaaaaaatactcgatgaaaaaaaaaaaaaaaagatgatgacgatgactttgttgaagaaatgtgtttgaagacagtggaggataacagcactctcatcgcacttttggaagcgtatcatgaaaagcgattcagttgaaatcactaccatctgcccagatgttgaaaattctcagtttgttgtgcaaagcaactgtccagagactattccagagattctaaagtctcaaaatgccgctgtgaatggcagcggcatcgcttgccaacaacgtagcttaccaagaatcaaaatcttgggtaccggtggtactattgcatcgaaagctatagactcctctcaaactgccggctatcatgttgacctgaccatccaagatctattggatgccattccagatatatccaaggtctgtgacattgaatatgagcaactatgcaacgtggattctaaagacataaacgaggatattctttataaaatttataagggcgtctcagaatcgttgcaggcttttgacggtatagttattacccatgggactgatacgctatctgaaactgcattctttattgaaagtactattgatgctggcgacgttcctattgtttttgttggttcgatgcgtccttcaaccagcgtttctgctgatggccctatgaacctttaccaagcaatttgcattgcttcaaatccaaaatctagaggaagaggtgttcttgtttccttgaatgaccaaatttcctctggttactacattactaagacgaatgcaaatagtttggattcttttaatgttagacaaggctatttaggaaattttgtcaacaatgaaattcactactattatcctcctgtgaaaccgcaaggttgccacaaattcaaactgagagtggacggtaagcattttaaattaccagaggtttgcattttatatgctcaccaagcctttccgccagctatagtcaacttagtggcagataagtatgatggtattgttcttgctaccatgggtgctggttcattgccggaggaggtcaatgaaacctgcatgaaattgagtttgccgatcgtatattccaagagatcgatggatggtatggtgcctattgccaacgtaccaaagaaaggttcaaaggaggataatctcatcgcatctggttatctaagccctgaaaagagcagaatcttgttacaattatgtttggcaggtaactacacgttggaagaaattaaacatgttttcactggcgtctatggtgggtgaaaattttgtaattttttgcatttgtgtcgatatatatatatatatacatagacacagagatagagatataattatgcaagtccctgttaatgctagtctgagatgagtacaggaattc

SEQ ID NO: 41702 - protein, 381 aa, Saccharomyces cerevisiae
MKSDSVEITTICPDVENSQFVVQSNCPETIPEILKSQNAAVNGSGIACQQRSLPRIKILGTGGTIASKAIDSSQTAGYHVDLTIQDLLDAIPDISKVCDIEYEQLCNVDSKDINEDILYKIYKGVSESLQAFDGIVITHGTDTLSETAFFIESTIDAGDVPIVFVGSMRPSTSVSADGPMNLYQAICIASNPKSRGRGVLVSLNDQISSGYYITKTNANSLDSFNVRQGYLGNFVNNEIHYYYPPVKPQGCHKFKLRVDGKHFKLPEVCILYAHQAFPPAIVNLVADKYDGIVLATMGAGSLPEEVNETCMKLSLPIVYSKRSMDGMVPIANVPKKGSKEDNLIASGYLSPEKSRILLQLCLAGNYTLEEIKHVFTGVYGG

SEQ ID NO: 41703 - DNA, 1128 bp, Bacillus subtilis
  CDS (1)..(1128): transl_table=11
atgaaaaaacaacgaatgctcgtactttttaccgcactattgtttgtttttaccggatgttcacattctcctgaaacaaaagaatccccgaaagaaaaagctcagacacaaaaagtctcttcggcttctgcctctgaaaaaaaggatctgccaaacattagaattttagcgacaggaggcacgatagctggtgccgatcaatcgaaaacctcaacaactgaatataaagcaggtgttgtcggcgttgaatcactgatcgaggcagttccagaaatgaaggacattgcaaacgtcagcggcgagcagattgttaacgtcggcagcacaaatattgataataaaatattgctgaagctggcgaaacgcatcaaccacttgctcgcttcagatgatgtagacggaatcgtcgtgactcatggaacagatacattggaggaaaccgcttattttttgaatcttaccgtgaaaagtgataaaccggttgttattgtcggttcgatgagaccttccacagccatcagcgctgatgggccttctaacctgtacaatgcagtgaaagtggcaggtgcccctgaggcaaaagggaaagggacgcttgttgttcttaacgaccggattgcctcagcccgatatgtcaccaaaacaaacacaactacaacagatacatttaaatcagaagaaatgggcttcgtcggaacaattgcagatgatatctattttaataatgagattacccgtaagcatacgaaggacacggatttctcggtttctaatcttgatgagctgccgcaggttgacattatctatggataccaaaatgacggaagctacctgtttgacgctgctgtaaaagccggagcaaaggggattgtatttgccggttctgggaacgggtctttatctgatgcagccgaaaaaggggcggacagcgcagtcaaaaaaggcgttacagtggtgcgctctacccgcacgggaaatggtgtcgtcacaccaaaccaagactatgcggaaaaggacttgctggcatcgaactctttaaacccccaaaaagcacggatgttgctgatgcttgcgcttaccaaaacaaatgatcctcaaaaaatccaagcttatttcaatgagtattga

SEQ ID NO: 41704 - protein, 375 aa, Bacillus subtilis
MKKQRMLVLFTALLFVFTGCSHSPETKESPKEKAQTQKVSSASASEKKDLPNIRILATGGTIAGADQSKTSTTEYKAGVVGVESLIEAVPEMKDIANVSGEQIVNVGSTNIDNKILLKLAKRINHLLASDDVDGIVVTHGTDTLEETAYFLNLTVKSDKPVVIVGSMRPSTAISADGPSNLYNAVKVAGAPEAKGKGTLVVLNDRIASARYVTKTNTTTTDTFKSEEMGFVGTIADDIYFNNEITRKHTKDTDFSVSNLDELPQVDIIYGYQNDGSYLFDAAVKAGAKGIVFAGSGNGSLSDAAEKGADSAVKKGVTVVRSTRTGNGVVTPNQDYAEKDLLASNSLNPQKARMLLMLALTKTNDPQKIQAYFNEY

SEQ ID NO: 41705 - DNA, 1071 bp, Schizosaccharomyces pombe
  CDS (1)..(1071)
atgtggggattcatagtaacttgtgggatttttctagtgttactatgccaattgcgtttactgagtaaacgcaaatcaaaatccactccttataatgccttgcttcccaatgttacagtttttgcaatgggtggtacaatcgctggatgcgcaaattcaagtcttgagattgtcaattacattcccggttcggtaggaattgaaaaattgattgaggcggttccagcgatcaaggcaattgcaaacattaatggagtacaggtaactaatatgggaagcgaaaatttaacacctgctgatgtcctaaaactagctaaattgattttagccgaagttgcaaaaccgaatgttcatggtatcgtcattacacacggtaccgactccctggaagaaacagcaatgtttcttgatctgaccatcagtactgcaaaaccaattgttgtagttggagcaatgagaccatctacggctataggcgcagacggccctatgaatttgttaaacgctgttgctgtggcatcttccaatcaatctatgggaaggggcactttagttttattaaatgaccggattggatctgcattttacactacgaaaacgaatggaaatacgcttgacacatttaaatcttatgaagctggatctcttgggatagttcttaatcaaaaaccattttacttttttagtccagctgttccaaccggtaaagtgttctttgacatttataacattaaacaactaccacgagtagacatcttatatggatatcaaggattgaatcccaaacttgctgaatcagcagtccatctgggggccaaaggcttggttttggctgctatgggagcaacttcatggactgatgatggtaatgaagttatcagctcgttaatacgggaacacaatattccagtagtgtacagtcatcgaactgcggaaggatattcaagcaactcttgtcttggcatcccctcttacttcctaaatccacaaaaagctcggtacatgcttatgcttgctattagttcaggctattctattcgagatattgaagatctgttcagcattaaataa

SEQ ID NO: 41706 - protein, 356 aa, Schizosaccharomyces pombe
MWGFIVTCGIFLVLLCQLRLLSKRKSKSTPYNALLPNVTVFAMGGTIAGCANSSLEIVNYIPGSVGIEKLIEAVPAIKAIANINGVQVTNMGSENLTPADVLKLAKLILAEVAKPNVHGIVITHGTDSLEETAMFLDLTISTAKPIVVVGAMRPSTAIGADGPMNLLNAVAVASSNQSMGRGTLVLLNDRIGSAFYTTKTNGNTLDTFKSYEAGSLGIVLNQKPFYFFSPAVPTGKVFFDIYNIKQLPRVDILYGYQGLNPKLAESAVHLGAKGLVLAAMGATSWTDDGNEVISSLIREHNIPVVYSHRTAEGYSSNSCLGIPSYFLNPQKARYMLMLAISSGYSIRDIEDLFSIK

SEQ ID NO: 41707 - DNA, 1089 bp, Saccharomyces cerevisiae
  CDS (1)..(1089)
atgagatctttaaatacccttttactttctctctttgtcgcaatgtccagtggtgctccactactaaaaattcgtgaagagaagaattcttctttgccatcaatcaaaatttttggtaccggcggtactatcgcttccaagggttcgacaagtgcaacaacggcgggttatagcgtgggattaaccgtaaatgatttaatagaagccgtcccatctttagctgagaaggcaaatctggactatcttcaagtgtctaacgttggttcaaattctttaaactatacgcatctgatcccattgtatcacggtatctccgaggcactagcctctgatgactacgctggtgcggttgtcactcatgggaccgacactatggaggagacagctttcttcttagatttgaccataaattcagagaagccagtatgtatcgcaggcgctatgcgtccagccactgccacgtctgctgatggcccaatgaatttatatcaagcagtgtctattgctgcttctgagaaatcactgggtcgtggcacgatgatcactctaaacgatcgtattgcctctgggttttggacaacgaaaatgaatgccaactctttagatacattcagagcggatgaacagggatatttaggttacttttcaaatgatgacgtggagttttactacccaccagtcaagccaaatggatggcaattttttgacatttccaacctcacagacccttcggaaattccagaagtcattattctgtactcctatcaaggcttgaatcctgagctaatagtaaaggccgtcaaggacctgggcgcaaaaggtatcgtgttggcgggttctggagctggttcctggactgctacgggtagtattgtaaacgaacaactttatgaagagtatggtataccaattgttcacagcagaagaacagcagatggtacagttcctccagatgatgccccagagtacgccattggatctggctacctaaaccctcaaaaatcgcgtattttgctacaattatgtttgtactccggctacggcatggatcagattaggtctgttttttctggcgtctacggtggttaa

SEQ ID NO: 41708 - protein, 362 aa, Saccharomyces cerevisiae
MRSLNTLLLSLFVAMSSGAPLLKIREEKNSSLPSIKIFGTGGTIASKGSTSATTAGYSVGLTVNDLIEAVPSLAEKANLDYLQVSNVGSNSLNYTHLIPLYHGISEALASDDYAGAVVTHGTDTMEETAFFLDLTINSEKPVCIAGAMRPATATSADGPMNLYQAVSIAASEKSLGRGTMITLNDRIASGFWTTKMNANSLDTFRADEQGYLGYFSNDDVEFYYPPVKPNGWQFFDISNLTDPSEIPEVIILYSYQGLNPELIVKAVKDLGAKGIVLAGSGAGSWTATGSIVNEQLYEEYGIPIVHSRRTADGTVPPDDAPEYAIGSGYLNPQKSRILLQLCLYSGYGMDQIRSVFSGVYGG

SEQ ID NO: 41709 - DNA, 1083 bp, Schizosaccharomyces pombe
  CDS (1)..(1083)
atgtggagctctatcatcagtttcctattcttttctgtggcattatgtcagccattgttgtttcagaagcgctcttctaatgtttcggacttcatttcatttaatgcttcacttcccaatgttacaatttttgcaatgggaggaactatcgctggatatgcttcatccagcactgaaacagttgactatgccgctggctctgtaggaatagcaacactggttgatgcagttcctgctatcaagaacttttcaaacattcgtggagtccaagttactaatgttggcagtgaagaactgacacctgctaacgttttgaatcttactcagttgattctagccgaagttgccaaacccgatgttcatggtattgttgttacacatggtacagattcacttgaagaaactgcgatatttttggacatgactgtcaatactacaaagcccattgtagttgttggagcaatgagaccttctactgcaattagcgctgatggccctatgaacttgttaaatgctgtagtggtagcggcctctaatcgatctattggtcgcggtactatgatcttattaaatgatcgtattggatctgccttttatactacaaagacaaatggaaatatgcttgataccttcaagtcatatgaggcaggattccttggtatgattcttgatcaaagaccacatttcttctatagccctgctacaccaactggtaaagttcattttgacgttagcaacactactgaattaccagcagttgaaattttgtatggatatcagggactgaatcctaacttggcaaaggctgcagtagatctgggagccaaaggtttagtcttagctggcatgggtgcagcttcctggacggatcctggtaatgaagtgattgatggattgattagtaaccaaagtattccggttgtgtacagccacagaacaatggatggattttctgactattattacaacggaattcctgcttatttccaaaatccgcaaaaagctagatatatgcttatgctttccattaacgctggctattccattcaaaacataactgatatattcagtcttgagtattag

SEQ ID NO: 41710 - protein, 360 aa, Schizosaccharomyces pombe
MWSSIISFLFFSVALCQPLLFQKRSSNVSDFISFNASLPNVTIFAMGGTIAGYASSSTETVDYAAGSVGIATLVDAVPAIKNFSNIRGVQVTNVGSEELTPANVLNLTQLILAEVAKPDVHGIVVTHGTDSLEETAIFLDMTVNTTKPIVVVGAMRPSTAISADGPMNLLNAVVVAASNRSIGRGTMILLNDRIGSAFYTTKTNGNMLDTFKSYEAGFLGMILDQRPHFFYSPATPTGKVHFDVSNTTELPAVEILYGYQGLNPNLAKAAVDLGAKGLVLAGMGAASWTDPGNEVIDGLISNQSIPVVYSHRTMDGFSDYYYNGIPAYFQNPQKARYMLMLSINAGYSIQNITDIFSLEY

SEQ ID NO: 41711 - DNA, 1071 bp, Schizosaccharomyces pombe
  CDS (1)..(1071)
atgtggggattcatagtaacttgtgggatttttctagtgttactatgccaattgcgtttactgagtaaacgcaaatcaaaatccactccttataatgccttgcttcccaatgttacagtttttgcaatgggtggtacaatcgctggatgcgcaaattcaagtcttgagattgtcaattacattcccggttcggtaggaattgaaaaattgattgaggcggttccagcgatcaaggcaattgcaaacattaatggagtacaggtaactaatatgggaagcgaaaatttaacacctgctgatgtcctaaaactagctaaattgattttagccgaagttgcaaaaccgaatgttcatggtatcgtcattacacacggtaccgactccctggaagaaacagcaatgtttcttgatctgaccatcagtactgcaaaaccaattgttgtagttggagcaatgagaccatctacggctataggcgcagacggccctatgaatttgttaaacgctgttgctgtggcatcttccaatcaatctatgggaaggggcactttagttttattaaatgaccggattggatctgcattttacactacgaaaacgaatggaaatacgcttgacacatttaaatcttatgaagctggatctcttgggatagttcttaatcaaaaaccattttacttttttagtccagctgttccaaccggtaaagtgttctttgacatttataacattaaacaactaccacgagtagacatcttatatggatatcaaggattgaatcccaaacttgctgaatcagcagtccatctgggggccaaaggcttggttttggctgctatgggagcaacttcatggactgatgatggtaatgaagttatcagctcgttaatacgggaacacaatattccagtagtgtacagtcatcggactgcggaaggatattcaagtaactcttgccttggcattccttcttatttccttaatccacaaaaagctcggtacatgcttatgcttgctattagttcaggttattctattagagatatagaaggtttattcagcattaaataa

SEQ ID NO: 41712 - protein, 356 aa, Schizosaccharomyces pombe
MWGFIVTCGIFLVLLCQLRLLSKRKSKSTPYNALLPNVTVFAMGGTIAGCANSSLEIVNYIPGSVGIEKLIEAVPAIKAIANINGVQVTNMGSENLTPADVLKLAKLILAEVAKPNVHGIVITHGTDSLEETAMFLDLTISTAKPIVVVGAMRPSTAIGADGPMNLLNAVAVASSNQSMGRGTLVLLNDRIGSAFYTTKTNGNTLDTFKSYEAGSLGIVLNQKPFYFFSPAVPTGKVFFDIYNIKQLPRVDILYGYQGLNPKLAESAVHLGAKGLVLAAMGATSWTDDGNEVISSLIREHNIPVVYSHRTAEGYSSNSCLGIPSYFLNPQKARYMLMLAISSGYSIRDIEGLFSIK

SEQ ID NO: 41713 - DNA, 1047 bp, Erwinia chrysanthemi
  CDS (1)..(1047): transl_table=11
atggaaagatggtttaaatctctgtttgttctggttttattttttgtttttacggcgagtgcggcagataaactgcccaatatcgttatcctggcgaccggcggtacaattgccggctcagcggcaacgggtacccaaaccacaggttacaaggctggcgcgcttggcgtggatacgctaatcaacgctgtgcctgaggtgaagaaactggctaatgtgaagggggagcagttctccaacatggccagcgaaaacatgaccggtgatgtggtgctcaagctgagccagcgtgtgaatgaactgctggcacgggatgatgtggatggtgtggtgatcacccacgggaccgacacggtggaagagtcggcttactttcttcatctgacggtaaaaagtgacaagccagtggtgtttgtcgcagcgatgcgtccggcaacggccatcagtgctgacggcccgatgaacctgctggaagcggtacgcgtggcgggtgacaaacagtctcgcggtcgcggcgtgatggtggtgcttaatgatcgtatcggctctgcccgctacatcaccaagaccaacgcctctacgctggatacgttcaaggcgaatgaagaaggctacctgggcgtcattattggtaaccgcatttactaccaaaaccgaatcgacaagctgcataccacccggtctgtgttcgacgtgcgtggcctgacttcgctgccgaaagtcgacattctttatggctatcaggatgacccggaatatctgtatgacgcggctatccagcatggcgtaaaaggtatcgtctatgccggtatgggcgcaggttcagtgtccgttcgcggtattgccggtatgcgcaaggcgatggagaaaggcgttgttgtgatccgttctacccgcacaggcaatggtattgtgccgccggatgaagagctgccaggtctggtttctgactctcttaacccggcacatgcccgcattctgttgatgctggcattgactcgcaccagtgatccgaaagtcattcaagagtatttccatacttattga

SEQ ID NO: 41714 - protein, 348 aa, Erwinia chrysanthemi
MERWFKSLFVLVLFFVFTASAADKLPNIVILATGGTIAGSAATGTQTTGYKAGALGVDTLINAVPEVKKLANVKGEQFSNMASENMTGDVVLKLSQRVNELLARDDVDGVVITHGTDTVEESAYFLHLTVKSDKPVVFVAAMRPATAISADGPMNLLEAVRVAGDKQSRGRGVMVVLNDRIGSARYITKTNASTLDTFKANEEGYLGVIIGNRIYYQNRIDKLHTTRSVFDVRGLTSLPKVDILYGYQDDPEYLYDAAIQHGVKGIVYAGMGAGSVSVRGIAGMRKAMEKGVVVIRSTRTGNGIVPPDEELPGLVSDSLNPAHARILLMLALTRTSDPKVIQEYFHTY

SEQ ID NO: 41715 - DNA, 999 bp, Helicobacter pylori J99
  CDS (1)..(999): transl_table=11
atggctcaaaatttacccaccattgctttattagcgacaggggggacgattgcagggagtggcgttgatgcgagcttgggtagttataagagcggtgaattgggtgtcaaagagcttttgaaggctatccccagtctcaacaagatcgcccgcattcaaggggagcaggtttctaacatcggctcacaagacatgaatgaagaaatatggttcaagctcgcccaacgcgcccaagagttgctagacgatagccgcattcaaggcgtggttatcacgcatggcacggacactttagaagagagcgcgtattttttaaacttggttttacactccacaaaaccggtcgtgctagtgggagcgatgcgtaacgcttcttctttgagcgcggatggggctttgaatttatattatgctgtgagcgtagcggttaatgaaaaaagcgcgaataagggcgtgttggtggtcatggatgatactatttttagggttagagaggtggttaaaacgcacaccacccacatttccacctttaaagccttaaatagtggcgcgatagggagcgtgtattatggcaaaacgcgttattacatgcagcctttgagaaaacacaccacagagagcgaattttccctttcacaactcaaaacccccttacctaaagtggatattatttacacgcatgccggcatgacccctgatttattccaagcgagcctaaactcgcatgcaaaaggcgttgtgatagccggggtgggtaatgggaatgtgagcgctgggtttttaaaagcgatgcaagaagcgagccaaatgggggtggttattgttcgttctagcagggtaggcagtggtggagttacttcaggtgagattgatgacaaggcttatggcttcatcacaagcgacaatttaaacccccaaaaagctagggtgcttttacaactcgctctaactaaaacaaatgataaggcaaaaatccaagaaatgtttgaagagtattaa

SEQ ID NO: 41716 - protein, 332 aa, Helicobacter pylori J99
MAQNLPTIALLATGGTIAGSGVDASLGSYKSGELGVKELLKAIPSLNKIARIQGEQVSNIGSQDMNEEIWFKLAQRAQELLDDSRIQGVVITHGTDTLEESAYFLNLVLHSTKPVVLVGAMRNASSLSADGALNLYYAVSVAVNEKSANKGVLVVMDDTIFRVREVVKTHTTHISTFKALNSGAIGSVYYGKTRYYMQPLRKHTTESEFSLSQLKTPLPKVDIIYTHAGMTPDLFQASLNSHAKGVVIAGVGNGNVSAGFLKAMQEASQMGVVIVRSSRVGSGGVTSGEIDDKAYGFITSDNLNPQKARVLLQLALTKTNDKAKIQEMFEEY

SEQ ID NO: 41717 - DNA, 993 bp, Helicobacter pylori
  CDS (1)..(993): transl_table=11
atggctcaaaatttacccaccattgctttactggcgacaggggggacgattgcagggagtggtgcgagcgcgagtttgggtagttataagagtggtgagttgggcatcaaagagcttttgaaggctatccctagtcttaacagactcgctcgcattcaaggggagcagatttctaacatcggctcacaagacatgaatgaagaggtatggttcaagctcgccaaacgtgcccaagaattgctagatgatagccgtattcaaggcgtggtcatcacgcatggcacggacactttagaagagagcgcgtattttttaaacttagttttacgctccacaaaaccggtcgtgctggtgggagcgatgcgtaatgctgcttctttgagcgcggatggggctttgaatttatataatgctgtgagcgtagcgctcaatgaaaaaagtgcgaataaaggcgtgttagtggtgatggacgataatatttttagcgctagagaagtgattaaaacgcacaccacccacacttccacctttaaagccttaaatagcggcgcgatagggagcgtgtattatggcaaaacgcgctattacatgcagcctttgagaaaacacaccacagagagcgaattttccctttcacaactcaaaacccccctgcctaaagtggatattatttacacgcatgctggcatgacccctgatttattccaagcgagcctaaactcgcatgcaaaaggcgttgtgatagccggggtgggtaatgggaatgtgagcgctgggtttttaaaagcgatgcaagaagcgagccaaatgggggtggttattgttcgttctagcagggtaaatagcggtgagattacttcaggcgagattgatgacaaggccttcatcacaagcgacaatttaaacccccaaaaagctagggtgcttttacaactcgctttaactaaaacaaataataaagaaaaaatccaagaaatgtttgaagagtattga

SEQ ID NO: 41718 - protein, 330 aa, Helicobacter pylori
MAQNLPTIALLATGGTIAGSGASASLGSYKSGELGIKELLKAIPSLNRLARIQGEQISNIGSQDMNEEVWFKLAKRAQELLDDSRIQGVVITHGTDTLEESAYFLNLVLRSTKPVVLVGAMRNAASLSADGALNLYNAVSVALNEKSANKGVLVVMDDNIFSAREVIKTHTTHTSTFKALNSGAIGSVYYGKTRYYMQPLRKHTTESEFSLSQLKTPLPKVDIIYTHAGMTPDLFQASLNSHAKGVVIAGVGNGNVSAGFLKAMQEASQMGVVIVRSSRVNSGEITSGEIDDKAFITSDNLNPQKARVLLQLALTKTNNKEKIQEMFEEY

SEQ ID NO: 41719 - DNA, 993 bp, Wolinella succinogenes
  CDS (1)..(993): transl_table=11
atggctaaaccccaagtgactatcctagccacaggaggcaccatcgctggttcgggggaatctagcgtcaagagtagctactctgctggagcagtcaccgttgataagcttcttgcagccgtccctgccatcaacgacctagccaccatcaagggtgaacagatctcaagcattggctcccaagagatgacgggtaaggtgtggcttaaactagccaagcgtgtcaatgagctcctcgcccaaaaagagaccgaagccgtgatcatcacccatggaactgacaccatggaagagaccgctttcttcctcaacctcacggtgaaaagccaaaaacctgtcgtccttgtaggcgccatgcgctcaggctcttccatgagtgctgatggccccatgaatctctataacgccgtgaatgtagcgatcaacaaagcctctactaacaaaggagtggtgattgtgatgaacgatgagattcacgccgccagagaagcgaccaagctcaacaccaccgcagtcaatgcatttgcttcgcccaacacaggtaaaatcggcacagtctattatggcaaagtcgagtatttcactcaatccgttcgacctcacacccttgcaagtgagtttgatattagcaaaatcgaagaactccccagagtcgatattctttacgctcaccccgatgatactgatgttttagtcaatgcagcccttcaggcaggagccaaaggaatcatccatgcaggcatgggcaatgggaaccctttccctttgactcaaaatgctcttgaaaaagcagccaaatcaggcgtagtcgtcgctcgaagctctagagtgggcagtggttccaccacccaagaggctgaagtggatgataagaaacttggttttgtggctacagagagtctcaaccctcaaaaagccagagtgcttcttatgttagccctcaccaaaactagtgatagagaggcgatccaaaagatcttctccacctattaa

SEQ ID NO: 41720 - protein, 330 aa, Wolinella succinogenes
MAKPQVTILATGGTIAGSGESSVKSSYSAGAVTVDKLLAAVPAINDLATIKGEQISSIGSQEMTGKVWLKLAKRVNELLAQKETEAVIITHGTDTMEETAFFLNLTVKSQKPVVLVGAMRSGSSMSADGPMNLYNAVNVAINKASTNKGVVIVMNDEIHAAREATKLNTTAVNAFASPNTGKIGTVYYGKVEYFTQSVRPHTLASEFDISKIEELPRVDILYAHPDDTDVLVNAALQAGAKGIIHAGMGNGNPFPLTQNALEKAAKSGVVVARSSRVGSGSTTQEAEVDDKKLGFVATESLNPQKARVLLMLALTKTSDREAIQKIFSTY

SEQ ID NO: 41721 - DNA, 1089 bp, Pseudomonas aeruginosa
  CDS (1)..(1089): transl_table=11
atgaagccattgctccacgcgttcgcccccggtgttatggccctgatgctcctgctgccgcaggccgcccaggccaaggaagtcgcaccgcaacagaaactgtccaacgtggtcatcctggccaccggcggcaccatcgccggcgccggcgccagcgccgccaacagcgccacctacaccgccgccaaggtgccggtcgaccagttgctggccagcgtgccgcagctcaaggacatcgccaacgtccgcggcgaacaggtgttccagatcgcctcggaaagcttcaccaacgagaacctgctggaactgggcaagaccgtcgccaagctggccgatagcgacgacgtcgacggcatcgtgatcacccacggtaccgacaccctggaagagaccgcctacttcctgaccctggtcgagcacaccgagaagcctatcgtggtggtcggctcgatgcgcccgggcaccgcgatgtccgccgacggcatgctcaacctgtacaacgccgtggcggtggccggcgacaagtcggcacgcggcaagggcgtgctgatcaccatgaacgacgagatcctctccggccgcgacgcgagcaagatggtcaacatcaagaccgaagcgttcaagagcccgtggggcccgctgggcatggtggtcgagggcaagagctactggttccgcgcaccggtgaagcggcacacggtgaactccgagttcgacatcaagcagatctccgcgctggctccggtggaaatcgcctacagctacggcaacgtcagcgacaccgcctacaaggccctggcccaggcgggcgccaaggcgatcatccatgccggcaccggcaacggctcggtgcccgcgcgcgtggtgccgaccctgcaggaactgcgcaagcagggcgtgcagatcatccgctcctcgcacgtcaatgccggcggcttcgtcctgcgcaacgccgagcagccggacgacaagaacgactggatcgtcgcccacgacctgaacccgcagaaggcgcgcatcctggccgcggtcgcgatgaccaagacccaggacagcaaggagctgcaacggatcttctgggaatactga

SEQ ID NO: 41722 - protein, 362 aa, Pseudomonas aeruginosa
MKPLLHAFAPGVMALMLLLPQAAQAKEVAPQQKLSNVVILATGGTIAGAGASAANSATYTAAKVPVDQLLASVPQLKDIANVRGEQVFQIASESFTNENLLELGKTVAKLADSDDVDGIVITHGTDTLEETAYFLTLVEHTEKPIVVVGSMRPGTAMSADGMLNLYNAVAVAGDKSARGKGVLITMNDEILSGRDASKMVNIKTEAFKSPWGPLGMVVEGKSYWFRAPVKRHTVNSEFDIKQISALAPVEIAYSYGNVSDTAYKALAQAGAKAIIHAGTGNGSVPARVVPTLQELRKQGVQIIRSSHVNAGGFVLRNAEQPDDKNDWIVAHDLNPQKARILAAVAMTKTQDSKELQRIFWEY

SEQ ID NO: 41723 - DNA, 1709 bp, Pseudomonas fluorescens biotype A
  CDS (295)..(1383): transl_table=11
aacgacagggcatctgccccaccgtcaaacacgcctgcatgaatattccatcatggttttcggacaaccgaacgcaatagcccctcactgttcggaaagccggacaaacgcccctcagccccacctgcaaaaaccaatataagttgttttaaatcaacacgttaatttatatgttcggccaccatcagcctggtacaaatcctgctctttctcagcacctcgcggcattcagaatcgcccgggtgttctagatgaacctgctaccgcactcatcaaaaaccagagagaaaaataatgaaatctgcactgaaaaccttcgttccgggcgccctagccctactgctgctgttccccgttgctgcccaggcaaaggaagtcgaaaccaagaccaagctggccaacgtggtgattctcgccaccggcgggaccattgccggcgccggcgccagcgccgccaacagcgccacctaccaggcggccaaggtcggtatcgagcaattgatcgccggtgttcctgagcttagccagatcgccaatgtccgcggcgagcaagtgatgcaaattgcgtccgagagcatcaacaacgaaaaccttctgcagttgggtcgccgagtagccgaactggctgacagcaaggacgtggacggcatcgttatcacccacggtaccgacaccctcgaagaaaccgcttacttcctgaaccttgtggaaaagaccgacaagccaatcatcgtcgtcggttcaatgcgtcctggtaccgccatgtcggctgacggcatgctcaacctgtacaacgccgtggctgtcgccggcagcaaagacgctcgcggcaagggtgtactggtcaccatgaacgatgagatccaatcgggtcgcgacgtcagcaaaatgattaacatcaagaccgaagcattcaaaagcccgtggggcccgttgggcatggtcgttgaaggcaaatcctattggttccgcttgcctgccaagcggcacaccatggattccgagttcgacatcaagaccatcaaaagcctgccagacgtggaaatcgcctacggctacggcaacgtgagcgacaccgccgtcaaggccctggcccaggccggtgccaaagccatcatccatgccggcaccggcaatggttcggtgtcttccaaagtcgtccctgccctgcaggaactgcgcaagcaaggcgtgcaaatcattcgctcttcccacgtgaatgccggcggtttcgttctgcgtaatgctgaacagcctgacgacaagtacgactgggttgtcgcacacgaccttaacccacagaaagcccgcattctggcaatggttgccctgaccaagacccaggacagcaaagaattgcaacggatgttctgggaatattgattgttggtgacaccggtagaggcgggcttgcttgcctctacttccccgctcgcccctcgctacacattccccgcgcgacacccgctgtctgaatggaccgtcaaaaccaactggcttgattttaataagttgcgaaattcgtaacagttaaatactgtatgcacgtacagcacagtaaggaatattccgtggcaacgtcttcttccgcagcgcaaacctcgcctgacgcctatacgcgactcgccgttcgtgtgcaaaaaatcatcaattcgaccaacgcccagaaagccaaggccgccctgatcttccgtttgccggacggagcc

SEQ ID NO: 41724 - protein, 362 aa, Pseudomonas fluorescens biotype A
MKSALKTFVPGALALLLLFPVAAQAKEVETKTKLANVVILATGGTIAGAGASAANSATYQAAKVGIEQLIAGVPELSQIANVRGEQVMQIASESINNENLLQLGRRVAELADSKDVDGIVITHGTDTLEETAYFLNLVEKTDKPIIVVGSMRPGTAMSADGMLNLYNAVAVAGSKDARGKGVLVTMNDEIQSGRDVSKMINIKTEAFKSPWGPLGMVVEGKSYWFRLPAKRHTMDSEFDIKTIKSLPDVEIAYGYGNVSDTAVKALAQAGAKAIIHAGTGNGSVSSKVVPALQELRKQGVQIIRSSHVNAGGFVLRNAEQPDDKYDWVVAHDLNPQKARILAMVALTKTQDSKELQRMFWEY

SEQ ID NO: 41725 - DNA, 1089 bp, Pseudomonas putida
  CDS (1)..(1089): transl_table=11
atgaatgccgcactgaaaaccttcgccccaagcgcactcgccctgctgctgatcctgccatccagcgcctcggccaaagaagccgaaacccaacagaagctggccaacgtggtcatcctcgccaccggcggcaccattgccggcgccggtgccagcgctgccaacagcgccacttaccaggctgccaagctgggcgtcgacaagctcatcgccggcgtgccggaactggccgacatcgccaatgtacgtggcgagcaagtgatgcagatcgcctccgagagcatcagcaatgacgacctgctgaagctgggcaagcgcgtcgccgagctggccgaaagcaaggacgtggacggcatcgtcatcacccacggcaccgataccctcgaagaaaccgccttcttcctcaacctggtagagaagaccgacaagccaatcgtggtggtcggctcgatgcgtccgggtaccgccatgtccgccgacggcatgctcaacctgtacaacgccgtggccgtagccagcgacaagcagtcgcgtggcaagggcgtgctggtgaccatgaacgacgagatccagtccggccgcgatgtgagcaaggcggtcaacatcaagaccgaagccttcaagagcgcctggggcccgatgggcatggtggtggaaggcaaatcgtactggttccgcctgccggccaagcgccatacggtcaattccgagttcgatatcaagcagatcagcagcctgccgcaggtagacattgcgtatggctatggcaacgtcaccgacaccgcctacaaggccctggcacagaacggcgccaaggcgctgatccatgccggtaccggcaacggttcggtatcgtcgcgggtagtcccggcgctgcaagaactgcgcaagaacggcgtgcagatcatccgctcgtcgcatgtcaaccagggtggtttcgtactgcgtaatgccgaacagccggatgacaagaacgactgggtcgtggctcacgacctgaacccgcaaaaagcgcggatcctggcgatggtagcgatgaccaagacccaggacagcaaagagctgcagcggatcttctgggagtactga

SEQ ID NO: 41726 - protein, 362 aa, Pseudomonas putida
MNAALKTFAPSALALLLILPSSASAKEAETQQKLANVVILATGGTIAGAGASAANSATYQAAKLGVDKLIAGVPELADIANVRGEQVMQIASESISNDDLLKLGKRVAELAESKDVDGIVITHGTDTLEETAFFLNLVEKTDKPIVVVGSMRPGTAMSADGMLNLYNAVAVASDKQSRGKGVLVTMNDEIQSGRDVSKAVNIKTEAFKSAWGPMGMVVEGKSYWFRLPAKRHTVNSEFDIKQISSLPQVDIAYGYGNVTDTAYKALAQNGAKALIHAGTGNGSVSSRVVPALQELRKNGVQIIRSSHVNQGGFVLRNAEQPDDKNDWVVAHDLNPQKARILAMVAMTKTQDSKELQRIFWEY

SEQ ID NO: 41727 - DNA, 25 bp, Artificial sequence
  primer
atggagtttttcaaaaagacggcac

SEQ ID NO: 41728 - DNA, 25 bp, Artificial sequence
  primer
ttagtactgattgaagatctgctgg

SEQ ID NO: 41729 - protein, 354 aa, Artificial sequence
  consensus sequence
  Variant (7)..(39): Xaa in position 7 to 39 is any amino acid
  Variant (40)..(66): Xaa in position 40 to 66 is any or no amino acid
  Variant (68)..(90): Xaa in position 68 to 90 is any amino acid
  Variant (91)..(94): Xaa in position 91 to 94 is any or no amino acid
  Variant (96)..(96): Xaa in position 96 is any amino acid
  Variant (98)..(98): Xaa in position 98 is any amino acid
  Variant (105)..(105): Xaa in position 105 is any amino acid
  Variant (110)..(111): Xaa in position 110 to 111 is any amino acid
  Variant (113)..(120): Xaa in position 113 to 120 is any amino acid
  Variant (121)..(121): Xaa in position 121 is any or no amino acid
  Variant (123)..(123): Xaa in position 123 is any amino acid
  Variant (125)..(126): Xaa in position 125 to 126 is any amino acid
  Variant (128)..(128): Xaa in position 128 is any amino acid
  Variant (131)..(137): Xaa in position 131 to 137 is any amino acid
  Variant (140)..(141): Xaa in position 140 to 141 is any amino acid
  Variant (144)..(145): Xaa in position 144 to 145 is any amino acid
  Variant (147)..(149): Xaa in position 147 to 149 is any amino acid
  Variant (151)..(156): Xaa in position 151 to 156 is any amino acid
  Variant (157)..(163): Xaa in position 157 to 163 is any or no amino acid
  Variant (165)..(165): Xaa in position 165 is any amino acid
  Variant (167)..(169): Xaa in position 167 to 169 is any amino acid
  Variant (171)..(180): Xaa in position 171 to 180 is any amino acid
  Variant (182)..(189): Xaa in position 182 to 189 is any amino acid
  Variant (190)..(190): Xaa in position 190 is any or no amino acid
  Variant (192)..(192): Xaa in position 192 is any amino acid
  Variant (193)..(196): Xaa in position 193 to 196 is any or no amino acid
  Variant (198)..(199): Xaa in position 198 to 199 is any amino acid
  Variant (201)..(221): Xaa in position 201 to 221 is any amino acid
  Variant (222)..(241): Xaa in position 222 to 241 is any or no amino acid
  Variant (243)..(264): Xaa in position 243 to 264 is any amino acid
  Variant (265)..(266): Xaa in position 265 to 266 is any or no amino acid
  Variant (268)..(273): Xaa in position 268 to 273 is any amino acid
  Variant (275)..(275): Xaa in position 275 is any amino acid
  Variant (277)..(297): Xaa in position 277 to 297 is any amino acid
  Variant (298)..(307): Xaa in position 298 to 307 is any or no amino acid
  Variant (309)..(311): Xaa in position 309 to 311 is any amino acid
  Variant (313)..(325): Xaa in position 313 to 325 is any amino acid
  Variant (326)..(340): Xaa in position 326 to 340 is any or no amino acid
  Variant (342)..(344): Xaa in position 342 to 344 is any amino acid
  Variant (348)..(349): Xaa in position 348 to 349 is any amino acid
  Variant (351)..(353): Xaa in position 351 to 353 is any amino acid
TGGTIAXXXXXXXXXXXXXXXXXXXXXXXXXXXXXXXXXXXXXXXXXXXXXXXXXXXXXXXXXXXXSXXXXXXXXXXXXXXXXXXXXXXXXXXXGXVXTHGTDTXEETAXXLXXXXXXXXXPXVXXGXMRXXXXXXXDGXXNLXXAXXXAXXXXXXXXXXXXXGXLXXXNXXXXXXXXXXKXXXXXXXXXFXXXXXGXXGXXXXXXXXXXXXXXXXXXXXXXXXXXXXXXXXXXXXXXXXXVXXXXXXXXXXXXXXXXXXXXXXXXGXXXXXXGXGXXXXXXXXXXXXXXXXXXXXXXXXXXXXXXXRXXXGXXXXXXXXXXXXXXXXXXXXXXXXXXXXLXXXKARXXLXXXL

SEQ ID NO: 41730 - protein, 30 aa, Artificial sequence
  protein pattern
  Variant (2)..(2): Xaa in position 2 is any or no amino acid
  Variant (4)..(7): Xaa in position 4 to 7 is any amino acid
  Variant (8)..(8): Xaa in position 8 is any or no amino acid
  Variant (11)..(11): Xaa in position 11 is any amino acid
  Variant (12)..(12): Xaa in position 12 is Ala, Gly, Asn, Pro or Ser
  Variant (13)..(15): Xaa in position 13 to 15 is any amino acid
  Variant (16)..(16): Xaa in position 16 is Ala, Asp, Gly or Ser
  Variant (17)..(17): Xaa in position 17 is any amino acid
  Variant (20)..(21): Xaa in position 20 to 21 is any amino acid
  Variant (23)..(25): Xaa in position 23 to 25 is any amino acid
  Variant (26)..(26): Xaa in position 26 is Ala, Gly or Ser
  Variant (27)..(29): Xaa in position 27 to 29 is any amino acid
PXVXXXXXMRXXXXXXXDGXXNXXXXXXXA

SEQ ID NO: 41731 - protein, 24 aa, Artificial sequence
  protein pattern
  Variant (2)..(2): Xaa in position 2 is any amino acid
  Variant (3)..(8): Xaa in position 3 to 8 is any or no amino acid
  Variant (10)..(10): Xaa in position 10 is Ile or Val
  Variant (15)..(15): Xaa in position 15 is Asp or Asn
  Variant (16)..(16): Xaa in position 16 is Ser or Thr
  Variant (17)..(17): Xaa in position 17 is Ile, Leu, Met or Val
  Variant (18)..(18): Xaa in position 18 is Ala, Asp, Glu or Ser
  Variant (20)..(20): Xaa in position 20 is Ser or Thr
  Variant (21)..(21): Xaa in position 21 is Ala, Gly, Pro, Ser or Thr
  Variant (22)..(23): Xaa in position 22 to 23 is any amino acid
  Variant (24)..(24): Xaa in position 24 is Ala, Ile, Leu or Val
GXXXXXXXVXTHGTXXXXEXXXXX

SEQ ID NO: 41732 - DNA, 1083 bp, Escherichia coli
  CDS (1)..(1083): transl_table=11
atgatgaaaaaatatctcgcgctggctttgattgcgccgttgctcatctcctgttcgacgaccaaaaaaggcgatacctataacgaagcctgggtcaaagataccaacggttttgatattctgatggggcaatttgcccacaatattgagaacatctggggcttcaaagaggtggtgatcgctggtcctaaggactacgtgaaatacaccgatcaatatcagacccgcagccacatcaacttcgatgacggtacgattactatcgaaaccatcgccgggacagaacctgccgcgcatttgcgccgggcaattatcaaaacgttattgatgggtgacgatccgagttcggtcgatctctattccgacgttgatgatattacgatttcgaaagaacctttcctttacggtcaggtggtggacaacaccgggcagccgattcgctgggaaggtcgcgcaagcaacttcgcggattatctgctgaaaaaccgtctgaagagccgcagcaacgggctgcgtatcatctacagcgtcaccattaacatggtgccgaaccaccttgataaacgtgcgcacaaatatctcggcatggtccgccaggcgtcacggaaatatggcgttgatgagtcgctgattctggcaattatgcagaccgaatcttcctttaacccgtatgcggtcagccgttccgatgcgctgggattaatgcaggtggtacaacatactgccgggaaagatgtgttccgctcgcaggggaaatccggcacgccgagccgcagtttcttgtttgatcctgccagcaatattgataccggcaccgcgtatctggcgatgctgaacaatgtttatctcggcggaattgataacccaacatcgcggcgttatgccgtcatcaccgcctataacggcggcgcaggcagcgtgctgcgagtcttttcgaatgataagattcaggctgccaatattattaacaccatgacgccgggcgatgtttatcagacgctgacgacccgccatccctctgcggaatctcgccgttatctttataaagtgaataccgcgcaaaaatcctaccgccgccgataa

SEQ ID NO: 41733 - protein, 360 aa, Escherichia coli
MMKKYLALALIAPLLISCSTTKKGDTYNEAWVKDTNGFDILMGQFAHNIENIWGFKEVVIAGPKDYVKYTDQYQTRSHINFDDGTITIETIAGTEPAAHLRRAIIKTLLMGDDPSSVDLYSDVDDITISKEPFLYGQVVDNTGQPIRWEGRASNFADYLLKNRLKSRSNGLRIIYSVTINMVPNHLDKRAHKYLGMVRQASRKYGVDESLILAIMQTESSFNPYAVSRSDALGLMQVVQHTAGKDVFRSQGKSGTPSRSFLFDPASNIDTGTAYLAMLNNVYLGGIDNPTSRRYAVITAYNGGAGSVLRVFSNDKIQAANIINTMTPGDVYQTLTTRHPSAESRRYLYKVNTAQKSYRRR

SEQ ID NO: 41734 - DNA, 1191 bp, Vibrio cholerae O1 biovar eltor str. N16961
  CDS (1)..(1191): transl_table=11
atgccgctgggttatgatgtcattttcgtatcaggagtagcgaaagctcgctttaggaggcgcatgagaaagttagtgttatgtatcaccgctctattattgagtggctgtagtcgtgaatttatcgagaaaatttacgatgttgattacgagcccactaaccgtttcgccaagaacttagccgaattacctggacagtttcagaaagacaccgccgcactggatgcattaatcaacagcttctccggcaatatcgaaaaacgttggggacgccgcgagctaaaaatcgccggaaaaaataactacgtcaaatacatagacaactaccttagccgctctgaagtcaacttcaccgaaggtcgaatcatagtagaaactgtttcacctatcgatcctaaagcccatttacgcaatgcgatcatcaccaccttactgactcccgatgatcccgcgcacgtcgatcttttctcctcaaaagacattgaactcaaaggccaaccctttttgtatcagcaggtactcgatcaagatggtcagccgatccagtggtcatggcgcgctaaccgttacgccgattacctcatcgctaaccatttgaaagtgaagcaagtcgatttcaaaaaagcctattacgtcgaaatccccatggtcaaagatcaaatcgatatccgtggctacaaatacgccagtatcgtgcgtaaagcttctcgcaaatacgacatcccggaagatctgatctacgcgatcatcaaaaccgaaagcagtttcaacccctatgcggtgagttgggccaacgcctatggtttaatgcaagtggtgcctaaaaccgcaggacgggatgtgttcaagctggtcaaaaaccgctctggcgagcccagccccgagtatctgtttaacccagaaaacaacattgatacgggtacggcctatttttacatcctgaaaaatcgctatttgaaagaggttcgccaccccacatctctcgaatacagcatgatttctgcctataacggcggcactggcggagtgttgagtacctttagcagtgatcgtcaacgcgccatgcgtgaccttaatgccctgcaacctaaccaagtgtattgggcgttaaccaaaaaacatccgaatgcggaagcgcgtcgttatctggaaaaagtgaccaaatttaagaaggaatttaacgcgggataa

SEQ ID NO: 41735 - protein, 396 aa, Vibrio cholerae O1 biovar eltor str. N16961
MPLGYDVIFVSGVAKARFRRRMRKLVLCITALLLSGCSREFIEKIYDVDYEPTNRFAKNLAELPGQFQKDTAALDALINSFSGNIEKRWGRRELKIAGKNNYVKYIDNYLSRSEVNFTEGRIIVETVSPIDPKAHLRNAIITTLLTPDDPAHVDLFSSKDIELKGQPFLYQQVLDQDGQPIQWSWRANRYADYLIANHLKVKQVDFKKAYYVEIPMVKDQIDIRGYKYASIVRKASRKYDIPEDLIYAIIKTESSFNPYAVSWANAYGLMQVVPKTAGRDVFKLVKNRSGEPSPEYLFNPENNIDTGTAYFYILKNRYLKEVRHPTSLEYSMISAYNGGTGGVLSTFSSDRQRAMRDLNALQPNQVYWALTKKHPNAEARRYLEKVTKFKKEFNAG

SEQ ID NO: 41736 - DNA, 1083 bp, Pasteurella multocida subsp. multocida str. Pm70
  CDS (1)..(1083): transl_table=11
atgaagatgaagaagtacataatttacgcattaatcccttttttatttgcttgtggtgggacgaaaacacaccgcagttcgcaatttgatgaagcattcgccaaagatactcgtggattagatattttaacagggcagttttcgcataatatcgatcgtatttggggagtgaatgaattactcgttgcgagccgtaaagactatgtaaaatataccgatcgtttctatacgcgtagccatgtcagttttgatgaagggttgattacggttgaaacacaaagcgatttacgtcacttacaaaatgcgattgtgcatattttattaatggggtctgatgcaaatggtatcgatctgtttgcttcgggtgatgtgccgattagctcgcgtccttttttagtggggcaagtgatcgatcatttaggcggatctattactaacaccacaacagcaggtaactttgcgaattatttattacagaataaattgcaaacgcgtcgtttaagtaatggacatactgtacagtatgtggtgatcccgatgattgccaaccacgttgctgtgcgtgcacaaagatatttaccgttggtgcgtaaaatggcacgtcgttacaatatggatgaaagtttgattttaggcatcatgcaaacagaatccagttttaacccttacgcgattagttatgctaatgcgattggtttaatgcaagttgtgccaacaaccgctggacgtgatattttcaaaatgaaaggaaaagggggacaaccgtccaaatcctatttatttgatcctgaaaagaatatcgatgcggggacctcgtatttatggttattacaaaataaatatttagacgggattactaatccaacctctaaacgttttgccatgatttctgcttacaatagtggtgcaggcgcggttttacgtgtttttgaccaagatcgtgatgcggcgattgtgaagatcaatagtctttatcctgaacaggtttatcggattttgactactcaacatccatctgcgcaagcaagaaattacttacttaaagtggatcaagcacagaaaagttatcgcgtaagacgataa

SEQ ID NO: 41737 - protein, 360 aa, Pasteurella multocida subsp. multocida str. Pm70
MKMKKYIIYALIPFLFACGGTKTHRSSQFDEAFAKDTRGLDILTGQFSHNIDRIWGVNELLVASRKDYVKYTDRFYTRSHVSFDEGLITVETQSDLRHLQNAIVHILLMGSDANGIDLFASGDVPISSRPFLVGQVIDHLGGSITNTTTAGNFANYLLQNKLQTRRLSNGHTVQYVVIPMIANHVAVRAQRYLPLVRKMARRYNMDESLILGIMQTESSFNPYAISYANAIGLMQVVPTTAGRDIFKMKGKGGQPSKSYLFDPEKNIDAGTSYLWLLQNKYLDGITNPTSKRFAMISAYNSGAGAVLRVFDQDRDAAIVKINSLYPEQVYRILTTQHPSAQARNYLLKVDQAQKSYRVRR

SEQ ID NO: 41738 - DNA, 1140 bp, Vibrio vulnificus CMCP6
  CDS (1)..(1140): transl_table=11
atgaaaaagtttgggtattttttagctgcattgctcttaaccggttgtagccgcgaatttatcgaaaacatctatgacgtcaattaccaaccgaccaaccgctttgctaaaaatctcgcagagctgccaggacaatttgaaaaagacacggcagcactggatgctttgatcaacagcttctcaggcaatattgaaaaacgctgggggagccgagaaataaaaatggcaggcaaaagtaactatgtgaaatacatagataattacctcagccgagccgatgtcaactttagcaatggcaccatcctcattgagacggtttcacccacagaacccaaacagcacctgaaaaatgccattatcactaccttgctaactccagatgatccggccaatgtcgatcttttctcctccaaagagatccgcttggaagggcaaccttttctctacaatcaagtgttagatcaagacaaacaagctatccagtggacttggcgcgccaatcgctttgccgattatctgatcgccaataaactcaagacacgtacggttgattttaagaaagcctactacgttgaaattcccatggtggcagaccacgtagacaaacgcagttataaatacgccgatatcgtacgccgcgcctcaagaaagtacgacattcccgaagatctgatttacgccatcatcaaaaccgaaagcagtttcaacccttatgccgtgagctgggcaaacgcctatggcttaatgcaagtcgtaccgaaaaccgcaggccgcgatgtgttcaacttggttaaaaatcgcagtggcgaacccagtccggaatatctctttaacccagaaaacaatatcgacaccggaacggcctatttttatctgttgaaaaaccgctatctgaaagaggtcaatcatccaacatctctcgaatattcgatgatttcagcctacaacggtggtacaggcggtgtactcaacacctttaatcgcaacgatcgcaagcgcgcaatgcgcgatctcaacgcattgcaacccaatcaagtttattgggcattaaccaaaaaacaccccaatgcggaagctcgccgttatttggaaaaagtaaccaaattcaagcaagactttaatcaaggacattctctttga

SEQ ID NO: 41739 - protein, 379 aa, Vibrio vulnificus CMCP6
MKKFGYFLAALLLTGCSREFIENIYDVNYQPTNRFAKNLAELPGQFEKDTAALDALINSFSGNIEKRWGSREIKMAGKSNYVKYIDNYLSRADVNFSNGTILIETVSPTEPKQHLKNAIITTLLTPDDPANVDLFSSKEIRLEGQPFLYNQVLDQDKQAIQWTWRANRFADYLIANKLKTRTVDFKKAYYVEIPMVADHVDKRSYKYADIVRRASRKYDIPEDLIYAIIKTESSFNPYAVSWANAYGLMQVVPKTAGRDVFNLVKNRSGEPSPEYLFNPENNIDTGTAYFYLLKNRYLKEVNHPTSLEYSMISAYNGGTGGVLNTFNRNDRKRAMRDLNALQPNQVYWALTKKHPNAEARRYLEKVTKFKQDFNQGHSL

SEQ ID NO: 41740 - DNA, 1140 bp, Vibrio parahaemolyticus RIMD 2210633
  CDS (1)..(1140): transl_table=11
atgaagaaaattgcttttattgccaccgctctcttattggcaggctgtagtcgtgaattcgtcgaaaaaatttatgacgtgaactacgagccaaccaaccgctttgcaaacaacctagcagagctaccaggccagtttgaaaaagataccgccgcactcgatgcgttgatcaatagcttctcaggcaatatcaaaaagcgttggggacaacgtgaagtgaagttcgcaggtaaaagtaactacgttaagtacatcgacaattatttaagtcgggcagaagtggatttccagaaaggtcttatcactatcgagaccgtttctccgaccgaaccacaaaaacacttgaagaacgcgatcatcaccacattgctaacgccagatgatccagcaaacgtcgacttgttctcatcgaaagagatcaaactcgaaggccaaccctttttgtacaaacaggtgctcgatcaagataaaaagcccattcaatggtcatggcgcgcgaatcgcttcgctgactatctgattgccaataacatcaaaaccaaagatgtagactttaaaaaagcgtattacgttgagattccaatggtagaggatcacttctctcagcgtagttaccaatacgcggatatagtgcgtcgcgcgtcaaaaaaatacgacattcctgaagatctgatttacgccatcatcaaaaccgagagcagttttaacccttacgcagtaagttgggccaatgcttatggattgatgcaagtagtgcctaaaaccgctggtcgtgatgtatttaagctcgtaaagaacaaatcaggacaacctagcccagagtatttgttcaacccagaaaacaatattgacacaggaaccgcctacttctacatcctcaaaaaccgttatttacgcgaagttcagcatccaacttcgttagagtacagtatgatttccgcttacaacggtggaactggtggtgttttaaacacatttaatcgcagtgaccgaaaacgcgcgatgcgagatctcaattctttgcaacccaaccaagtttattgggcgctaactaagaaacatccgaacgctgaagcgcgtcgttacctagaaaaagttacaaatttcaaaaaggaatttaactctgagcacactttgtaa

SEQ ID NO: 41741 - protein, 379 aa, Vibrio parahaemolyticus RIMD 2210633
MKKIAFIATALLLAGCSREFVEKIYDVNYEPTNRFANNLAELPGQFEKDTAALDALINSFSGNIKKRWGQREVKFAGKSNYVKYIDNYLSRAEVDFQKGLITIETVSPTEPQKHLKNAIITTLLTPDDPANVDLFSSKEIKLEGQPFLYKQVLDQDKKPIQWSWRANRFADYLIANNIKTKDVDFKKAYYVEIPMVEDHFSQRSYQYADIVRRASKKYDIPEDLIYAIIKTESSFNPYAVSWANAYGLMQVVPKTAGRDVFKLVKNKSGQPSPEYLFNPENNIDTGTAYFYILKNRYLREVQHPTSLEYSMISAYNGGTGGVLNTFNRSDRKRAMRDLNSLQPNQVYWALTKKHPNAEARRYLEKVTNFKKEFNSEHTL

SEQ ID NO: 41742 - DNA, 1086 bp, Salmonella enterica subsp. enterica serovar Typhi Ty2
  CDS (1)..(1086): transl_table=11
atgatgaaaaaattactcgcgcttgctgttattgcgccgttgctcatctcctgctccagttcgaccaaaaaaggcgagacgtataatgaagcctgggtcaaggataccaacggctttgatattttgatggggcaatttgccaacaatattgaaaatctgtggggatataaggaagtcctgatcgccgggccgaaagactacgtcaaatataccgatcagttccagacccgtagccacatcaactttgatgatgggaccattaccgttgaaaccatcgccgggacggaacctaccgcacatctgcgccgggccattattaaaacgttgctcatgggtgacgacccaacctccgtcgatctttactccgatgtcgatgacataaaaatttctaaagaacccttcctgtatggtcaggtcctcgacaataccggccagcctattcgctgggaaggccgcgccacgacattcgcggattacttgctgaaaacgcggctcaaaagccgcagtaacggcctgcgtattatttacagcgtcaccattaatctggtgccgaaccaccttgataaacgcgcgcataaatacattggcatggtacgccaggcctcccgtaaatacggcgttgacgagtcgctgattctggcgattatgcaaacggagtcctcgtttaacccgtatgcggtcagccacgcggatgcgctgggcctgatgcaggtagtgcaacacagcgccgggaaagatgttttccgttctcagggtaagtccggcacgccaagccgtaacttcctgttcgaccccgccagcaatatcgataccggcacagcgtatctggcgatgttgaataatgtctatctgagcggtatcgagaatccgacgtcgcggcgctatgcggtcattactgcctataatggcggcgcaggcagcgtattacgcatattctcgaacgataagattcaggccgcgaatatgattaaccgcatgtcgccgggggatgtgtaccagatattaaccacccgacatccatctgcggagtcgcgccgctatctgtataaggtgaattccgcccagcgatcgtatcgccgccgataa

SEQ ID NO: 41743 - protein, 361 aa, Salmonella enterica subsp. enterica serovar Typhi Ty2
MMKKLLALAVIAPLLISCSSSTKKGETYNEAWVKDTNGFDILMGQFANNIENLWGYKEVLIAGPKDYVKYTDQFQTRSHINFDDGTITVETIAGTEPTAHLRRAIIKTLLMGDDPTSVDLYSDVDDIKISKEPFLYGQVLDNTGQPIRWEGRATTFADYLLKTRLKSRSNGLRIIYSVTINLVPNHLDKRAHKYIGMVRQASRKYGVDESLILAIMQTESSFNPYAVSHADALGLMQVVQHSAGKDVFRSQGKSGTPSRNFLFDPASNIDTGTAYLAMLNNVYLSGIENPTSRRYAVITAYNGGAGSVLRIFSNDKIQAANMINRMSPGDVYQILTTRHPSAESRRYLYKVNSAQRSYRRR

SEQ ID NO: 41744 - DNA, 1227 bp, Helicobacter hepaticus ATCC 51449
  CDS (1)..(1227): transl_table=11
ttgaaaactctttgttctttaaagattctatacttttgcagagataaatttacatatacatttatatgtatgcttatagcaatcatatgtatggggagtttttggggttgctctgctttgggtaacaatgctcaaatcaccattaccgaagaccctcattatgcgataaaacaagtagcaggcaatcagcttaggatttccactgaccaaaaggcattattacgcgatataaaagaagttaagcgtcaatataccaaagtcactaatgctcttagtggaaatgtcgctaaacaatggagcaatgaagatgtcagtttgcccagtgctcaaacttatgtgagatactctaatcattataagtctaaagcaagtattaattttagcacaggtgctattcgtatagaaaccattgacacacaaaatcccgcaaaatctttggaaagagctattactcatactcttttgctccctcaagacccaagcaagatagatttatattctgatgacgattttacttttgatggaaagccatttcttgcaggattaataaaagataatgagggagaggatattttaacacaatggcgagcagagagatatgccaaatatcttattgaaaatacgctcaaaacgcgcaaagatagcaaaggaaaaaaagtaagttatgtggatttacaaatggttggggattatcaaagcaaaaatgaacatagatatgaggaacttgtaaaaaaatatgctcgtaaatacaatatctctcccgctcttgtgttaggtattatccaaacagaatctaacttcaatccttacgctgtaagtgcagctccagcttatgggcttatgcaagtggtcccaagcacagcaggagctgatgcgtatgagcttatcaatggtaaaaaaggtatgcccacaaaaaaaatgctctttaatcccgaaacaaatattgaatatggcgtagcgtatttaagcatactttttaatcgctatttgccaaatgtcaaagataaacaaagtcaagaatattgtgttattaccgcatataatgcaggagctggaagtgtgttaaggacttttcataatgacaaaaatcaagcttttaatcgcatcaatgcactctcatctgctaaagtctatgatacactgcgttcaaaactcccctctgatgaagggaagcggtatctcctcaaagtcagcacatttaagaaaaattacgaacatatcaaatga

SEQ ID NO: 41745 - protein, 408 aa, Helicobacter hepaticus ATCC 51449
MKTLCSLKILYFCRDKFTYTFICMLIAIICMGSFWGCSALGNNAQITITEDPHYAIKQVAGNQLRISTDQKALLRDIKEVKRQYTKVTNALSGNVAKQWSNEDVSLPSAQTYVRYSNHYKSKASINFSTGAIRIETIDTQNPAKSLERAITHTLLLPQDPSKIDLYSDDDFTFDGKPFLAGLIKDNEGEDILTQWRAERYAKYLIENTLKTRKDSKGKKVSYVDLQMVGDYQSKNEHRYEELVKKYARKYNISPALVLGIIQTESNFNPYAVSAAPAYGLMQVVPSTAGADAYELINGKKGMPTKKMLFNPETNIEYGVAYLSILFNRYLPNVKDKQSQEYCVITAYNAGAGSVLRTFHNDKNQAFNRINALSSAKVYDTLRSKLPSDEGKRYLLKVSTFKKNYEHIK

SEQ ID NO: 41746 - DNA, 1068 bp, Wigglesworthia glossinidia endosymbiont of Glossina brevipalpis
  CDS (1)..(1068): transl_table=11
atgaaaaaaatatcttttttatttattgttatttttttacaaacatcatgttctaatagtcataataatataaatcaaaataaactaataaataaaaatagcttaaacataattgtgaaaaatattatttcagattctgaaaacacttggaatgataataaaatatttatgattgaacactctaaagtttataattataataataaaaatattacattaattaatattgattttacttttaaaaaaatagttattgaaactgatttcaaaaaagatccaaaaaattacttacgtcaagcaattataattgctttgttattaaataatgatttttctgatttcgatcagaacaataaatataatattttacaaagaaaagaacctttattgtatggacaagtagtagataattatggagtctatattagacataaatggcgtgcaaataagtttgcaaattatctattgaaaacaaatctaaaaacatataaaaataataaaaaacaaatttggtctgtttcaataccattgaaatttaatcgttcagacaaaagagcaaataaatatttaaattttatttataaatcttcaaaaagatataatgtagataaatctttaattttagctataatagaagcagaatctaattttaatccgcatgctataagtaattctaacgctttaggattaatgcaaatagtgcaacataccgcaggaaaagatgtttttaaaatgagaggaaaacttggatatcctagtaaaaatgctttattaaacccagaaaaaaacatagatattggaactgcatatttatctttacttagagataattacttaagctctattttgaatcctatctcaaaaagatatgcgatgatagcctcttaccatggaggtgtatctgcaatgttaactactttttcaagtaatcaaataaaagcttttcatattataaataatttatctccggaagaagtttatagattaatatataaaaaacatccatctatagaatctcgaagatatttatttaaggtatataatttacaaaaagcttattgcaaataa

SEQ ID NO: 41747 - protein, 355 aa, Wigglesworthia glossinidia endosymbiont of Glossina brevipalpis
MKKISFLFIVIFLQTSCSNSHNNINQNKLINKNSLNIIVKNIISDSENTWNDNKIFMIEHSKVYNYNNKNITLINIDFTFKKIVIETDFKKDPKNYLRQAIIIALLLNNDFSDFDQNNKYNILQRKEPLLYGQVVDNYGVYIRHKWRANKFANYLLKTNLKTYKNNKKQIWSVSIPLKFNRSDKRANKYLNFIYKSSKRYNVDKSLILAIIEAESNFNPHAISNSNALGLMQIVQHTAGKDVFKMRGKLGYPSKNALLNPEKNIDIGTAYLSLLRDNYLSSILNPISKRYAMIASYHGGVSAMLTTFSSNQIKAFHIINNLSPEEVYRLIYKKHPSIESRRYLFKVYNLQKAYCK

SEQ ID NO: 41748 - DNA, 1179 bp, Wolinella succinogenes DSM 1740
  CDS (1)..(1179): transl_table=11
atgcgttttattcttcccgcactcattctcctttttcttttgggctgctcgcttagcgattatcaaagcatcgctagggctgcactctccaaagacccttcagccgccgcctcggcactcgctagacaaaaatcactccaatacgccaagaatcccaaggcactcgcgagagaccttgaaaacatcaaaatcgattttgacaaaattcgtgccctctttttgggtgaagtctctaaaaaatggggcaaagaggagacaaggagcgcgagccaaaaggtctatgtcaaatacaccgaccactacaaaagtcgagcggaagtcgattttgaaaaaggcgagattgtggtggagaccatcgacttggagaattcgacccagtcgctcaaaaaagcgatcattacaaccctccttactcctcaagaccccgaaggagtggatctctattccgacaaagagataaagtttgaggggactccttatctggcgggcttggtgaaggaccacgaagagaaggtgatactctatgagtggcgtgcctcacgatacgcggactacctgctgaaaaactcccttaaagagcgcaccgctaagggcgggcagagggtctattatgtgatgattcccatgactcgggattatgtgaaggtgcgaagtgctaagtatggcgatattgtcaaaaaatacgccaaacttcaccatctcaacgaagccttggtgttggccatcatccaaagcgaaagcagttttaatccctatgcggtgagccaagcacccgcctatggattgatgcagatcgtgcctcagagcgcaggtcgtgatgcacacaaagagattcatggagtggatggattcccaacgcgctccatgctttttgatccagagaccaatattcgctatgggacgacctatttgaggattctcttcacgcgctatcttgagggggtcaaacaccctcagagtcttgagtattgcgtcatctccgcctacaatacagggagcgggaatgtgcttcggacctttgatggcaatcgcaccaaagcccttggcaaaatcaatgcccagacccctcaagaggtctatcgaaaacttcgcacctccttgccttatgaggagacgagaaactatctcaaaaaagtgactgaagccaagcgaagcttcattgtctacgaaaagccctag

SEQ ID NO: 41749 - protein, 392 aa, Wolinella succinogenes DSM 1740
MRFILPALILLFLLGCSLSDYQSIARAALSKDPSAAASALARQKSLQYAKNPKALARDLENIKIDFDKIRALFLGEVSKKWGKEETRSASQKVYVKYTDHYKSRAEVDFEKGEIVVETIDLENSTQSLKKAIITTLLTPQDPEGVDLYSDKEIKFEGTPYLAGLVKDHEEKVILYEWRASRYADYLLKNSLKERTAKGGQRVYYVMIPMTRDYVKVRSAKYGDIVKKYAKLHHLNEALVLAIIQSESSFNPYAVSQAPAYGLMQIVPQSAGRDAHKEIHGVDGFPTRSMLFDPETNIRYGTTYLRILFTRYLEGVKHPQSLEYCVISAYNTGSGNVLRTFDGNRTKALGKINAQTPQEVYRKLRTSLPYEETRNYLKKVTEAKRSFIVYEKP

SEQ ID NO: 41750 - DNA, 1140 bp, Vibrio vulnificus YJ016
  CDS (1)..(1140): transl_table=11
atgaaaaagtttgggtattttttagctgcattgctcttaaccggttgtagccgcgaatttatcgaaaacatctatgacgtcaattaccaaccgaccaaccgctttgctaaaaatctcgcagagctgccaggacaatttgaaaaagacacggctgcactggatgctttgatcaacagcttctcaggcaatattgaaaaacgctgggggagccgagaaataaaaatggcaggcaaaagtaactatgtgaaatacatagacaattacctcagccgagccgatgtcaactttagcaatggcaccatcctcattgagacggtttcacccacagaacccaaacagcacctgaaaaatgccattatcactaccttgctaactccagatgatccggccaatgtcgatcttttctcctccaaagagatccgcttggaagggcaaccttttctctacaatcaagtgttggatcaagacaaacaagctatccagtggagttggcgcgccaatcgctttgccgattatctgatcgccaataaactcaagacacgtacggttgattttaagaaagcctactacgttgaaattcccatggtggcagaccacgtagacaaacgcagttataaatacgccgatatcgtacgccgcgcctcaactaagtacgatattcccgaagatctgatttacgccatcatcaaaaccgaaagcagcttcaacccctatgcagtgagctgggccaacgcctatggtttgatgcaagtggtgcccaaaacggctgggcgcgatgtgttcaacttggttaaaaatcgcagtggcgaacccagtccggaatatctctttaacccagaaaacaatattgacaccggaacggcttatttttatctgttgaaaaatcgctatctaaaagaggtcaatcatccaacatctctcgaatattcgatgatttcagcctacaacggtggcacaggcggggtactcaatacctttaatcgcaatgatcgcaagcgcgcaatgcgcgatctcaacgcattgcaacccaatcaagtgtattgggcattaaccaaaaaacaccccaatgcagaagctcgccgttatttggaaaaagtaaccaagttcaagcaagactttaatcaaggacattctctttga

SEQ ID NO: 41751 - protein, 379 aa, Vibrio vulnificus YJ016
MKKFGYFLAALLLTGCSREFIENIYDVNYQPTNRFAKNLAELPGQFEKDTAALDALINSFSGNIEKRWGSREIKMAGKSNYVKYIDNYLSRADVNFSNGTILIETVSPTEPKQHLKNAIITTLLTPDDPANVDLFSSKEIRLEGQPFLYNQVLDQDKQAIQWSWRANRFADYLIANKLKTRTVDFKKAYYVEIPMVADHVDKRSYKYADIVRRASTKYDIPEDLIYAIIKTESSFNPYAVSWANAYGLMQVVPKTAGRDVFNLVKNRSGEPSPEYLFNPENNIDTGTAYFYLLKNRYLKEVNHPTSLEYSMISAYNGGTGGVLNTFNRNDRKRAMRDLNALQPNQVYWALTKKHPNAEARRYLEKVTKFKQDFNQGHSL

SEQ ID NO: 41752 - DNA, 1089 bp, Yersinia pseudotuberculosis IP 32953
  CDS (1)..(1089): transl_table=11
atggcttgtaagatgaagaaaattttagctttgctggtaatcgcccccttattagtgtcttgttcgggcaacaaaaatcaggttgaaaacgaagtttttgtcaaagacaccaatggttttgagattttaatgggccaatttgcccataacattgaaaatatttggggcttaaaagaagtcttaatcgctggtccaaaagattacgttaagtacacggatcaatatcaaacccgcagccatatcaattttgatgctggtaccattacgatagagacgatcgccacgaccaatccggcggcacatttacgtcaggcgatcatcacaacgctactgatgggtgatgatccaggctcgatcgacctctattctgatgtaaacgatattcagatcagtaaagagccgttcctctatggccaggtgctggacaacaatggcgaaccaatccgttgggaatggcgggcagcccattttgctgattatttgctacaaaacaaaatgcaaacacggacttccggtttgcatgtgatctcgttcgttaccatacagttagtgccaaaccatctggacaaacgggcgcataaatacctgccattggtacggaaatcagcagcacgttacggcgtggaagagtctttgattctcgccattatgcaaaccgaatcgagcttcaacccctatgccgtcagccgttctgatgcgctcggtctgatgcaggtggttcaacatactgcaggaaaagatgtattcaaactgaaaggcaaaagtggccaaccaagccgcagctatctgtttgatcctgaaaataatatcgacgcaggcaccgcatatttatctattctgcaaaatacctatttgggggggattcaaaatgccacctcacggcgttatgccgtgatcacctcctacaacggcggcgcaggtagcgtattgcgcgtgttccacagcgataaaaataaggcagtgggtatcattaacacgatgtcaccaggggatgtgttccaaacactcacgaccaagcatccatcaggtgaatcccgccgttatctggtgaaagtgaacagcgcacagaagaactatcgccgctattag

SEQ ID NO: 41753 - protein, 362 aa, Yersinia pseudotuberculosis IP 32953
MACKMKKILALLVIAPLLVSCSGNKNQVENEVFVKDTNGFEILMGQFAHNIENIWGLKEVLIAGPKDYVKYTDQYQTRSHINFDAGTITIETIATTNPAAHLRQAIITTLLMGDDPGSIDLYSDVNDIQISKEPFLYGQVLDNNGEPIRWEWRAAHFADYLLQNKMQTRTSGLHVISFVTIQLVPNHLDKRAHKYLPLVRKSAARYGVEESLILAIMQTESSFNPYAVSRSDALGLMQVVQHTAGKDVFKLKGKSGQPSRSYLFDPENNIDAGTAYLSILQNTYLGGIQNATSRRYAVITSYNGGAGSVLRVFHSDKNKAVGIINTMSPGDVFQTLTTKHPSGESRRYLVKVNSAQKNYRRY

SEQ ID NO: 41754 - DNA, 1086 bp, Mannheimia succiniciproducens MBEL55E
  CDS (1)..(1086): transl_table=11
ttgataaaagtaatgaagctaaaaaaatttcttgtcttactcttaattccgtttttatacgcctgttcgtcggatcgttccggtaattacgatgacgcctttgcaaaagatactaacgggttagatttgctcacggggcaattctcacaaaatattgaccaaatttggggcgttaatgaacttttagtggcaagccgtaaagattacgtaaaatatacggatagttattacacacgtagccatatcagttttgaagaaggtcagattaccattgaaaccctggctgatgccaaccgcctgcacagtgcgattgtacatacattattaatggggtccgacgccaaaggtattgatttattcgcctccggcgacgtaccgataagctcgcgcccgttcttggtcggtcaggtggtggataatttcggacgtcagattaataatattgatgtcgccaacagcttcgccagttatttattacaaaacagattgcaaagccgtcgtttaagtaatggtcgcacggtgcaatttgtttctattcagatgattgcaaaccacgttaatgtgcgtgcaagaaaatatttatcgttggtgcgtcaggcgtcacgccgttacggcattgacgaaagcctgattctcggcattatgcaaacggaatccagtttcaacccttatgcgattagttatgccaacgcaatgggtttaatgcaggttgttccgcataccgcaggtcgcgatatatttaaacttaaaggccgttcagggcaaccaagtaagagctatttatttgatcctgcaaataatattgatgcgggcgtgtcttatttatggattcttaaaaatgaatatctcgccggtattaccaatccgacttccatgcgttatgccatgatatccgcctataacagcggcgccggcgccgtattacgggtatttgacagcgatcaggaatatgccattaacatcattaacagaatgcagccggaacaggtatatcgtattttgacgaccgttcatccgtcttcacaggccagaaactatctgctgaaagtagataaggcgcagcgaagttaccgtcgggcaagataa

SEQ ID NO: 41755 - protein, 361 aa, Mannheimia succiniciproducens MBEL55E
MIKVMKLKKFLVLLLIPFLYACSSDRSGNYDDAFAKDTNGLDLLTGQFSQNIDQIWGVNELLVASRKDYVKYTDSYYTRSHISFEEGQITIETLADANRLHSAIVHTLLMGSDAKGIDLFASGDVPISSRPFLVGQVVDNFGRQINNIDVANSFASYLLQNRLQSRRLSNGRTVQFVSIQMIANHVNVRARKYLSLVRQASRRYGIDESLILGIMQTESSFNPYAISYANAMGLMQVVPHTAGRDIFKLKGRSGQPSKSYLFDPANNIDAGVSYLWILKNEYLAGITNPTSMRYAMISAYNSGAGAVLRVFDSDQEYAINIINRMQPEQVYRILTTVHPSSQARNYLLKVDKAQRSYRRAR

SEQ ID NO: 41756 - DNA, 1167 bp, Desulfovibrio desulfuricans G20
  CDS (1)..(1167): transl_table=11
atgaaaaaaatggcattgccgctgctttgcgcaacgctgctttgcgcatgctcccccggcgaggcagtacgcatggcccgcgtggccacatcaggagacatggccggcgccgcggcactggcccgtgacaagggtatccgctatgccatgaatccggcacagctggaggctgacctcaaacagcttgcccgccgcctgcaggaattcagagacgccgtggcaggcaaatggggcaaggatgaaaccagagaggccggtcccaaagaatatgtcaaatacacacagaattatctgtcgcgtgccagcgttgattttgacaaaggcgttgtgactgtggagactgttgacgacaaatcaccagaaaagagcctgcacagtgccattgtaaccacgctgctgacccccgccgatccgcgcgctgtggatatgtattccgccggtgaggttcgtctgggcgaggaaccttttctatacaatgaggtggtagactaccacggcaagcccatacgttgggcatggcgtgccgagcgctacgccagcgatctcatccggcgggcaaggaccatgcggcaggtcacagtggacggaaaacgggttactgtacacagtgtctcgtttgccatggtcaaagaccatctgcatatccgggcgcgcaagtttcgtgagcctgtccggcggtttgcccgtgagtacggaataagccccaatctggtatacgccgtcatgaaaacggaaagtgacttcaacccctttgcggtcagccatgctcccgcttacggacttatgcaggttgtgccttccaccgcgggaagcgacgtgtatacaatgcttaacggcaggaagggttccccgacgccggagcagctttttgatcccgagatcaatatccgctacggcacggcgtatcttttcattctcaataacaggtacctttccgacatccgccatccggtatcccgcgaatactgcatgattgccgcttacaacggcggcgcaggagccgtgttgcgcagcttccacgaaaacaggcggactgccgcagaaatcatcaactcactttcgcccgatgaagtgtatgacaggctgcaaaagcggcttccgtccatggaaacccgcagatatctgtggaaagtggggcaagcgcgcaaagagtttgttgcactctga

SEQ ID NO: 41757 - protein, 388 aa, Desulfovibrio desulfuricans G20
MKKMALPLLCATLLCACSPGEAVRMARVATSGDMAGAAALARDKGIRYAMNPAQLEADLKQLARRLQEFRDAVAGKWGKDETREAGPKEYVKYTQNYLSRASVDFDKGVVTVETVDDKSPEKSLHSAIVTTLLTPADPRAVDMYSAGEVRLGEEPFLYNEVVDYHGKPIRWAWRAERYASDLIRRARTMRQVTVDGKRVTVHSVSFAMVKDHLHIRARKFREPVRRFAREYGISPNLVYAVMKTESDFNPFAVSHAPAYGLMQVVPSTAGSDVYTMLNGRKGSPTPEQLFDPEINIRYGTAYLFILNNRYLSDIRHPVSREYCMIAAYNGGAGAVLRSFHENRRTAAEIINSLSPDEVYDRLQKRLPSMETRRYLWKVGQARKEFVAL

SEQ ID NO: 41758 - DNA, 1092 bp, Haemophilus somnus 129PT
  CDS (1)..(1092): transl_table=11
atgaaaaaatatattgtatttgcgattattccttttctttttgcttgtagtagttctacgctaaatgatgactatgatgaagcttttgcaaaagatactcaaggacttgatattttaaccgggcaattttctcataatatcgatcaaatttggggagtaaatgaactcctcgtggcaagcagaaaagactatgtaaaatacacagataatttttacactcgcagtcatatcagctttgatgaaggttctattatgattgaaacgttgggtgataaaagtcgtttatatcattcgattattcatactttattaatgggtgcggatgcaaaaggaatcgatttatttacctctggcgatgtgcccatcagttctcgtccattcctcgtcggattagttgttgatcataaaggtaaacaagttaaaaatattgcgacggcaagtaattttgcaaattatcttttacaaaataagttgcaaacacgttacctcactaatgggaatcctgtacagtatgttattattccaatggttgcaaaccatgttgcagtgcgtgcccaacgctatttacctctaattcgaaaagccgccggacgttatgggatagatgaaagtttaattcttggtattatgcaaacggaatcaagtttcaatccttatgcaattagttatgctaacgcaataggtttaatgcaagttgtacctcatactgcagggcgagatgtattccgtttaaaagggttaaacgggcaaccgtcaaaaaaatatctctttaatcccgctaaaaatattgatacaggtgttgcctatttgactttattacgggataaatatttagatggtataacaaatccaacttcaaaacgttttgcaatgatttccgcttacaatagcggtgccggagcagtactacgagtgtttcataatgatcgagatatagcaattaacaaaattaatcgcttatatccggagcaagtatatcgtattcttactactatgcacccctctgagcaagcaagaaattatttactcaaagtagataaagcacaaaaaagttatagagtgattaagaatagcgaatctgatttgccttaa

SEQ ID NO: 41759 - protein, 363 aa, Haemophilus somnus 129PT
MKKYIVFAIIPFLFACSSSTLNDDYDEAFAKDTQGLDILTGQFSHNIDQIWGVNELLVASRKDYVKYTDNFYTRSHISFDEGSIMIETLGDKSRLYHSIIHTLLMGADAKGIDLFTSGDVPISSRPFLVGLVVDHKGKQVKNIATASNFANYLLQNKLQTRYLTNGNPVQYVIIPMVANHVAVRAQRYLPLIRKAAGRYGIDESLILGIMQTESSFNPYAISYANAIGLMQVVPHTAGRDVFRLKGLNGQPSKKYLFNPAKNIDTGVAYLTLLRDKYLDGITNPTSKRFAMISAYNSGAGAVLRVFHNDRDIAINKINRLYPEQVYRILTTMHPSEQARNYLLKVDKAQKSYRVIKNSESDLP

SEQ ID NO: 41760 - DNA, 1098 bp, Actinobacillus pleuropneumoniae serovar 1 str. 4074
  CDS (1)..(1098): transl_table=11
atgaaaaaatatactaaatatttaccgctactgttgattattccgtttttagccgcttgcggcagtagttctcctaaaaagagtaaaagaaccaaaactcgtgtggactacaacactaaagatactaacggtttagatattttaacggggcagttttcgcataatattgacgatatttggggaagcaacgagcttttagtcgcaagtaaaaaagattacgtaaaatatacggataagttttatacgcgtagccatatttcttttgaagacggtcaaatcacgattgaaactttaggtgaccaaaatcatctacgtaacagtattattcacaccttattgatgggatcggacccgaaagggatcgacttattcgcttccggtgatgcgccgattagcagtaatccgttccttgccggtcaggtgaacgatcaattcgggcgcgatatcaataatattgcgatcgccaacgattttgcgacctatttaatccaaaataaattgcaaactcgtcgcttgcaaaacggcagaacagtaacttatgtagcgattaaaatggtggcggggcatatcgaagtgcgcgcgcgccaatatctgccgctggtacgtaagatggcaaaacgttacggcattgagcctagtttaattttgggtattatggaagtcgaatcggcattcaacccgtatgcggtcagttatgcgaacgctatcggcttaatgcaggttgtaccgcgtaccgccggacgcgatatttttgcccgtaaaggttttgacggacagccggatcgcgcttatttatataacccgtcgcaaaatatcgattcgggtacgttatatttagcgattttacgtgatgaatatttggaaggaatcactaatccgaccgcaaaacgttatgcgatgatttccgcttataacagtggcgccggtgcggtgcttaaagtcttcgattacgataagtatgatgcgatcgatcgtattaacgaactttcgccggatgcggtttatcgcattttaacgaccgcacatccgtcaagccaagctcgaaattatttgaagaaagtatcaaaagcgcgcgagaaatatttacacattcgataa

SEQ ID NO: 41761 - protein, 365 aa, Actinobacillus pleuropneumoniae serovar 1 str. 4074
MKKYTKYLPLLLIIPFLAACGSSSPKKSKRTKTRVDYNTKDTNGLDILTGQFSHNIDDIWGSNELLVASKKDYVKYTDKFYTRSHISFEDGQITIETLGDQNHLRNSIIHTLLMGSDPKGIDLFASGDAPISSNPFLAGQVNDQFGRDINNIAIANDFATYLIQNKLQTRRLQNGRTVTYVAIKMVAGHIEVRARQYLPLVRKMAKRYGIEPSLILGIMEVESAFNPYAVSYANAIGLMQVVPRTAGRDIFARKGFDGQPDRAYLYNPSQNIDSGTLYLAILRDEYLEGITNPTAKRYAMISAYNSGAGAVLKVFDYDKYDAIDRINELSPDAVYRILTTAHPSSQARNYLKKVSKAREKYLHIR

SEQ ID NO: 41762 - DNA, 1074 bp, Haemophilus influenzae R2846
  CDS (1)..(1074): transl_table=11
atgaaaaaatatttattattggcattattgccttttttgtatgcttgtagtaattcatcgaatcaaggtattaactatgatgaagcctttgctaaagacacgcaagggttagatattctcacagggcaattctcgcataatattgaccgaatttggggcgtaaatgaattgttagtggcaagccgtaaagattatgtgaaatatacagattctttttatacgcgtagccatgtgagttttgatgaaggtaatatcgttattgaaacccagcaagatttaaatcgattacataatgctattgttcataccttgttaatgggagcggatgcaaaaggtattgatttatttgcatctggtgatgtgccgattagctctcgtccatttcttttggggcaggttgtagatcatcaagggcaacaaattgctaatcaagttatcgcaagtaatttcgccacttatttgattcaaaataaattgcaaacacgtcggttacagaatgggcataccgtgcaatttgtctctgttcctatgattgcaaaccacgtagaagtgcgtgcacgaaaatatttaccattaattcgtaaagctgcacaacgttatggcatcgatgaaagtttgattttgggcattatgcaaacagaatcaagttttaacccatatgcgattagctacgcaaatgctattggattaatgcaagtcgtgcctcatacagcaggtcgagatgtatttgcaatgaaaggcaaaggtggacagccatcaacgcgttatttatatgatcctgcgaataatattgatgctggtgtgtcttatttatggattttgcaaaatcaatatttagatggaattacgaatccaacctcaaaacgttttgccatgatttctgcgtataatagtggtgcaggtgcagtgttacgtgtttttgataatgataaggatacggcgatttacaaaatcaatcaaatgtatccagaacaagtttatcgcattctaacgacagttcacccatcatcacaagcacgcaattatttgttgaaagttgataaggcacagaaaaaattccgtgttagacgataa

SEQ ID NO: 41763 - protein, 357 aa, Haemophilus influenzae R2846
MKKYLLLALLPFLYACSNSSNQGINYDEAFAKDTQGLDILTGQFSHNIDRIWGVNELLVASRKDYVKYTDSFYTRSHVSFDEGNIVIETQQDLNRLHNAIVHTLLMGADAKGIDLFASGDVPISSRPFLLGQVVDHQGQQIANQVIASNFATYLIQNKLQTRRLQNGHTVQFVSVPMIANHVEVRARKYLPLIRKAAQRYGIDESLILGIMQTESSFNPYAISYANAIGLMQVVPHTAGRDVFAMKGKGGQPSTRYLYDPANNIDAGVSYLWILQNQYLDGITNPTSKRFAMISAYNSGAGAVLRVFDNDKDTAIYKINQMYPEQVYRILTTVHPSSQARNYLLKVDKAQKKFRVRR

SEQ ID NO: 41764 - DNA, 1074 bp, Haemophilus influenzae R2866
  CDS (1)..(1074): transl_table=11
atgaaaaaatatttattattggcattattgccttttttgtatgcttgtagtaattcatcgaatcaaggtattaactatgatgaagcctttgctaaagacacgcaagggttagatattctcacagggcaattctcgcataatattgaccgcatttggggtgtcaatgaattattagtggcaagccgtaaagattatgtgaaatatacagattccttttatacgcgtagccatgtgagttttgatgaaggtaatatcgttattgaaacccagcaagatccaaatcgtttacataatgcgattgttcataccttgttaatgggagcggatgcaaaaggtattgatttatttgcttctggcgatgtgccgattagctctcgcccatttctcttggggcaggttgtggatcatcaaggacaacaaattgcgaaccaagttatcgcaagtaatttcgccacttatttgattcaaaataaattgaaaactcgtcggttacagaatgggcataccgtgcaatttgtctctattcctatgattgcaaaccacgtagaagtgcgtgcacgaaaatatttaccattgattcgtaaagctgcacaacgttatggcattgatgaaagtttgattttgggcattatgcaaacagaatcaagttttaacccatatgcgattagctacgcaaatgctattggattaatgcaagtcgtgcctcatacagcaggtcgagatgtatttgcaatgaaaggcaaaggtggacagccatcaacgcgttatttatatgatcctacgaataatattgatgctggtgtatcttatttgtggattttacaaaatcaatatttagatggaattacgaatccaacctcaaaacgttttgcaatgatttctgcgtataatagtggtgcaggcgcagtgttacgtgtttttgataatgataaggatacggcgatttacaaaatcaatcaaatgtatccagaacaagtttatcgcattctaacgacagttcacccatcatcacaagcacgcaattatttgttgaaagttgataaggcacagaaaaaattccgtgttagacgataa

SEQ ID NO: 41765 - protein, 357 aa, Haemophilus influenzae R2866
MKKYLLLALLPFLYACSNSSNQGINYDEAFAKDTQGLDILTGQFSHNIDRIWGVNELLVASRKDYVKYTDSFYTRSHVSFDEGNIVIETQQDPNRLHNAIVHTLLMGADAKGIDLFASGDVPISSRPFLLGQVVDHQGQQIANQVIASNFATYLIQNKLKTRRLQNGHTVQFVSIPMIANHVEVRARKYLPLIRKAAQRYGIDESLILGIMQTESSFNPYAISYANAIGLMQVVPHTAGRDVFAMKGKGGQPSTRYLYDPTNNIDAGVSYLWILQNQYLDGITNPTSKRFAMISAYNSGAGAVLRVFDNDKDTAIYKINQMYPEQVYRILTTVHPSSQARNYLLKVDKAQKKFRVRR

SEQ ID NO: 41766 - DNA, 1134 bp, Photobacterium sp. SKA34
  CDS (1)..(1134): transl_table=11
atgaaaaaagcattgctcattattacaacctgtttacttgccgcagggtgttcatcaaaccaagttgaatgtctctataactgcaagcccacttatcccaaccaaaacgggaatatcaatggtggaaatataaacacaggtaatgtgaataatgagcaagccatgcaggcattattggcttatcttggtgtgcaagtaaaaaagcaatggggcgatgacgaattccttcaagcaggaaaacaccgttatgtgaaatactttgatggttatcgtacgcgtgcgcacattgattttgataacggtaaaatttacgtttcaactgttgctcaatacgcaccagaagccacattgagaaaagcgattgaagaaaccttgctaatgccagccgatccatcccaagtggatttgttcagtgacaaatcgattccattaaacggtaagcctttcttacttgggcaagttaaagaccaagataaccaagatattcaatggccttggcgtgctgggcgatttgcggattatttaattgaaaataagctgaaaatgaaaccattaaaacgtggaaatgcttattttgttgaaatagatatggttagcgatcaccttgaacaacgcgaataccaatatgctgatattataaaacgtgcatcaaagcaatacggtatttctgaagagcttatctatgcaattgtaaaaacagaaagtagttttaacccttttgcagttagtaatgcaggggcttacggtttaatgcaagtgatcccgaaaacagcgggtgcagatgtgtttaaactggtgaaaaacaaacccggcataccaaccaaagattacctcttcgatccagcaaacaatatcgatacgggtacggcttatttttatattcttaaaaatcgttatttaaaagaagtgcgaaatcctaccactaagcattacagtatgatttcagcctacaatggcggtacgggcggattattatcaacatttgatacagatagaaaacgcgctatggataagttgaatcaattacaaccagatcaagcttattgggcattaaccaataaacatccgaaacttgaagcgcgccgatacttagaaaaagtgctgaacttccaaaaagaatttcagtcactatga

SEQ ID NO: 41767 - protein, 377 aa, Photobacterium sp. SKA34
MKKALLIITTCLLAAGCSSNQVECLYNCKPTYPNQNGNINGGNINTGNVNNEQAMQALLAYLGVQVKKQWGDDEFLQAGKHRYVKYFDGYRTRAHIDFDNGKIYVSTVAQYAPEATLRKAIEETLLMPADPSQVDLFSDKSIPLNGKPFLLGQVKDQDNQDIQWPWRAGRFADYLIENKLKMKPLKRGNAYFVEIDMVSDHLEQREYQYADIIKRASKQYGISEELIYAIVKTESSFNPFAVSNAGAYGLMQVIPKTAGADVFKLVKNKPGIPTKDYLFDPANNIDTGTAYFYILKNRYLKEVRNPTTKHYSMISAYNGGTGGLLSTFDTDRKRAMDKLNQLQPDQAYWALTNKHPKLEARRYLEKVLNFQKEFQSL

SEQ ID NO: 41768 - DNA, 1149 bp, Oceanospirillum sp. MED92
  CDS (1)..(1149): transl_table=11
atgttgtcacgcagaaagtttatcttgtctttgctccctcttggggtggcaggttgtactacccatgatgcctttcgcattgcagaaagtgttgcgcgtggcagtagcctggaaggggcaattacttccagggctaaatcgaaagcgactggctgggtaaccaacccacaatcactggcatatgacctaaagcgactgaatagctttgttaagaaaatatcgggtcgctggggggaagataatgccgtccagccctctgcgaaaacctatgtgaagtacatcgatgattataccagccgaagtgtcgtagactttgaatcgggaatagtcagggttgagacgcttgatcgttcaaaactgaagcaaagtatagtggtcacgctgctctcgccagaagatccggtcaatatcgatctgttatcagcagatccgattcccctaggtgaggaaccttttctctataagcaggcgctggatttcgataataaagcggtgcgctgggagtggcgggcgaatcggtttgccgatcagttgatttcgcgtggtgtccagcaaagtaaagctaagctcaaagatggacagcaagtaatcgaatactttgtagaattccctttgggggccgggcataccttaacccgtaaataccgttatgcagagtatgttgaaaagtatgcgcgtcagtaccggcttaacccatcacttgtctatgcgattatcgaaacagaaagtcacttcaacccttttgccgtaagttgggtgcccgcctacggtttaatgcagatcgtaccgaaaactgcggggcgtgacgcatatgaattgattcatgggcgtcaggggactccgagcagtggttacctttttaacccggaaaataatattcggatgggatgtgcctatttacatattttgcaaacacgctatttggtcaatgtgcgagattcattaagtaaagagtattgtgttattgctgcttataatggcggggccggtaatgtactacgaagcttctctaaagatcgtgatcaggcattcaaagagataaatcgcaggtctcccagtcaggtctggcagcagctacggcaaaggatgccaaccgagagccagcgctatctggtcaaagtagcggaagcgaaaaaacgatatacctaa

SEQ ID NO: 41769 - protein, 382 aa, Oceanospirillum sp. MED92
MLSRRKFILSLLPLGVAGCTTHDAFRIAESVARGSSLEGAITSRAKSKATGWVTNPQSLAYDLKRLNSFVKKISGRWGEDNAVQPSAKTYVKYIDDYTSRSVVDFESGIVRVETLDRSKLKQSIVVTLLSPEDPVNIDLLSADPIPLGEEPFLYKQALDFDNKAVRWEWRANRFADQLISRGVQQSKAKLKDGQQVIEYFVEFPLGAGHTLTRKYRYAEYVEKYARQYRLNPSLVYAIIETESHFNPFAVSWVPAYGLMQIVPKTAGRDAYELIHGRQGTPSSGYLFNPENNIRMGCAYLHILQTRYLVNVRDSLSKEYCVIAAYNGGAGNVLRSFSKDRDQAFKEINRRSPSQVWQQLRQRMPTESQRYLVKVAEAKKRYT

SEQ ID NO: 41770 - DNA, 1161 bp, delta proteobacterium MLMS-1
  CDS (1)..(1161): transl_table=11
atgaagcaactcttatcaagacgccattttttaagcctgctggctaccctgcccctggccggttgcaccgccagcgaaatccagcgcggggtccgggccgctgaccgggtgctggccggtgatgtggccggggcggtcagctcccagatccccaccagcggggtggcggtggtggatcgactgctggcccgccagctcgccaacctgatcaccgagatccgtcgccactgggacgacgagaaggtggccagcgagaccgaatacgtcaaatacagcgacgaatttgccacccgggcgctggtcgactttgttagcggcgaaatccgggtggaaacccggcgccaggatgaaccgcgggccgccctgaagcaggccattgtcgccaccctgctgacccccgaggaccccaccaaggtcgatctgctcagcgccgaggaggtcgaaggcgacggccggccctttctttaccagttggtggccgatcacgacggcgaatatatccgctggccgtggcgggccaagcgttacgccgaccatttgctggccaccagcctggcaagcgacaaggtggatggcgagcgggtccattacgtgagatttgccatgatccgggagtaccgcgagaaccagcaactcaagttccagaactacgtcctgaccaactcccgccgtttcgagcaggagcccgccctggtctacgccatcatggaggccgaaagcagcttcaacccctacgccatgagccatgtgccggcctacggcctgatgcagatcgtccccaccaccgccggccgcgatgtccaccggctgctctacaaccgcgacggcacccccagccgggattacctctttgtgccggagaacaatatccgcatgggcaccgcctatctccacatcctggacagccgctacctgaagatggtggaaaaccaggccagccgtgagtactgcgtaatcgccgcctacaacaccggcagcggcaacgtcttaaaggcctttgccgacaaccggcagcaggccgtcggcgccatcaacaacaactcgccccggcaaaactacaaccacctggttcgccacctgccctaccgggagacccggcagtatctgcccaaggtcgtggagttaaagaagaaatatcagcggaccctggccagctcttga

SEQ ID NO: 41771 - protein, 386 aa, delta proteobacterium MLMS-1
MKQLLSRRHFLSLLATLPLAGCTASEIQRGVRAADRVLAGDVAGAVSSQIPTSGVAVVDRLLARQLANLITEIRRHWDDEKVASETEYVKYSDEFATRALVDFVSGEIRVETRRQDEPRAALKQAIVATLLTPEDPTKVDLLSAEEVEGDGRPFLYQLVADHDGEYIRWPWRAKRYADHLLATSLASDKVDGERVHYVRFAMIREYRENQQLKFQNYVLTNSRRFEQEPALVYAIMEAESSFNPYAMSHVPAYGLMQIVPTTAGRDVHRLLYNRDGTPSRDYLFVPENNIRMGTAYLHILDSRYLKMVENQASREYCVIAAYNTGSGNVLKAFADNRQQAVGAINNNSPRQNYNHLVRHLPYRETRQYLPKVVELKKKYQRTLASS

SEQ ID NO: 41772 - DNA, 1086 bp, Enterobacter sakazakii
  CDS (1)..(1086): transl_table=11
atgatgaaaaaaatatttgcgctcgctttgattgcgccgttgctcatctcctgctccagcaaaaaaaacgccgaaaacgcctataacgaggcctggattaaggacaccaacgggtttgacattctgatgggccagtttgcccataacattgaaaacatctggggatttaacgaagttttaatcgcgggtccgaaggactacgtgaaatataccgatcagtaccagacgcgcagccacatcaacttcgacgacggcaccattacggttgagacgatagccggtaccgagcctgcggcgcgcctgcgtcgggcgattatcaccacgctgctgatgggcgacgaccccggctctatcgatctctattctgatgttaatgacattcagatctcccgcgagccgttcctttatggtcaggtggtggacaacaccgggcagccgatccgctgggaaggccgcgcagcgaaattcgccgactacctgctgcaaacgcatctgaagagccgcagcaacggcctgcggattatctacagcgtgaccattaacctggtgccgaaccacctcgacaaacgtgcccataagtacattggcatggtgcgtcaggcgtcgcgcaaatatggcgtggatgaatcgctgatcctcgcgattatgcagaccgaatcgtcgtttaacccgtatgcggtcagccatgccgacgcgctcgggctaatgcaggtggtacagcacagcgccggtaaggacgttttccgctcgcagggcaaatggggcacgccgagccgcagctatctgtttgatccgcaaagcaacattgataccggcaccgcgtatctggcgatgcttaataatgtgtatctgggcggcattaccaacccgacctcgcgtcgttacgccgtgatcaccgcctataacggcggcgcgggcagcgtgttgcgggtgttttcaagcgataaagaccaggcagtgaatattatcaaccagttatcgccgggcgatgtgtacgagacgctgaccaaccgtcatccgtctgccgaatcgcggcgttatctctacaaggtcaataccgcgcagaagatgtatcgccgtaaataa

SEQ ID NO: 41773 - protein, 361 aa, Enterobacter sakazakii
MMKKIFALALIAPLLISCSSKKNAENAYNEAWIKDTNGFDILMGQFAHNIENIWGFNEVLIAGPKDYVKYTDQYQTRSHINFDDGTITVETIAGTEPAARLRRAIITTLLMGDDPGSIDLYSDVNDIQISREPFLYGQVVDNTGQPIRWEGRAAKFADYLLQTHLKSRSNGLRIIYSVTINLVPNHLDKRAHKYIGMVRQASRKYGVDESLILAIMQTESSFNPYAVSHADALGLMQVVQHSAGKDVFRSQGKWGTPSRSYLFDPQSNIDTGTAYLAMLNNVYLGGITNPTSRRYAVITAYNGGAGSVLRVFSSDKDQAVNIINQLSPGDVYETLTNRHPSAESRRYLYKVNTAQKMYRRK

SEQ ID NO: 41774 - DNA, 1104 bp, Haemophilus ducreyi
  CDS (1)..(1104): transl_table=11
atgagaaaatatgctaaatatttacccttttgtttggttgttccgtttttagcggcgtgtagtagtaagtcaactacatctgcaaaaggtaaaaaaattaaatcaccctttaattatttatctaaagataccaatggattagatattttaaccggtcaattttcgcataatattgatgatatttggggcagtaatgaattattagtcgccagcaaaaaagattatgtcaaatatacggataaatattacacacgtagccatatttcatttgaagatggattgattaccattgaaacgctaggtaaccaaaatcatttacgcaatagcatcattcatactttattgatgggagcagatccgcgcggtattgatttatttaattcaggcgatacaccaatcagtaaaaaaccatttttagcgcgtcaggttaaagatcaatttgggcgtgatattatcaatgttgcgattgcaaacgattttgctagtcacttgttacagcgtcaattaaaaacacgccgtttacagaatgggcggacagtcacttacgtaaccattaaaatggtggctgatcacgttgaagtgcgggcaagaaagtatttgcctttagttcgcaaaatggcgaaacgttatggcattgaaacaagcttaattttcggcattatggaagtagaatcgtcctttaatccgtatgcggtcagttatgcaaatgctatcggtttaatgcaagttgtaccgcgtaccgctgggcgggatatttttgttcgtaagggaatgagtggccagcctgatcgtgcttatttgcatgagcctgctaataatattgatgcgggtacattgtatttagccattttacgcaatgaatatttagacgggattaatgatccggtttcaaaacgttatgcgattatttctgcttataacagtggtgcgggcgctgttttaaaagtgtttgacgcagatcgaacttctgcatttaatcgtattaaccaattgtcttctgatgcggtatatcgtgttttagctacagctcatccatctaaacaagcgcgaaattacttaaataaagtgtctaaggcgcgtcaaaaatatataaatattcgttaa

SEQ ID NO: 41775 - protein, 367 aa, Haemophilus ducreyi
MRKYAKYLPFCLVVPFLAACSSKSTTSAKGKKIKSPFNYLSKDTNGLDILTGQFSHNIDDIWGSNELLVASKKDYVKYTDKYYTRSHISFEDGLITIETLGNQNHLRNSIIHTLLMGADPRGIDLFNSGDTPISKKPFLARQVKDQFGRDIINVAIANDFASHLLQRQLKTRRLQNGRTVTYVTIKMVADHVEVRARKYLPLVRKMAKRYGIETSLIFGIMEVESSFNPYAVSYANAIGLMQVVPRTAGRDIFVRKGMSGQPDRAYLHEPANNIDAGTLYLAILRNEYLDGINDPVSKRYAIISAYNSGAGAVLKVFDADRTSAFNRINQLSSDAVYRVLATAHPSKQARNYLNKVSKARQKYINIR

SEQ ID NO: 41776 - DNA, 1116 bp, Haemophilus influenzae
  CDS (43)..(1116): transl_table=11
tgaaggttatgttccaccatcaaattagttatctatcctacaatgaaaaaatatttattattggcattattgccttttttgtatgcttgtagtaattcatcgaatcaaggtattaactatgatgaagcctttgctaaagacacgcaagggttagatattctcacagggcaattctcgcataatattgaccgtatttggggcgtcaatgaattgttagtggcaagccgtaaagattatgtgaaatatacagattctttttatacgcgtagccatgtgagttttgatgaaggtaatatcgttattgaaacccagcaagatttaaatcgattacataatgctattgttcataccttgttaatgggagcggatgcaaaaggtattgatttatttgcatctggtgatgtgccgattagctctcgcccattccttttggggcaggttgtagatcatcaagggcaacacattgctaatcaagttatcgcaagtaatttcgccacttatttgattcaaaataaattgcaaacacgtcgattacaaaacgggcataccgtgcaatttgtctctgttcctatgattgcaaaccacgtagaagtgcgtgcacgaaaatatttaccattgattcgtaaagctgcacaacgttatggcattgatgaaagtttgattttgggcattatgcaaacagaatcaagttttaacccatatgcgattagctacgcaaatgctattggtttaatgcaagtcgtgcctcatacagcaggtcgagatgtatttgcaatgaaaggcaaaggtggacagccatcaacgcgttatttatatgatcctgcgaataatattgatgctggtgtatcttatttgtggattttacaaaatcaatatttagatggaattacgaatccaacctcaaaacgttttgccatgatttctgcgtataatagtggtgcaggcgcagtgttacgtgtttttgataatgataaggatacggcgatttacaaaatcaaccaaatgtatccagaacaagtttatcgcattctaacgacggttcacccatcatcacaagcacgcaattatttgttgaaagtagataaagcacagaaaaaattccgtgttagacgataa

SEQ ID NO: 41777 - protein, 357 aa, Haemophilus influenzae
MKKYLLLALLPFLYACSNSSNQGINYDEAFAKDTQGLDILTGQFSHNIDRIWGVNELLVASRKDYVKYTDSFYTRSHVSFDEGNIVIETQQDLNRLHNAIVHTLLMGADAKGIDLFASGDVPISSRPFLLGQVVDHQGQHIANQVIASNFATYLIQNKLQTRRLQNGHTVQFVSVPMIANHVEVRARKYLPLIRKAAQRYGIDESLILGIMQTESSFNPYAISYANAIGLMQVVPHTAGRDVFAMKGKGGQPSTRYLYDPANNIDAGVSYLWILQNQYLDGITNPTSKRFAMISAYNSGAGAVLRVFDNDKDTAIYKINQMYPEQVYRILTTVHPSSQARNYLLKVDKAQKKFRVRR

SEQ ID NO: 41778 - DNA, 1086 bp, Mannheimia succiniciproducens; identical to SEQ ID NO: 41754
  CDS (13)..(1086): transl_table=11

SEQ ID NO: 41779 - protein, 357 aa, Mannheimia succiniciproducens
MKLKKFLVLLLIPFLYACSSDRSGNYDDAFAKDTNGLDLLTGQFSQNIDQIWGVNELLVASRKDYVKYTDSYYTRSHISFEEGQITIETLADANRLHSAIVHTLLMGSDAKGIDLFASGDVPISSRPFLVGQVVDNFGRQINNIDVANSFASYLLQNRLQSRRLSNGRTVQFVSIQMIANHVNVRARKYLSLVRQASRRYGIDESLILGIMQTESSFNPYAISYANAMGLMQVVPHTAGRDIFKLKGRSGQPSKSYLFDPANNIDAGVSYLWILKNEYLAGITNPTSMRYAMISAYNSGAGAVLRVFDSDQEYAINIINRMQPEQVYRILTTVHPSSQARNYLLKVDKAQRSYRRAR

SEQ ID NO: 41780 - DNA, 1077 bp, Pasteurella multocida
  CDS (1)..(1077): transl_table=11
atgaagaagtacataatttacgcattaatcccttttttatttgcttgtggtgggacgaaaacacaccgcagttcgcaatttgatgaagcattcgccaaagatactcgtggattagatattttaacagggcagttttcgcataatatcgatcgtatttggggagtgaatgaattactcgttgcgagccgtaaagactatgtaaaatataccgatcgtttctatacgcgtagccatgtcagttttgatgaagggttgattacggttgaaacacaaagcgatttacgtcacttacaaaatgcgattgtgcatattttattaatggggtctgatgcaaatggtatcgatctgtttgcttcgggtgatgtgccgattagctcgcgtccttttttagtggggcaagtgatcgatcatttaggcggatctattactaacaccacaacagcaggtaactttgcgaattatttattacagaataaattgcaaacgcgtcgtttaagtaatggacatactgtacagtatgtggtgatcccgatgattgccaaccacgttgctgtgcgtgcacaaagatatttaccgttggtgcgtaaaatggcacgtcgttacaatatggatgaaagtttgattttaggcatcatgcaaacagaatccagttttaacccttacgcgattagttatgctaatgcgattggtttaatgcaagttgtgccaacaaccgctggacgtgatattttcaaaatgaaaggaaaagggggacaaccgtccaaatcctatttatttgatcctgaaaagaatatcgatgcggggacctcgtatttatggttattacaaaataaatatttagacgggattactaatccaacctctaaacgttttgccatgatttctgcttacaatagtggtgcaggcgcggttttacgtgtttttgaccaagatcgtgatgcggcgattgtgaagatcaatagtctttatcctgaacaggtttatcggattttgactactcaacatccatctgcgcaagcaagaaattacttacttaaagtggatcaagcacagaaaagttatcgcgtaagacgataa

SEQ ID NO: 41781 - protein, 358 aa, Pasteurella multocida
MKKYIIYALIPFLFACGGTKTHRSSQFDEAFAKDTRGLDILTGQFSHNIDRIWGVNELLVASRKDYVKYTDRFYTRSHVSFDEGLITVETQSDLRHLQNAIVHILLMGSDANGIDLFASGDVPISSRPFLVGQVIDHLGGSITNTTTAGNFANYLLQNKLQTRRLSNGHTVQYVVIPMIANHVAVRAQRYLPLVRKMARRYNMDESLILGIMQTESSFNPYAISYANAIGLMQVVPTTAGRDIFKMKGKGGQPSKSYLFDPEKNIDAGTSYLWLLQNKYLDGITNPTSKRFAMISAYNSGAGAVLRVFDQDRDAAIVKINSLYPEQVYRILTTQHPSAQARNYLLKVDQAQKSYRVRR

SEQ ID NO: 41782 - DNA, 1083 bp, Salmonella paratyphi
  CDS (1)..(1083): transl_table=11
atgaaaaaattactcgcgcttgctgttattgcgccgttgctcatctcctgctccagttcgaccaaaaaaggcgagacgtataatgaagcctgggtcaaggataccaacggctttgatattttgatggggcaatttgccaacaatattgaaaatctgtggggatataaggaagtcctgatcgccgggccgaaagactacgtcaaatataccgatcagttccagacccgtagccacatcaactttgatgatgggaccattaccgttgaaaccatcgccgggacggaacctaccgcacatctgcgccgggccattattaaaacgttgctcatgggtgacgacccaacctccgtcgatctttactccgatgtcgatgacataaaaatttctaaagaacccttcctgtatggtcaggtcctcgacaataccggccagcctattcgctgggaaggccgtgccacgacattcgcggattacttgctgaaaacgcggctcaaaagccgcagtaacggcctgcgtattatttacagcgtcaccattaatctggtgccgaaccaccttgataaacgcgcgcataaatacattggcatggtacgccaggcctcccgtaaatacggcgttgacgagtcgctgattttggcgattatgcaaacggagtcctcgtttaacccgtatgcggtcagccatgcggatgcgctgggcctgatgcaggtggtgcaacacagcgccgggaaagatgttttccgttctcagggtaagtccggcacgccaagccgtaacttcctgttcgaccccgccagcaatatcgataccggcacagcgtatctggcgatgttgaataatgtctatctgagcggtattgagaatccgacgtcgcggcgctatgcggtcattaccgcctacaatggcggcgcaggcagcgtattacgcgtattctcgaacgataagattcaggccgcgaatatgattaaccgcatgtcaccgggggatgtgtaccagatattaaccacccgacatccatctgcggagtcgcgccgctatctgtataaggtgaattccgcccagcgatcgtatcgccgccgataa

SEQ ID NO: 41783 - protein, 360 aa, Salmonella paratyphi
MKKLLALAVIAPLLISCSSSTKKGETYNEAWVKDTNGFDILMGQFANNIENLWGYKEVLIAGPKDYVKYTDQFQTRSHINFDDGTITVETIAGTEPTAHLRRAIIKTLLMGDDPTSVDLYSDVDDIKISKEPFLYGQVLDNTGQPIRWEGRATTFADYLLKTRLKSRSNGLRIIYSVTINLVPNHLDKRAHKYIGMVRQASRKYGVDESLILAIMQTESSFNPYAVSHADALGLMQVVQHSAGKDVFRSQGKSGTPSRNFLFDPASNIDTGTAYLAMLNNVYLSGIENPTSRRYAVITAYNGGAGSVLRVFSNDKIQAANMINRMSPGDVYQILTTRHPSAESRRYLYKVNSAQRSYRRR

SEQ ID NO: 41784 - DNA, 1080 bp, Shigella flexneri
  CDS (1)..(1080): transl_table=11
atgaaaaaatatctcgcgctggctttgattgcgccgttgctcatctcctgttcgacgaccaaaaaaggcgatacctataacgaagcctgggtcaaagataccaacggttttgatattctgatggggcaatttgcccacaatattgagaacatctggggcttcaaagaggtggtgatcgccggtcctaaggactacgtgaaatacaccgatcaatatcagacccgcagccacatcaacttcgatgacggtacgattactatcgaaaccatcgccgggacagaacctgccgcgcatttgcgccgggcaattatcaaaacgttgctgatgggtgacgatccgagttcggtcgatctctattccgacgttgatgatattacaatttcgaaagaacctttcctttacggtcaggtggtggacaacaccgggcagccgattcgctgggaaggtcgcgcaagcaacttcgcggattatctgctgaaaaaccgtctgaaaagccgcagcaacgggctacgtatcatctacagcgtcaccattaacatggtgccgaaccaccttgataaacgtgcgcacaaatatctcggcatggtccgccaggcgtcacggaaatatggcgttgatgagtcgctgattctggcaattatgcagactgaatcttcctttaacccgtatgcggtcagccgttccgatgcgctgggattaatgcaggtggtacaaaatactgccgggaaagatgtgttccgctcgcaggggaaatccggcacgccgagccgcagtttcttgtttgatcctgccagcaatattgataccggcaccgcgtatctggcgatgctgaacaatgtttatctcggcggaattgataacccaacatcgcggcgttatgccgtcatcaccgcctataacggcggcgcaggcagcgtgctgcgagtcttttcgaatgataagattcaggctgccaatattattaacaccatgacgccgggcgatgtttatcagacgctgacgacccgccatccctctgcggaatctcgccgttatctttataaagtgaataccgcgcaaaaatcctaccgccgccgataa

SEQ ID NO: 41785 - protein, 359 aa, Shigella flexneri
MKKYLALALIAPLLISCSTTKKGDTYNEAWVKDTNGFDILMGQFAHNIENIWGFKEVVIAGPKDYVKYTDQYQTRSHINFDDGTITIETIAGTEPAAHLRRAIIKTLLMGDDPSSVDLYSDVDDITISKEPFLYGQVVDNTGQPIRWEGRASNFADYLLKNRLKSRSNGLRIIYSVTINMVPNHLDKRAHKYLGMVRQASRKYGVDESLILAIMQTESSFNPYAVSRSDALGLMQVVQNTAGKDVFRSQGKSGTPSRSFLFDPASNIDTGTAYLAMLNNVYLGGIDNPTSRRYAVITAYNGGAGSVLRVFSNDKIQAANIINTMTPGDVYQTLTTRHPSAESRRYLYKVNTAQKSYRRR

SEQ ID NO: 41786 - DNA, 1077 bp, Yersinia pestis
  CDS (1)..(1077): transl_table=11
atgaagaaaattttagctttgctggtaatcgcccccttattagtgtcttgttcgggcaacaaaaatcaggtagaaaacgaagtttttgtcaaagacaccaatggttttgagattttaatgggccaatttgcccataacattgaaaatatttggggcttaaaagaagtcttaatcgctggtccaaaagattacgttaagtacacggatcaatatcaaacccgcagccatatcaattttgatgctggtaccattacgatagagacgatcgccacgaccaatccggcggcacatttacgtcaggcgatcatcacaacgctactgatgggtgatgatccaggctcgatcgacctctattctgatgtaaacgatattcagatcagtaaagagccgttcctctatggccaggtgctggacaacaatggcgaaccaatccgttgggaatggcgggcagcccattttgctgattatttgctacaaaacaaaatgcaaacacggacttccggtttgcatgtgatctcgttcgttaccatacagttagtgccaaaccatctggacaaacgggcgcataaatacctgccattggtacggaaatcagcagcacgttacggcgtggaagagtctttgattctcgccattatgcaaaccgaatcgagcttcaacccctatgccgtcagccgttctgatgcgctcggtctgatgcaggtggttcaacatactgcaggaaaagatgtattcaaactgaaaggcaaaagtggccaaccaagccgcagctatctgtttgatcctgaaaataatatcgacgcaggcaccgcatatttatctattctgcaaaatacctatttgggggggattcaaaatgccacctcacggcgttatgccgtgatcacctcctacaacggcggcgcaggtagcgtattgcgcgtgttccacagcgataaaaataaggcagtgggtatcattaacacgatgtcaccaggggatgtgttccaaacactcacgaccaagcatccatcaggtgaatcccgccgttatctggtgaaagtgaacagcgcacagaagaactatcgccgctattag

SEQ ID NO: 41787 - protein, 358 aa, Yersinia pestis
MKKILALLVIAPLLVSCSGNKNQVENEVFVKDTNGFEILMGQFAHNIENIWGLKEVLIAGPKDYVKYTDQYQTRSHINFDAGTITIETIATTNPAAHLRQAIITTLLMGDDPGSIDLYSDVNDIQISKEPFLYGQVLDNNGEPIRWEWRAAHFADYLLQNKMQTRTSGLHVISFVTIQLVPNHLDKRAHKYLPLVRKSAARYGVEESLILAIMQTESSFNPYAVSRSDALGLMQVVQHTAGKDVFKLKGKSGQPSRSYLFDPENNIDAGTAYLSILQNTYLGGIQNATSRRYAVITSYNGGAGSVLRVFHSDKNKAVGIINTMSPGDVFQTLTTKHPSGESRRYLVKVNSAQKNYRRY

SEQ ID NO: 41788 - DNA, 25 bp, Artificial sequence
  primer
atgatgaaaaaatatctcgcgctgg

SEQ ID NO: 41789 - DNA, 23 bp, Artificial sequence
  primer
ttatcggcggcggtaggattttt

SEQ ID NO: 41790 - protein, 388 aa, Artificial sequence
  consensus sequence
  Variant (2)..(10): Xaa in position 2 to 10 is any amino acid
  Variant (11)..(11): Xaa in position 11 is any or no amino acid
  Variant (13)..(14): Xaa in position 13 to 14 is any amino acid
  Variant (16)..(35): Xaa in position 16 to 35 is any amino acid
  Variant (36)..(60): Xaa in position 36 to 60 is any or no amino acid
  Variant (62)..(68): Xaa in position 62 to 68 is any amino acid
  Variant (69)..(79): Xaa in position 69 to 79 is any or no amino acid
  Variant (81)..(83): Xaa in position 81 to 83 is any amino acid
  Variant (86)..(87): Xaa in position 86 to 87 is any amino acid
  Variant (89)..(90): Xaa in position 89 to 90 is any amino acid
  Variant (91)..(91): Xaa in position 91 is any or no amino acid
  Variant (93)..(96): Xaa in position 93 to 96 is any amino acid
  Variant (101)..(101): Xaa in position 101 is any amino acid
  Variant (103)..(106): Xaa in position 103 to 106 is any amino acid
  Variant (108)..(111): Xaa in position 108 to 111 is any amino acid
  Variant (113)..(114): Xaa in position 113 to 114 is any amino acid
  Variant (116)..(116): Xaa in position 116 is any amino acid
  Variant (118)..(119): Xaa in position 118 to 119 is any amino acid
  Variant (122)..(126): Xaa in position 122 to 126 is any amino acid
  Variant (127)..(130): Xaa in position 127 to 130 is any or no amino acid
  Variant (132)..(133): Xaa in position 132 to 133 is any amino acid
  Variant (136)..(137): Xaa in position 136 to 137 is any amino acid
  Variant (141)..(143): Xaa in position 141 to 143 is any amino acid
  Variant (145)..(148): Xaa in position 145 to 148 is any amino acid
  Variant (151)..(161): Xaa in position 151 to 161 is any amino acid
  Variant (162)..(162): Xaa in position 162 is any or no amino acid
  Variant (166)..(167): Xaa in position 166 to 167 is any amino acid
  Variant (170)..(170): Xaa in position 170 is any amino acid
  Variant (172)..(176): Xaa in position 172 to 176 is any amino acid
  Variant (178)..(182): Xaa in position 178 to 182 is any amino acid
  Variant (184)..(185): Xaa in position 184 to 185 is any amino acid
  Variant (188)..(188): Xaa in position 188 is any amino acid
  Variant (191)..(194): Xaa in position 191 to 194 is any amino acid
  Variant (196)..(207): Xaa in position 196 to 207 is any amino acid
  Variant (208)..(212): Xaa in position 208 to 212 is any or no amino acid
  Variant (214)..(220): Xaa in position 214 to 220 is any amino acid
  Variant (222)..(224): Xaa in position 222 to 224 is any amino acid
  Variant (226)..(228): Xaa in position 226 to 228 is any amino acid
  Variant (230)..(239): Xaa in position 230 to 239 is any amino acid
  Variant (241)..(245): Xaa in position 241 to 245 is any amino acid
  Variant (248)..(249): Xaa in position 248 to 249 is any amino acid
  Variant (251)..(252): Xaa in position 251 to 252 is any amino acid
  Variant (262)..(262): Xaa in position 262 is any amino acid
  Variant (264)..(266): Xaa in position 264 to 266 is any amino acid
  Variant (268)..(268): Xaa in position 268 is any amino acid
  Variant (275)..(276): Xaa in position 275 to 276 is any amino acid
  Variant (280)..(280): Xaa in position 280 is any amino acid
  Variant (282)..(282): Xaa in position 282 is any amino acid
  Variant (284)..(289): Xaa in position 284 to 289 is any amino acid
  Variant (290)..(290): Xaa in position 290 is any or no amino acid
  Variant (292)..(292): Xaa in position 292 is any amino acid
  Variant (294)..(297): Xaa in position 294 to 297 is any amino acid
  Variant (299)..(300): Xaa in position 299 to 300 is any amino acid
  Variant (302)..(303): Xaa in position 302 to 303 is any amino acid
  Variant (307)..(307): Xaa in position 307 is any amino acid
  Variant (309)..(310): Xaa in position 309 to 310 is any amino acid
  Variant (313)..(314): Xaa in position 313 to 314 is any amino acid
  Variant (316)..(318): Xaa in position 316 to 318 is any amino acid
  Variant (321)..(325): Xaa in position 321 to 325 is any amino acid
  Variant (327)..(327): Xaa in position 327 is any amino acid
  Variant (329)..(333): Xaa in position 329 to 333 is any amino acid
  Variant (335)..(335): Xaa in position 335 is any amino acid
  Variant (339)..(339): Xaa in position 339 is any amino acid
  Variant (341)..(341): Xaa in position 341 is any amino acid
  Variant (343)..(343): Xaa in position 343 is any amino acid
  Variant (346)..(347): Xaa in position 346 to 347 is any amino acid
  Variant (349)..(350): Xaa in position 349 to 350 is any amino acid
  Variant (351)..(351): Xaa in position 351 is any or no amino acid
  Variant (353)..(355): Xaa in position 353 to 355 is any amino acid
  Variant (357)..(359): Xaa in position 357 to 359 is any amino acid
  Variant (362)..(364): Xaa in position 362 to 364 is any amino acid
  Variant (366)..(367): Xaa in position 366 to 367 is any amino acid
  Variant (370)..(371): Xaa in position 370 to 371 is any amino acid
  Variant (373)..(375): Xaa in position 373 to 375 is any amino acid
  Variant (378)..(380): Xaa in position 378 to 380 is any amino acid
  Variant (381)..(381): Xaa in position 381 is any or no amino acid
  Variant (383)..(383): Xaa in position 383 is any amino acid
  Variant (386)..(386): Xaa in position 386 is any amino acid
KXXXXXXXXXXLXXCXXXXXXXXXXXXXXXXXXXXXXXXXXXXXXXXXXXXXXXXXXXXXLXXXXXXXXXXXXXXXXXXIXXXWGXXEXXXAXXXXYVKYXDXXXXRXXXXFXXGXIXXETXXXXXXXXXLXXAIXXTLLXXXDXXXXDLXXXXXXXXXXXXPFLXXQVXDXXXXXIXXXXXAXXFAXYLXXXXLXXXXXXXXXXXXXXXXXVXXXXXXXHXXXRXXXYXXXXXXXXXXYXXXXXLIXXIXXTESSFNPYAXSXXXAXGLMQVVXXTAGXDXFXXXXXXXGXPXXXXLXXPXXNIDXGXXYLXXLXXXYLXXXXXPXSXXXXXIXAYNXGXGXVLXXFXXXDXXXAXXXINXXXPXXVYXXLXXXHPXXXXRXYLXKV

SEQ ID NO: 41791 - protein, 51 aa, Artificial sequence
  protein pattern
  Variant (2)..(3): Xaa in position 2 to 3 is any or no amino acid
  Variant (5)..(6): Xaa in position 5 to 6 is any amino acid
  Variant (7)..(7): Xaa in position 7 is any or no amino acid
  Variant (9)..(9): Xaa in position 9 is Asp, Gly or Asn
  Variant (10)..(10): Xaa in position 10 is Ile, Met or Val
  Variant (11)..(11): Xaa in position 11 is Asp, Glu, Pro or Ser
  Variant (12)..(12): Xaa in position 12 is Glu, Pro or Thr
  Variant (13)..(13): Xaa in position 13 is Asp, Glu, Asn or Ser
  Variant (15)..(15): Xaa in position 15 is Ile or Val
  Variant (16)..(16): Xaa in position 16 is any amino acid
  Variant (17)..(17): Xaa in position 17 is Ala or Gly
  Variant (18)..(18): Xaa in position 18 is Ile or Val
  Variant (19)..(19): Xaa in position 19 is Ile, Met or Val
  Variant (20)..(20): Xaa in position 20 is any amino acid
  Variant (21)..(21): Xaa in position 21 is Thr or Val
  Variant (24)..(24): Xaa in position 24 is Ala, Asp or Ser
  Variant (28)..(28): Xaa in position 28 is Phe or Tyr
  Variant (30)..(30): Xaa in position 30 is Ile or Val
  Variant (32)..(32): Xaa in position 32 is any amino acid
  Variant (33)..(33): Xaa in position 33 is Ala or Ser
  Variant (34)..(34): Xaa in position 34 is Asp, Gly, Asn or Pro
  Variant (36)..(36): Xaa in position 36 is any amino acid
  Variant (42)..(42): Xaa in position 42 is Ile or Val
  Variant (43)..(43): Xaa in position 43 is Pro or Gln
  Variant (44)..(44): Xaa in position 44 is any amino acid
  Variant (45)..(45): Xaa in position 45 is Ser or Thr
  Variant (48)..(48): Xaa in position 48 is any amino acid
  Variant (50)..(50): Xaa in position 50 is Ile or Val
  Variant (51)..(51): Xaa in position 51 is Phe or Tyr
RXXAXXXYXXXXXLXXXXXXXESXFNPXAXSXXXAXGLMQVXXXXAGXDXX

SEQ ID NO: 41792 - protein, 60 aa, Artificial sequence
  protein pattern
  Variant (2)..(2): Xaa in position 2 is any amino acid
  Variant (4)..(5): Xaa in position 4 to 5 is any or no amino acid
  Variant (7)..(7): Xaa in position 7 is any amino acid
  Variant (8)..(9): Xaa in position 8 to 9 is any or no amino acid
  Variant (11)..(11): Xaa in position 11 is any amino acid
  Variant (12)..(12): Xaa in position 12 is Asp, Asn or Val
  Variant (14)..(14): Xaa in position 14 is Ala, Glu, Gln or Thr
  Variant (15)..(15): Xaa in position 15 is any amino acid
  Variant (18)..(18): Xaa in position 18 is Asp or Arg
  Variant (19)..(19): Xaa in position 19 is any amino acid
  Variant (21)..(21): Xaa in position 21 is Cys, Thr or Val
  Variant (22)..(22): Xaa in position 22 is Ala, Ser or Thr
  Variant (24)..(24): Xaa in position 24 is Phe or Leu
  Variant (25)..(25): Xaa in position 25 is any amino acid
  Variant (26)..(26): Xaa in position 26 is Ile, Leu or Met
  Variant (28)..(28): Xaa in position 28 is any amino acid
  Variant (29)..(29): Xaa in position 29 is Asp, Asn, Ser or Thr
  Variant (30)..(30): Xaa in position 30 is any amino acid
  Variant (33)..(34): Xaa in position 33 to 34 is any amino acid
  Variant (35)..(35): Xaa in position 35 is Ile or Val
  Variant (36)..(39): Xaa in position 36 to 39 is any amino acid
  Variant (41)..(41): Xaa in position 41 is any amino acid
  Variant (42)..(42): Xaa in position 42 is Glu or Arg
  Variant (43)..(43): Xaa in position 43 is Phe or Tyr
  Variant (44)..(44): Xaa in position 44 is Ala, Cys or Ser
  Variant (45)..(45): Xaa in position 45 is Met or Val
  Variant (47)..(47): Xaa in position 47 is Ala, Ser or Thr
  Variant (48)..(48): Xaa in position 48 is Ala or Ser
  Variant (50)..(50): Xaa in position 50 is any amino acid
  Variant (51)..(51): Xaa in position 51 is Gly, Ser or Thr
  Variant (53)..(53): Xaa in position 53 is Ala, Ser, Thr or Val
  Variant (54)..(54): Xaa in position 54 is Gly or Ser
  Variant (55)..(55): Xaa in position 55 is Ala, Gly, Asn or Ser
  Variant (56)..(56): Xaa in position 56 is Met or Val
  Variant (58)..(59): Xaa in position 58 to 59 is any amino acid
GXPXXSXXXLXXPXXNIXXGXXYXXXLXXXYLXXXXXXXSXXXXXIXXYXXGXXXXLXXF

SEQ ID NO: 41793 - protein, 35 aa, Artificial sequence
  protein pattern
  Variant (2)..(4): Xaa in position 2 to 4 is any amino acid
  Variant (6)..(6): Xaa in position 6 is any amino acid
  Variant (7)..(7): Xaa in position 7 is any or no amino acid
  Variant (9)..(9): Xaa in position 9 is any amino acid
  Variant (10)..(10): Xaa in position 10 is any or no amino acid
  Variant (15)..(15): Xaa in position 15 is any amino acid
  Variant (17)..(17): Xaa in position 17 is any amino acid
  Variant (18)..(18): Xaa in position 18 is Phe or Tyr
  Variant (19)..(19): Xaa in position 19 is any amino acid
  Variant (20)..(20): Xaa in position 20 is Ser or Thr
  Variant (22)..(22): Xaa in position 22 is Ala or Ser
  Variant (23)..(23): Xaa in position 23 is Asp, Glu or His
  Variant (24)..(24): Xaa in position 24 is Ile or Val
  Variant (25)..(25): Xaa in position 25 is Asp, Asn or Ser
  Variant (27)..(27): Xaa in position 27 is Asp, Glu, Gln, Ser or Thr
  Variant (28)..(28): Xaa in position 28 is any amino acid
  Variant (30)..(30): Xaa in position 30 is any amino acid
  Variant (32)..(32): Xaa in position 32 is any amino acid
  Variant (33)..(33): Xaa in position 33 is Ile or Val
  Variant (34)..(34): Xaa in position 34 is Glu or Ser
EXXXAXXKXXYVKYXDXXXXRXXXXFXXGXIXXXT

SEQ ID NO: 41794 - protein, 39 aa, Artificial sequence
  protein pattern
  Variant (2)..(4): Xaa in position 2 to 4 is any amino acid
  Variant (5)..(6): Xaa in position 5 to 6 is any or no amino acid
  Variant (10)..(12): Xaa in position 10 to 12 is any amino acid
  Variant (13)..(13): Xaa in position 13 is Ala or Val
  Variant (14)..(14): Xaa in position 14 is any amino acid
  Variant (16)..(20): Xaa in position 16 to 20 is any amino acid
  Variant (21)..(21): Xaa in position 21 is Ile or Val
  Variant (22)..(26): Xaa in position 22 to 26 is any amino acid
  Variant (28)..(28): Xaa in position 28 is Ala, Gly, Asn, Ser or Thr
  Variant (29)..(29): Xaa in position 29 is any amino acid
  Variant (30)..(30): Xaa in position 30 is Phe or Tyr
  Variant (32)..(32): Xaa in position 32 is Asp, Asn, Ser or Thr
  Variant (33)..(33): Xaa in position 33 is any amino acid
  Variant (35)..(35): Xaa in position 35 is Ile or Leu
  Variant (36)..(38): Xaa in position 36 to 38 is any amino acid
  Variant (39)..(39): Xaa in position 39 is Ile, Leu, Met or Val
IXXXXXPFLXXXXXDXXXXXXXXXXXAXXXAXXLXXXXX

SEQ ID NO: 41795 - protein, 23 aa, Artificial sequence
  protein pattern
  Variant (2)..(4): Xaa in position 2 to 4 is any amino acid
  Variant (5)..(5): Xaa in position 5 is Ile or Leu
  Variant (7)..(9): Xaa in position 7 to 9 is any amino acid
  Variant (10)..(10): Xaa in position 10 is Pro or Ser
  Variant (11)..(11): Xaa in position 11 is Ala, Asp, Glu, Gly, Asn or Gln
  Variant (12)..(12): Xaa in position 12 is any amino acid
  Variant (15)..(15): Xaa in position 15 is any amino acid
  Variant (16)..(16): Xaa in position 16 is any or no amino acid
  Variant (18)..(21): Xaa in position 18 to 21 is any amino acid
  Variant (22)..(22): Xaa in position 22 is any or no amino acid
AXXXXNXXXXXXVYXXLXXXXXP

SEQ ID NO: 41796 - protein, 24 aa, Artificial sequence
  protein pattern
  Variant (2)..(4): Xaa in position 2 to 4 is any amino acid
  Variant (5)..(5): Xaa in position 5 is any or no amino acid
  Variant (7)..(7): Xaa in position 7 is any amino acid
  Variant (8)..(8): Xaa in position 8 is any or no amino acid
  Variant (12)..(12): Xaa in position 12 is any amino acid
  Variant (13)..(13): Xaa in position 13 is Gly or Pro
  Variant (14)..(14): Xaa in position 14 is Ala, Asp, Glu, Gln or Ser
  Variant (16)..(16): Xaa in position 16 is Ala or Pro
  Variant (17)..(18): Xaa in position 17 to 18 is any amino acid
  Variant (19)..(19): Xaa in position 19 is Ile or Val
  Variant (22)..(22): Xaa in position 22 is any amino acid
  Variant (23)..(23): Xaa in position 23 is Ala, Ser or Thr
  Variant (24)..(24): Xaa in position 24 is Ala, Asp or Ser
LXXXXIXXTLLXXXDXXXXDLXXX

SEQ ID NO: 41797 - DNA, 411 bp, Escherichia coli
  CDS (1)..(411): transl_table=11
atgaatgatttctttgccgcaattgagtttatgcaacgctatccgcaagcgacaggcaaagtgggtattaccggattttgctatggcggtggcgtatcgaacgcggcggctgtcgcgtatccggaactggcctgcgcggtgccgttttatggtcgtcaggcacccactgccgatgtggcgaagattgaagcgcctttactactccacttcgcggaactggacacccgaatcaacgagggctggcctgcttacgaggcggcgttgaaagccaataataaggtttatgaggcgtatatctatccgggggttaatcacggattccataatgattccacgccccgttatgacaaatctgccgccgatcttgcctggcaaaggacactgaaatggttcgataaatatctctcctaa

SEQ ID NO: 41798 - protein, 136 aa, Escherichia coli
MNDFFAAIEFMQRYPQATGKVGITGFCYGGGVSNAAAVAYPELACAVPFYGRQAPTADVAKIEAPLLLHFAELDTRINEGWPAYEAALKANNKVYEAYIYPGVNHGFHNDSTPRYDKSAADLAWQRTLKWFDKYLS

SEQ ID NO: 41799 - DNA, 987 bp, Glycine max
  CDS (46)..(777)
gcgaaattctcccatctgcttctcactgatctccattcccattccatggcttccactgaatcatcccctttcaagaaaattcagattcaaagggatgacactacatttgacgcatatgtggttggaaaagaggatgctcctggaattgttgtgattcaggagtggtggggtgtggattacgaaattaagaaccatgccgtgaagatttctcagcttggtagtgggtttaaagctcttattccagatttatacagaggaaaggttggtctggatgttgctgaagctcagcatttgatggatggtcttgattggcaaggtgctgtgaaggatattgctgcttcggttaactggcttaaagcaaatggctcaaagaaggctggtgtaactggattttgtatgggaggtgctctctctattgccagttctgtcttggttcaagaggttgacgcttctgtagcattctatggagttcctgcttctcaacttgctgaccctgcacaagccaaggctcctgttcaggctcattttggagagctggacaattttgttggcttttcagatgttacagcggccaaggcattggaagagaagctgaaggcatccggaattccacatgaggtacatatctatcctggcaatgcacatgcattcatgaacaggtcaactgaaggaatccagaggaggaagaacatgggaatgcctgatgaagatgaagctgcagttcagcttgcttggtctcgctttgagacatggatgacccgttatctgtctagttagataatttcctagctagctcaattccgaagtcacatgctgcatgtgtattccaccttttaagtggttatattgaacccgttttaatggccccacaaactgtggagaccctgctgcttgctacacttcatttatttcctgaagtttggatgcatgtgtgaaatttgagttggaaataatattgaaatatttgtggcttttcttcaattaagt

SEQ ID NO: 41800 - protein, 243 aa, Glycine max
MASTESSPFKKIQIQRDDTTFDAYVVGKEDAPGIVVIQEWWGVDYEIKNHAVKISQLGSGFKALIPDLYRGKVGLDVAEAQHLMDGLDWQGAVKDIAASVNWLKANGSKKAGVTGFCMGGALSIASSVLVQEVDASVAFYGVPASQLADPAQAKAPVQAHFGELDNFVGFSDVTAAKALEEKLKASGIPHEVHIYPGNAHAFMNRSTEGIQRRKNMGMPDEDEAAVQLAWSRFETWMTRYLSS

SEQ ID NO: 41801 - DNA, 1254 bp, Glycine max
  CDS (49)..(1020)
atttgtgtgcggctccgcggggacggcggaggagggagtgagggaataatgttgcggattgctcccaaattcttcaccacggttcctcttcggaccatttcacccttcgcatgtcgcttctcagtccgttccatcgctgactcttctcctttcaacaaaatccgcattcaaagggatgatactgttagtcataatcacaacccattcaaagggttgcggattgctcccaaattcttcaccacggttcctcttcggaccatttcacccttcgcatgtcgcttctcagtccgttccatcgctgactcttctcctttcaacaaaatccgcattcaaagggatgatactgcatttgatgcatatgtcgttggaaaaaacgacgctcctggaatcgttgtgcttcaggagtggtggggtgtggactttgaaattaaaaatcatgctgtgatgatttctcaacttggtcgtggatttaaagctcttattccagatctgtacagaggaaaggttggtctagatgttgcagaagcccaacatttgtttgatggtcttgattggcaaggtgctgtaaaagatatcaatgcttcagttaactggcttaaggcaaatggttcaaaaaaggctggtgttactggattttgtatggggggtgctctcgcaattgcaagctcagtcttggttccaaatgttgatgctactgtagctttttatggagttccttcttctgagcttgcagaccctgcccaagccaaggctcctgttcaggcccactttggagagctggataattttgttggcttttctgatgttacggctgccaaggccttagaggagaagttgaaggcatctggtgttccacatgaggtacacatatatcctggcaatggacatgcattcatgaacaggtctccagaaggaatcaagaggaggaagaatatgggaatgcccgacgaagacgaagctgcagttcagcttgcatggtctcgcttccagtcatggatgacacattacttatccagctaaatagtttcttagtaatgccacaatggtatgataacatgatatacttctaattctgcatttgattagtagtttggtataactcttaatggccccatcaactctaaatatggtgctttgtttccttatgggtggatacatacacccttgagaaatttggcttggaaataattagtttgtctataataagtaaatatggtctttgtttaaaaaaaaaaaaaaaaactttccctcaac

SEQ ID NO: 41802 - protein, 323 aa, Glycine max
MLRIAPKFFTTVPLRTISPFACRFSVRSIADSSPFNKIRIQRDDTVSHNHNPFKGLRIAPKFFTTVPLRTISPFACRFSVRSIADSSPFNKIRIQRDDTAFDAYVVGKNDAPGIVVLQEWWGVDFEIKNHAVMISQLGRGFKALIPDLYRGKVGLDVAEAQHLFDGLDWQGAVKDINASVNWLKANGSKKAGVTGFCMGGALAIASSVLVPNVDATVAFYGVPSSELADPAQAKAPVQAHFGELDNFVGFSDVTAAKALEEKLKASGVPHEVHIYPGNGHAFMNRSPEGIKRRKNMGMPDEDEAAVQLAWSRFQSWMTHYLSS

SEQ ID NO: 41803 - DNA, 1100 bp, Sorghum bicolor
  CDS (62)..(910)
tgtgcggcgctcgagccggccgggtctgggacacagtggtcaggagtcgggagggaaagggatggccacagcgcatctgctccgccgcgcctcctccgccttcctcttcagcaccaccaacccgttgcgctcgtgcttccctctcgtccgcctccagcacccccgcgccgccatggccaccgactcctcggtagccccgttccagaagatccagatccagcgcgaggacaccacttttgatgcctatgttgttggcaaagaaaatgctcctggaattgtggttttgcaagaatggtggggagttgactatgagataaagaaccatgcgatccacatttcccaacttggtggaggatacagagcactcattccagatttataccgtggaaaagttgctctggatgttgctgaggcacagcatctgatggagggtctcgactggcagggtgcagtcaaggatattcaggcttcagttaaatggctgaagtcaaatggatcacccaaggttggtgtgactggctattgcatgggaggtgctttatcaattgcaagtggagttttagttccattggttgatgctgttgttgctttctatgggacaccatcttctgagcttgctgatccttccaaggctaaggctcctatacaggctcatttcggggagcatgacagttttgttggtttttcagatgtcactgcagccaagtccctggaggagaagctcaaatcttctgggataccatatgaagttcacatataccctggatgttcacatgccttcatgaacacttcgcctgaggccctcaagaggaagaaggggatgggtctgactgatgagaaccaggaagccgtcgacctggcctggtctcgcttctcttcttggatgggccgtttcctcggatctgcttgaaccattccccacttcatgtgctgtgtgattatgtgtggagtcaggtcccatgaataaaatgttcagattcaggatgctctatccaaaccatacaaatggactgggttgtacggtgctctggatcgtcctgtttatggataaatataccgcagtgtcgtttccttaaaaaaaaaaaaaaaaaaggccccta

SEQ ID NO: 41804 - protein, 282 aa, Sorghum bicolor
MATAHLLRRASSAFLFSTTNPLRSCFPLVRLQHPRAAMATDSSVAPFQKIQIQREDTTFDAYVVGKENAPGIVVLQEWWGVDYEIKNHAIHISQLGGGYRALIPDLYRGKVALDVAEAQHLMEGLDWQGAVKDIQASVKWLKSNGSPKVGVTGYCMGGALSIASGVLVPLVDAVVAFYGTPSSELADPSKAKAPIQAHFGEHDSFVGFSDVTAAKSLEEKLKSSGIPYEVHIYPGCSHAFMNTSPEALKRKKGMGLTDENQEAVDLAWSRFSSWMGRFLGSA

SEQ ID NO: 41805 - DNA, 483 bp, Glycine max
  CDS (1)..(483)
atggatggtcttgattggcaaggtgctgtgaaggatattgctgcttcggttaactggcttaaagcaaatggctcaaagaaggctggtgtaactggattttgtatgggaggtgctctctctattgccagttctgtcttggttcaagaggttgacgcttctgtagcattctatggagttcctgcttctcaacttgctgaccctgcacaagccaaggctcctgttcaggctcattttggagagctggacaattttgttggcttttcagatgttacagcggccaaggcattggaagagaagctgaaggcatccggaattccacatgaggtacatatctatcctggcaatgcacatgcattcatgaacaggtcaactgaaggaatccagaggaggaagaacatgggaatgcctgatgaagatgaagctgcagttcagcttgcttggtctcgctttgagacatggatgacccgttatctgtctagttag

SEQ ID NO: 41806 - protein, 160 aa, Glycine max
MDGLDWQGAVKDIAASVNWLKANGSKKAGVTGFCMGGALSIASSVLVQEVDASVAFYGVPASQLADPAQAKAPVQAHFGELDNFVGFSDVTAAKALEEKLKASGIPHEVHIYPGNAHAFMNRSTEGIQRRKNMGMPDEDEAAVQLAWSRFETWMTRYLSS

SEQ ID NO: 41807 - DNA, 846 bp, Oryza sativa (japonica cultivar-group)
  CDS (1)..(846)
atggccacaccgcaactgctgctacgccgcgccttctcctcctccttcctctcctccccattccgccgcccgccactccaccccgcccgctccttcgttcccccccgcgccgccatggcatcctccgccgcgccgttccacatggtccagatccagcgcgacgacacgacttttgatgcctatgttgttggaaaagagaatgctcctggaattgttgttttgcaagagtggtggggggttgactatgagatcaagaatcatgctgtccacatttcccaaattggtgaaggatacagagctctcattccagatttgtatcgtggtaaggttgctcttgatgtagcggaagctcagcatctgatggaaggtctagactggccgggtgcggtcaaggatattcaggcttcagttaaatggctcaaggcaaatggatcacccaaggttggtgttactggatattgcatgggaggcgctttgtcaattgcaagtggagtttcagtcccagaggttgatgctgttgtggctttctatgggacaccaccttctgagcttgccgatgcttccaaggcccaggctcccatccaggctcattttggggagcttgacagttttgttggatttgcagatgtcacggcagccaagtcgctggaggagaagctcaagtcatctggcgtgccacatgaagtccacatctaccctggctgctcgcatgcttttatgaacacatcacctgaggccgtcaagaggaggaaggagatgggtctgactgatgagaaccaggcagcaattgacctggcctggtctcgcttctcgacttggatgggtcgtttccttggatcggcgtga

SEQ ID NO: 41808 - protein, 281 aa, Oryza sativa (japonica cultivar-group)
MATPQLLLRRAFSSSFLSSPFRRPPLHPARSFVPPRAAMASSAAPFHMVQIQRDDTTFDAYVVGKENAPGIVVLQEWWGVDYEIKNHAVHISQIGEGYRALIPDLYRGKVALDVAEAQHLMEGLDWPGAVKDIQASVKWLKANGSPKVGVTGYCMGGALSIASGVSVPEVDAVVAFYGTPPSELADASKAQAPIQAHFGELDSFVGFADVTAAKSLEEKLKSSGVPHEVHIYPGCSHAFMNTSPEAVKRRKEMGLTDENQAAIDLAWSRFSTWMGRFLGSA

SEQ ID NO: 41809 - DNA, 849 bp, Mesorhizobium loti MAFF303099
  CDS (1)..(849): transl_table=11
atgatcgatgcctatgacgaatacacgcatctgacgctcgatcgccgccgattcatggaacagctgaccaggcttgccggatcgggtgccgcggcggccgcgatcgcgccgatgctggcggcgaattccgcccaggcggcgatcgttgccgaaaacgatgcccgcgtgaaaggcgaggacatcagctatcccggcagtggcggcgagatgaagggctatctggttaggccggcgaaccaggccggcaagctcggcaccgtcatcgtcatccacgaaaaccgggggctcaacccgcatatacgcgacgtcgcccggcgcgtggcgctggagggattcgtggcgctggcgccggatttcctgtcgccgcttggcggcacgcctgatgacgaggacaaggcgcgcgacatgttcaccaaactcgatccggcgcagaccgtcgccaacgccgtggcgaccgtcgctttcctgaaaggtgacaaggacggcaacggcaaggtcggcgccatcggcttctgctggggcggcggcaccgccaacatgctggctgtcaacgcgcccgacctcgctgccagcgtcgcctattacggcatgcagccgaatgccgccgacgcggcgaagatcaaggcggcactgctgctgcactatgccgggctggacgatcgcactaatgccggcatcgatgccttcaagaaagcgctcgatgccgcgcatgtcgaatacacggtctatgtctatgaaggcgccaaccatgccttcaacaatgatacgtcggcggcccgctacgacaagaaggcggccgatctcgcctggggcaggacgatcgctttcctgaagcagaagctggcgtag

SEQ ID NO: 41810 - protein, 282 aa, Mesorhizobium loti MAFF303099
MIDAYDEYTHLTLDRRRFMEQLTRLAGSGAAAAAIAPMLAANSAQAAIVAENDARVKGEDISYPGSGGEMKGYLVRPANQAGKLGTVIVIHENRGLNPHIRDVARRVALEGFVALAPDFLSPLGGTPDDEDKARDMFTKLDPAQTVANAVATVAFLKGDKDGNGKVGAIGFCWGGGTANMLAVNAPDLAASVAYYGMQPNAADAAKIKAALLLHYAGLDDRTNAGIDAFKKALDAAHVEYTVYVYEGANHAFNNDTSAARYDKKAADLAWGRTIAFLKQKLA

SEQ ID NO: 41811 - DNA, 720 bp, Arabidopsis thaliana
  CDS (1)..(720)
atggcggattcagctttcaggaaaattcagatccaaagagatgacactacatttgatgcctatgtggtcggtaaagatgatgcgcctgggattgtggtgattcaagaatggtggggtgttgactttgagatcaagaaccatgctattaaaatctcacaacttgagcctggattcaaagcccttatacctgacttgtatcgaggaaaggttggtttggatactgcagaggcacagcatctaatggatggccttgattggccaggtgctatcaaagatatccgcgcttctgttaattggctaaaatccaatggctcaaaaaaggttggtgtcactggaatgtgcatgggaggtgcattagctatagctagctctgtattggttcctgaggtggatgctgttgttggattctatggaaccccttcctcagagctcgcagatccagcacaagctaaggcacctattcaggctcattttggagagctcgacaattttgtcggtttttctgatgtcacggcagcaaagaatctcgaagagaagctgaaagcgtctggagtagcacatgaagttcacatctatccaggtaatggacacgcgttcttgaacaggagtccagaaggagtgagcagaaggaaaagcatgggactttctgatgaagatgaagccgcagtggagcttgcttggtctcgcttcacctcctggatgaaacagtacttggcttaa

SEQ ID NO: 41812 - protein, 239 aa, Arabidopsis thaliana
MADSAFRKIQIQRDDTTFDAYVVGKDDAPGIVVIQEWWGVDFEIKNHAIKISQLEPGFKALIPDLYRGKVGLDTAEAQHLMDGLDWPGAIKDIRASVNWLKSNGSKKVGVTGMCMGGALAIASSVLVPEVDAVVGFYGTPSSELADPAQAKAPIQAHFGELDNFVGFSDVTAAKNLEEKLKASGVAHEVHIYPGNGHAFLNRSPEGVSRRKSMGLSDEDEAAVELAWSRFTSWMKQYLA

SEQ ID NO: 41813 - DNA, 927 bp, Escherichia coli O157:H7 EDL933
  CDS (1)..(927): transl_table=11
atgctttgcttaaaaaaacaccaactgaggagtgcaacgatgccgcgtttaaccgccaaagatttcccacaagagttgctggattactacgactattacgctcacgggaaaatctcgaaacgtgagttcctcaaccttgcggcgaagtatgcggtaggcgggatgacggcattagcgttgtttgatttgctcaagccaaattatgcgctggcgactcaggtagagtttaccgacccggagatttttgctgagtacatcacgtatccttcgccaaatggtcacggcgaggtacggggttatctggttaaacccgcaaaaatgagcggcaaaacgccagccgtggtggtggtgcatgagaatcgtggactgaatccgtatatcgaagatgtggcacggcgagtggcgaaggcggggtatatcgccctggcacctgacggcttaaattccgttggaggttatccgggaaatgatgataaaggtcgtgagctgcaacagcaggttgatccaaccaaactgatgaatgatttctttgccgcaattgagtttatgcaacgctatccgcaagcgacaggcaaagtgggtattaccggattttgctatggcggtggcgtatcgaacgcggcagcggtcgcttacccggaactggcctgcgcagtgccgttttatggtcgtcaggcacccactgccgatgtggcgaagattgaagcgcctttactactccacttcgcggaactggacacccgaatcaacgagggctggcctgcttacgaggcggcgttgaaagccaataataaggtttatgaggcgtatatctatccgggggttaatcacggattccataatgattccacgccccgttatgacaaatctgccgccgatcttgcctggcaaaggacactgaaatggttcgataaatatctctcctga

SEQ ID NO: 41814 - protein, 308 aa, Escherichia coli O157:H7 EDL933
MLCLKKHQLRSATMPRLTAKDFPQELLDYYDYYAHGKISKREFLNLAAKYAVGGMTALALFDLLKPNYALATQVEFTDPEIFAEYITYPSPNGHGEVRGYLVKPAKMSGKTPAVVVVHENRGLNPYIEDVARRVAKAGYIALAPDGLNSVGGYPGNDDKGRELQQQVDPTKLMNDFFAAIEFMQRYPQATGKVGITGFCYGGGVSNAAAVAYPELACAVPFYGRQAPTADVAKIEAPLLLHFAELDTRINEGWPAYEAALKANNKVYEAYIYPGVNHGFHNDSTPRYDKSAADLAWQRTLKWFDKYLS

SEQ ID NO: 41815 - DNA, 882 bp, Escherichia coli O157:H7 EDL933
  CDS (1)..(882): transl_table=11
gtgatttgttgcatgctgactatagttaacattgcgcaacatttttataagggtacggagaataccatggcaacaacacaacaatctggatttgcacctgctgcatcgcctctcgcttcgaccatcgttcagaccccggacgacgcgattgtggcgggcttcacctctatcccttcacaaggggataacatgcctgcttaccatgccagaccaaagcaaagcgatggcccactgccagtggtcattgtagtgcaggaaatttttggcgtgcatgaacatatccgcgacatttgtcgccgtctggcgctggaggggtatctggctatcgcacctgaactttacttccgcgaaggcgatccgaatgattttgccgatatccccacgttgcttagcggtctggtagcaaaagtgcctgactcgcaggtgctggccgatctcgatcatgtcgccagttgggcttcccgcaacggcggcgatgttcatcgtttaatgatcaccggattctgctggggtggacgtatcacttggctgtatgccgcgcataatccacagctaaaagccgcagtggcgtggtacggcaaactgacgggcgataagtcgctgaattcaccgaaacaacctgttgatatcgcaaccgatcttaacgcgccggttctcggcttatatggcggtctggataacagtattccgcaggagagcgttgaaaccatgcgccaggcgctgcgggctgctaatgcgaaagcagagattatcgtgtacccggacgccgggcatgcattcaacgctgattatcgcccgagctatcatgccgcatctgcagaagatggctggcagcgtatgctggaatggtttaagcagtatggtgggaagaagtcgctgtaa

SEQ ID NO: 41816 - protein, 293 aa, Escherichia coli O157:H7 EDL933
MICCMLTIVNIAQHFYKGTENTMATTQQSGFAPAASPLASTIVQTPDDAIVAGFTSIPSQGDNMPAYHARPKQSDGPLPVVIVVQEIFGVHEHIRDICRRLALEGYLAIAPELYFREGDPNDFADIPTLLSGLVAKVPDSQVLADLDHVASWASRNGGDVHRLMITGFCWGGRITWLYAAHNPQLKAAVAWYGKLTGDKSLNSPKQPVDIATDLNAPVLGLYGGLDNSIPQESVETMRQALRAANAKAEIIVYPDAGHAFNADYRPSYHAASAEDGWQRMLEWFKQYGGKKSL

SEQ ID NO: 41817 - DNA, 699 bp, Mycobacterium leprae TN
  CDS (1)..(699): transl_table=11
atgaccaagattcagatcgacgcacccgacggaccgatcgatgcgctgctgagtgtccccccggggcctgagccatggccgggcgtagttgtgattcacgacgctatcggctacgaacccgataaggagtcgaccaacaaccacatcgccatggcgggctacgtggcgattacgccgaatttgtactcacgcggtagccgtgcccgctgcatcacccgagtcatgcgtgagctactgaccaagcgaggccgcgcctttgacgacattctggctacccgcgattacctgttggccatgccgaaatgctcaggacgtgtcggtatcgcaggcttctgcatgggcggtcggttcgcactcgttatgtcgcccaaaggttttgacgcctctgctccgttctacggcactccattgcctcgcaacctcagcgagacgctgaacggagcatgcccgattgtggcgagctttggtggccgtgacccgctgggtattggcgcacccaagcgattgcgccaagcgacccagacccggcacatcaccactgacatcaaggtctaccccgatgccgggcacagtttcgcgaacaagcttcccggccagccactaatgcgtatcacgggtttcggctacaaccaggccgccaccgaggatgcgtggagccgtgtcttcgcgttcttcgacaagcatctgcgaaccgactga

SEQ ID NO: 41818 - protein, 232 aa, Mycobacterium leprae TN
MTKIQIDAPDGPIDALLSVPPGPEPWPGVVVIHDAIGYEPDKESTNNHIAMAGYVAITPNLYSRGSRARCITRVMRELLTKRGRAFDDILATRDYLLAMPKCSGRVGIAGFCMGGRFALVMSPKGFDASAPFYGTPLPRNLSETLNGACPIVASFGGRDPLGIGAPKRLRQATQTRHITTDIKVYPDAGHSFANKLPGQPLMRITGFGYNQAATEDAWSRVFAFFDKHLRTD

SEQ ID NO: 41819 - DNA, 1062 bp, Agrobacterium tumefaciens str. C58
  CDS (1)..(1062): transl_table=11
atgatatcttccatcgcatggaagagggcaagatcgacggccgtatcgtcgtggatctcgccgcctgacgtcaaacccggttgcggcgctcacgcaaatgtgtggcgccgcttccgcccgccttgttccgcgaagggcgatctgcgttatcctcctttcgcatccgggttcaaggaggaaagagcgatggacaagcccaagattacgcaggccatgatcgacgcttacgatgaatatacccatctcagcctcgaccgccgcaagttcatggaaaagctcagcctgcttgccggctccggtgcggccgcggcggcaatcgcaccgctgctttcggccaacagcgcccgcgcggccatcgtcgcgcctgacgatgcgggcattgttgcggaggacgtgacctatccagcaccaggcggtgagatgaaaggctatctcgtcacaccgaaatcggtgtctggcccgatcggttccgtcatcgtcatccatgaaaaccgaggtctgaacgaccatatccgcgatgtggcaaggcgcgtggcgcttgccggtttccgggcgctggcggtcgatttcctttcgccgcagggcggaacgccctctgatgaggataaggcacgagaaatgttcagcgggctcgacatggaggcaaccgttgccaatgccgaagcgggccgggtgtggctcgcggcaaggcagggcgcgaatggcaaggtcggtgcggtcggtttctgctggggcggcgggctggtcaatcgtttcgccaccaaatcggccggcctcaatgccggtgtcgcctattacggccagcaaccgcccgtggccgacgttcgtgatatcaaggcgccattgcttttgcactatgccggtctcgacgagcgcatcaatgccgggatcgacgcctataagaaggcgctggaggcaaacggcaaaaccttcgaaatcttcgtttatgacggcgtcaaccatgctttcaataacgatacgtcatcggcgcgctacgacaaggccgctgctgatctcgcctggggccggacgacggatttcttcaaaaaatatctggcgtaa

SEQ ID NO: 41820 - protein, 353 aa, Agrobacterium tumefaciens str. C58
MISSIAWKRARSTAVSSWISPPDVKPGCGAHANVWRRFRPPCSAKGDLRYPPFASGFKEERAMDKPKITQAMIDAYDEYTHLSLDRRKFMEKLSLLAGSGAAAAAIAPLLSANSARAAIVAPDDAGIVAEDVTYPAPGGEMKGYLVTPKSVSGPIGSVIVIHENRGLNDHIRDVARRVALAGFRALAVDFLSPQGGTPSDEDKAREMFSGLDMEATVANAEAGRVWLAARQGANGKVGAVGFCWGGGLVNRFATKSAGLNAGVAYYGQQPPVADVRDIKAPLLLHYAGLDERINAGIDAYKKALEANGKTFEIFVYDGVNHAFNNDTSSARYDKAAADLAWGRTTDFFKKYLA

SEQ ID NO: 41821 - DNA, 786 bp, Sulfolobus tokodaii str. 7
  CDS (1)..(786): transl_table=11
atgattatgctttcggaaaaggaaatattttataactcatacgactcaaatataagagcttttatagcttccccagaaaatcctaaactagctgttattgtaattcatgagatatgggggcttaatgataatattaaggacatttcaagaagactagctaacgaaggttattttgcgtttgccccacagctatataccaagtatgaaaatatccttacaccagaaaatatacagaatgttatgcgaaaagtctggagtataccagcagaaaaaaggacagatcccagtacatataatgaaataatcagttcacttgatgagaatggtaaaaaagtagttgaattgttagttactggaagggctaaaatggaagaacagatgataaaggatctgattaaggcctatgaatatctaaattcccaaggttataagaagattgttagtatgggtttctgtatgggaggaggactagctttccagttagctactgaagtaccactcgatgggactatagtattttatggtaggaatcctcaacctattgatgctgtacagaagattaagggaccaattctaggtttatatgcaggcgaagatccaccaatactatccggattaccggatttaatatcagcagtaataaaatacaagaaagatttagagcttaagatttatcctggggcataccatgcgttctttaatgatagaggaccagtttataataaagatgctgctgaagatgcttgggaaagagtaaagaatttcttaaagaggttatcgaaatga

SEQ ID NO: 41822 - protein, 261 aa, Sulfolobus tokodaii str. 7
MIMLSEKEIFYNSYDSNIRAFIASPENPKLAVIVIHEIWGLNDNIKDISRRLANEGYFAFAPQLYTKYENILTPENIQNVMRKVWSIPAEKRTDPSTYNEIISSLDENGKKVVELLVTGRAKMEEQMIKDLIKAYEYLNSQGYKKIVSMGFCMGGGLAFQLATEVPLDGTIVFYGRNPQPIDAVQKIKGPILGLYAGEDPPILSGLPDLISAVIKYKKDLELKIYPGAYHAFFNDRGPVYNKDAAEDAWERVKNFLKRLSK

SEQ ID NO: 41823 - DNA, 876 bp, Sinorhizobium meliloti 1021
  CDS (1)..(876): transl_table=11
atgaacaagcctgtcatcacccaggcgatgatcgatgcctatgacgaatatacccatctcactttggatcgccgccgtttcatggagagattgacggcgctcgcgggtacggctgcggccgccgccgcaatcgcgccgatgctggctgccaacagtgccaaagccgaaatgatcgccgagacggacgagcgtatcaagggagaggacatcacctatcccggcgccgacggcgaaatgaagggatatctcgtcagacccgccgatgcctcgggcaagcttcccgccgtcatcgtcattcacgagaatcgtggcctgaacccgcacataagagacgttgcgcgccgcatggcgctcgaaggtttcgtggcgcttgcgcccgatttcctgtcgcctgacggtgggacacccgatgacgaggacaaggcgcgggagatgatcagcgcactcgacgcaaccgagacgaatgcgaatgccgtcgccaccgtgagctttctgaaaggccatgcggaaagcacaggcaatgtcggcgcgatcggattttgctggggcggcggtctcgtcaacaggcttgccgtgaacgcacccgatctcaaggccggcgtggcctattacggtgcccaggcgaaggccgaggacgtgccgaagatcaaggcggcgctgctgctgcattacgccgggctcgacgagcgcatcaatgccggcatagaggcctaccgcaaggcgctgacggaaaacggcaaggacgtgacgatccacgtctatgaaggtgcgaaccacgccttcaacaacgatacctcggcggcgcggtacaacaaggaggcggccgacctcgcctggcagcggaccgtcgaattcctgaagacgaagctggtttga

SEQ ID NO: 41824 - protein, 291 aa, Sinorhizobium meliloti 1021
MNKPVITQAMIDAYDEYTHLTLDRRRFMERLTALAGTAAAAAAIAPMLAANSAKAEMIAETDERIKGEDITYPGADGEMKGYLVRPADASGKLPAVIVIHENRGLNPHIRDVARRMALEGFVALAPDFLSPDGGTPDDEDKAREMISALDATETNANAVATVSFLKGHAESTGNVGAIGFCWGGGLVNRLAVNAPDLKAGVAYYGAQAKAEDVPKIKAALLLHYAGLDERINAGIEAYRKALTENGKDVTIHVYEGANHAFNNDTSAARYNKEAADLAWQRTVEFLKTKLV

SEQ ID NO: 41825 - DNA, 840 bp, Thermoplasma acidophilum DSM 1728
  CDS (1)..(840): transl_table=11
atgctacaaaatggttatgttccatgctcatttcgaatttctatggcaggaatggatgtggaattcaacaccaagaatgacgtaataaaggcatatttatcgcgcccagatgacggcatgaggcatcccggcatagtggtgatacacgagatattcggtcttgacgatcacatcaggtccgtggcggacaggatctcacgcgaaggctatgtggcgctggccccagatctcttttcaagccacgaactctctgcaaagataaccagagagggcatactcgagagcatgaaattcatcatgagcattcccccggagaagcagcgggatgattcatacagaaactctcttcttaattcaatgccggaggaaaagagaaggataatgtccagcacctattccgctctctttgtaaacaggccaacacagctgcttacggaatacctagaatacgccgttgattacctgaagggcatcggcgtaaccagtgtgggttcggttggtttctgtttcggcggaggcatgtccgcgaatctgggatgcacgggcaaggttgacgctacggtgatattttacggtgagaaccctgatcccatagataaggtcaagggaatgaagagtgtgcttggtctttatgccggagaagatcacaggatcacttcacgcgttccagagctactggccaagctgatagagttcagcatccccgtgacaataaaggtgtacccgggggcctatcatgccttcttcaacgatacaaggccgcagatatacaacgaggcagctgcgaaggatgcctggaacatgatgctgtacttcttcaggacgcagcttggcccttag

SEQ ID NO: 41826 - protein, 279 aa, Thermoplasma acidophilum DSM 1728
MLQNGYVPCSFRISMAGMDVEFNTKNDVIKAYLSRPDDGMRHPGIVVIHEIFGLDDHIRSVADRISREGYVALAPDLFSSHELSAKITREGILESMKFIMSIPPEKQRDDSYRNSLLNSMPEEKRRIMSSTYSALFVNRPTQLLTEYLEYAVDYLKGIGVTSVGSVGFCFGGGMSANLGCTGKVDATVIFYGENPDPIDKVKGMKSVLGLYAGEDHRITSRVPELLAKLIEFSIPVTIKVYPGAYHAFFNDTRPQIYNEAAAKDAWNMMLYFFRTQLGP

SEQ ID NO: 41827 - DNA, 681 bp, Caulobacter crescentus CB15
  CDS (1)..(681): transl_table=11
gtggccaagaccatcaccctgaccgccgcccatgacggctttacgttcaccgccctgcacgccgagccggaaggcccgcgcaagggtggcgtcatcgtcatccaggagatcttcggcctggatcaatacgtccaccaggacgtcgcccggtggaccgcgcgcggctttgaggtgatcgccccctcgatgttcgaccgtcaggagaagggctttaccgccctgcacgacccggcgggcttcgagaacggcgtcaagcacgccctggccaacggccccgacaacgccatgggcgacatccaggcttgcgtggactttctcaaggcccggggccccgtcttcgtggtcggctactgctacggcggcaccatgacctggctggcggcttcacgctgcgaggggatcgcggcgggctccagctactacggcggtcaggtcgccggcatggccaagttcgcgctgaaggcgccggtgatcgtccatctggggcgcaaggacccgcatatccccgccgacgaggtcaaggcggcggtgcaggccgcccaccccgaggttcccgtctatatctacgagtccagcggccacggcttcaacaatgacggccgccccgactccgacctcgccgacgccgaactggcccgtcagcggaccgtggacttcttcgccgcgcacggggcgggctga

SEQ ID NO: 41828 - protein, 226 aa, Caulobacter crescentus CB15
MAKTITLTAAHDGFTFTALHAEPEGPRKGGVIVIQEIFGLDQYVHQDVARWTARGFEVIAPSMFDRQEKGFTALHDPAGFENGVKHALANGPDNAMGDIQACVDFLKARGPVFVVGYCYGGTMTWLAASRCEGIAAGSSYYGGQVAGMAKFALKAPVIVHLGRKDPHIPADEVKAAVQAAHPEVPVYIYESSGHGFNNDGRPDSDLADAELARQRTVDFFAAHGAG

SEQ ID NO: 41829 - DNA, 696 bp, Caulobacter crescentus CB15
  CDS (1)..(696): transl_table=11
atgagcgagaccctcacgatcaacaccccggatggcgccttctcggcctatgtggcgcgcccgaaggcggcaagcgccccggccattgtcgtgatccaagagatcttcggcgtgaacaaggtgatgcgcgacatctgtgacggcctggccgcccagggcttcgtcgccatatgccccgatctcttctggcggatcgagcccggcatcgacatcaccgaccagagcgaagccgaatggaagaaagcgttcgagctgttcaacgcgtttgacgtggacgcgggggtcacggacatcgccgcgaccatcgccgccgcccgtaagctggacggcgtcaacggcaaggtcggcgcggtcggctactgcctcggcggcctgctggccttcctcaccgcgacccgcaccgacatcgacgcggccgtctcctactacggcgtagggatcgagaagcatgtcggcgaggccgagaagctgaaccatccgttgctgatgcatattgccgagaaggaccagttcgtgccgcctgaggcgcagcagctgatcctcagcgcgctcaaggatcatccccagatcgagatccatatctacgaaggccgagaccacgccttcgcccgcgagggtggcgcgcactacgacgcggccgacgccgccaaggccaacggccgcagcctgaccttcttccagcaggccctggcctga

SEQ ID NO: 41830 - protein, 231 aa, Caulobacter crescentus CB15
MSETLTINTPDGAFSAYVARPKAASAPAIVVIQEIFGVNKVMRDICDGLAAQGFVAICPDLFWRIEPGIDITDQSEAEWKKAFELFNAFDVDAGVTDIAATIAAARKLDGVNGKVGAVGYCLGGLLAFLTATRTDIDAAVSYYGVGIEKHVGEAEKLNHPLLMHIAEKDQFVPPEAQQLILSALKDHPQIEIHIYEGRDHAFAREGGAHYDAADAAKANGRSLTFFQQALA

SEQ ID NO: 41831 - DNA, 747 bp, Nostoc sp. PCC 7120
  CDS (1)..(747): transl_table=11
atgactgagcaagtagttgccacagaaaccgttaacctttcgcaagacagtctacaaatagctgcgtacttagcgcagccacaagcaccaggttcctacccaggagttgtagttttacaggagatttttggcgttaacggtcatattcgggacgtaaccgaacggattgctaagttagggtatgtggcgatcgctccggcgctattccaacgtcaagcaccaggctttgaaactggatacacaccccaagatattgaagttggtagaggttacgcgatgcaaaccaaagcatcagagttactaaacgatattcaagcagctatagattatctgaaaactctcccccaagtgaaacaaaatggctttggttgtattggcttctgctttgggggtcatgtagcctatcttgctgccactttaccagatatcaaagcgactgcctccttttacggtgcgggaattgctactcgtacatttggcggcgggaatcctactgtcacccgtacaccagaaatcaaaggcacactatatggcttttttggtacggaagatgccagtattcccccagagcaaatagaccaaatcgagacagagttagaaaaatacaacatttctcatcgtgtgttccgctacgatggagctgatcacggatttttctgtgaccgtcgtgccagctataatcctcaagcagcagctgatgcttgggagcaggtgcaacaactatttaagactgtgttaacaacatag

SEQ ID NO: 41832 - protein, 248 aa, Nostoc sp. PCC 7120
MTEQVVATETVNLSQDSLQIAAYLAQPQAPGSYPGVVVLQEIFGVNGHIRDVTERIAKLGYVAIAPALFQRQAPGFETGYTPQDIEVGRGYAMQTKASELLNDIQAAIDYLKTLPQVKQNGFGCIGFCFGGHVAYLAATLPDIKATASFYGAGIATRTFGGGNPTVTRTPEIKGTLYGFFGTEDASIPPEQIDQIETELEKYNISHRVFRYDGADHGFFCDRRASYNPQAAADAWEQVQQLFKTVLTT

SEQ ID NO: 41833 - DNA, 753 bp, Nostoc sp. PCC 7120
  CDS (1)..(753): transl_table=11
gtgaagatgtcaataaatcaaataggcaggagtaataaagtgcaaattgaaaagacagaggtggaaatttctacgcctgatggaaaaatgcctgccttcttttatcagccttgtgaacgtggacaaaagcccgccgtaattcttttaatggaagcatttggcttaacttcccacattcaagatgtagcaacccgaattgctaaggaaggctacgtagttctgactccagatttgtactatcgtgaattgacaaacaacaagtttggctatgaagaagttgagcaagcgatggcgatgatgtaccgccttgacttcggtaaaccaatagaggaggatattagggcagcgatcgcttatctcaagtcacagtctaatgtgttctcagaaaagattggcgtgactggattttgcttgggtggtggtctgtcttttctcagtgcttgcaagttttcagacgaaattgcggcggtagcttccttttacggaatggttctggatgattggatagaagcggtaacaaacatctcagtacccatatacttattttacggtggtatcgattcatttattccacctgagcgtgttcagcaaattgagacgcggttccaggaacttagcaaggaatacacattgaaggtttatcctgatgctgatcatggttttttctgccatgagcgttcttcctataaccgtttagcagccgaagactcatggaatgagctgacacagttcttccacagacatttacaataa

SEQ ID NO: 41834 - protein, 250 aa, Nostoc sp. PCC 7120
MKMSINQIGRSNKVQIEKTEVEISTPDGKMPAFFYQPCERGQKPAVILLMEAFGLTSHIQDVATRIAKEGYVVLTPDLYYRELTNNKFGYEEVEQAMAMMYRLDFGKPIEEDIRAAIAYLKSQSNVFSEKIGVTGFCLGGGLSFLSACKFSDEIAAVASFYGMVLDDWIEAVTNISVPIYLFYGGIDSFIPPERVQQIETRFQELSKEYTLKVYPDADHGFFCHERSSYNRLAAEDSWNELTQFFHRHLQ

SEQ ID NO: 41835 - DNA, 717 bp, Ralstonia solanacearum GMI1000
  CDS (1)..(717): transl_table=11
atgcaagcaaagcagggatccatgatttcgttcaagcgcccggacggccaggaactccagggctatctggccaggccggagcaggaggcgggcgcgcccggcgtggtcgtcatccaggagtggtgggggctgaatgaccagatccgcggcgtggccgaccggctggccgcggccggctacgtggcgctggtgcccgacctctaccgcggcagcgcgacggtggaagaggaagaggcccaccacctgatgaccaacctgaacttcggcgatgccgccagccaggatatccgcggcgcggtgcaatacctcaagcagcgctgcgagcgcgtgggcgtgacgggctactgcatgggcggggcgctgacgctgctggcgctgggcaacgtgccggaggccgcggccggcgtggtgtggtacggcttcccgccgctggaatacatcgacgcatcgcgtatcaaggtgccggtgcagggccactgggccacgcaggacggcttcttcaagctcgagacggtcgacgcgctggagcagaagctggccgagggcggcgtgtcggtcgagttccaccgctacctggcgcaccacgcctttgccaacgagacggccgtgggcccgggccgcattgcccatacgcagtacgacccggtctgggcccagcaggcatgggaccgcgcgctcacgttcttcggccgcaccctgtggccgcgccagggctga

SEQ ID NO: 41836 - protein, 238 aa, Ralstonia solanacearum GMI1000
MQAKQGSMISFKRPDGQELQGYLARPEQEAGAPGVVVIQEWWGLNDQIRGVADRLAAAGYVALVPDLYRGSATVEEEEAHHLMTNLNFGDAASQDIRGAVQYLKQRCERVGVTGYCMGGALTLLALGNVPEAAAGVVWYGFPPLEYIDASRIKVPVQGHWATQDGFFKLETVDALEQKLAEGGVSVEFHRYLAHHAFANETAVGPGRIAHTQYDPVWAQQAWDRALTFFGRTLWPRQG

SEQ ID NO: 41837 - DNA, 876 bp, Agrobacterium tumefaciens str. C58
  CDS (1)..(876): transl_table=11
atggacaagcccaagattacgcaggccatgatcgacgcttacgatgaatatacccatctcagcctcgaccgccgcaagttcatggaaaagctcagcctgcttgccggctccggtgcggccgcggcggcaatcgcaccgctgctttcggccaacagcgcccgcgcggccatcgtcgcgcctgacgatgcgggcattgttgcggaggacgtgacctatccagcaccaggcggtgagatgaaaggctatctcgtcacaccgaaatcggtgtctggcccgatcggttccgtcatcgtcatccatgaaaaccgaggtctgaacgaccatatccgcgatgtggcaaggcgcgtggcgcttgccggtttccgggcgctggcggtcgatttcctttcgccgcagggcggaacgccctctgatgaggataaggcacgagaaatgttcagcgggctcgacatggaggcaaccgttgccaatgccgaagcgggccgggtgtggctcgcggcaaggcagggcgcgaatggcaaggtcggtgcggtcggtttctgctggggcggcgggctggtcaatcgtttcgccaccaaatcggccggcctcaatgccggtgtcgcctattacggccagcaaccgcccgtggccgacgttcgtgatatcaaggcgccattgcttttgcactatgccggtctcgacgagcgcatcaatgccgggatcgacgcctataagaaggcgctggaggcaaacggcaaaaccttcgaaatcttcgtttatgacggcgtcaaccatgctttcaataacgatacgtcatcggcgcgctacgacaaggccgctgctgatctcgcctggggccggacgacggatttcttcaaaaaatatctggcgtaa

SEQ ID NO: 41838 - protein, 291 aa, Agrobacterium tumefaciens str. C58
MDKPKITQAMIDAYDEYTHLSLDRRKFMEKLSLLAGSGAAAAAIAPLLSANSARAAIVAPDDAGIVAEDVTYPAPGGEMKGYLVTPKSVSGPIGSVIVIHENRGLNDHIRDVARRVALAGFRALAVDFLSPQGGTPSDEDKAREMFSGLDMEATVANAEAGRVWLAARQGANGKVGAVGFCWGGGLVNRFATKSAGLNAGVAYYGQQPPVADVRDIKAPLLLHYAGLDERINAGIDAYKKALEANGKTFEIFVYDGVNHAFNNDTSSARYDKAAADLAWGRTTDFFKKYLA

SEQ ID NO: 41839 - DNA, 933 bp, Arabidopsis thaliana
  CDS (1)..(933)
atggctgcatcgttagcctctctttcctccttagctaaagccggagcaccacggtcactgttcaaccgccatggcagccaccgccttcctcctccacaaatcatacctcttgcttcctctatcaagaaacatatcacgacgagcttctataggagaggaagttctctgaagaacatttatgccctcgagacctctgacggcgccattaacgtggaggtcgatgatgatgaggaagaagaagcgtgtgagcttgttaacggaacagaagtgtccgttgacggtgttgaaggttatcttttaacggcggtgaagaacaataacggaactggattgcttctactctctgatgtctttggctttcaagattcagctacacgcgatttcgcttaccgtgtggcttgcaatggctataacgttcttgtcccggacttgtttcgtggagatccatggtcgaaaaaccgaccaaagtccgaatacgaggaatggagaagaggacatgaccctaaccgtatcagacaagacactactaccttcacaaaatggatggttgaggaatttgcagcggctggaatctccaagaagctaggagtgatggggttctgttttggcggtggacgtgtggttgacgtgttagccacggatgagagcggttactttagcaccggtgtctcgttctacggtacgagaatagactcggcggtggcgggagatgtgaaagtgccagtcttgtttattgctggagatagagacccgctttgtgaagtgaagggtttgtatgaaattgaggagaagattggtgaaggttcaaaggttgttgtgtatgaaggaagaggtcacggctttgttcaccggcccgagacacccgaagatgatcgagacgctgaggaagcgtttgctctcatgagaaattggttacatcatcatttgatttga

SEQ ID NO: 41840 - protein, 310 aa, Arabidopsis thaliana
MAASLASLSSLAKAGAPRSLFNRHGSHRLPPPQIIPLASSIKKHITTSFYRRGSSLKNIYALETSDGAINVEVDDDEEEEACELVNGTEVSVDGVEGYLLTAVKNNNGTGLLLLSDVFGFQDSATRDFAYRVACNGYNVLVPDLFRGDPWSKNRPKSEYEEWRRGHDPNRIRQDTTTFTKWMVEEFAAAGISKKLGVMGFCFGGGRVVDVLATDESGYFSTGVSFYGTRIDSAVAGDVKVPVLFIAGDRDPLCEVKGLYEIEEKIGEGSKVVVYEGRGHGFVHRPETPEDDRDAEEAFALMRNWLHHHLI

SEQ ID NO: 41841 - DNA, 765 bp, Streptomyces coelicolor A3(2)
  CDS (1)..(765): transl_table=11
atgcccacccagtccaggtcgctgcggattcctaccgcggacggacaggccgacgcgttcgccgccttcccgggcggcggggaacggcacccgggggtgctgatgtacgcggacggcttcgggatccggcccgtgctgagggagctggcccgcgaactggccgggcacgggtactacgtactcgtgcccaacttcttctaccggcacggcccggcgccggtcatcgagctgcccgagtacatcggagaagaggcgcgcggcgcggtcttcgcccagctgatgcccttgatcgaggcgcacacggcggagcgggtgctgcgcgacgccgacgcctttctcacgttcctcaccgctcggcccgaggtcggtccagggccggtcgcggtgaccggctactgcatcggcggcctcttggcgacgcgcaccgcggtggcgcacccgggccaggtggccgccctcgccgcgttccacgcgcccgtgggagccgacgggcccgaaagcctcgccaagctcaccgccgaggtccacttcgggcacgccgagagcgacttgacgccagagggcctcggcgagctgaaccaggccctggaggcggcgggtgtcggctacacctcggagatctatcccggcaccgtccacggtttcaccatgtccgacaccggtgccttcgacgccgccgcactgcggctccactgggagcgcctgctgcctcttctcggccgcaccctggatcgcggtggggaactcggtcggtcgcgtcgttga

SEQ ID NO: 41842 - protein, 254 aa, Streptomyces coelicolor A3(2)
MPTQSRSLRIPTADGQADAFAAFPGGGERHPGVLMYADGFGIRPVLRELARELAGHGYYVLVPNFFYRHGPAPVIELPEYIGEEARGAVFAQLMPLIEAHTAERVLRDADAFLTFLTARPEVGPGPVAVTGYCIGGLLATRTAVAHPGQVAALAAFHAPVGADGPESLAKLTAEVHFGHAESDLTPEGLGELNQALEAAGVGYTSEIYPGTVHGFTMSDTGAFDAAALRLHWERLLPLLGRTLDRGGELGRSRR

SEQ ID NO: 41843 - DNA, 756 bp, Streptomyces coelicolor A3(2)
  CDS (1)..(756): transl_table=11
atgaccgccacagcgggaacggccctcgacatccccaccggcgacggcaccgccgacgcctatctgacccgtccggccgacgggggaccgcatcccgcggtcctgctgtacatggacgccttcgggctgcgtccgagcctgcggtcgatggccgaccggctggccggtgccgggtacaccgtcctggtgccgaacgtcttctaccgcagtggacggactcccgtcgtggagctgcccgggttcatcgacccgcgggcgcggccggagatcttcgaacggctcgggccgatcatgcggtcgctgaccccggacctggcgatgcgggacgccgacgcctacctgcgcctgctggccggccgtccggaggcggccgacggtccggtcgcgctcgtcggctactgcatgggcgccgcgctcgccctgcgcaccgcggggacgtatccggaccgggtcgccgcggtcgccgggttccacggcgccaacctggcgacggacgggccgcacagcccgcacctggtggccggggacatcaccgccgaggcgtacttcgcccacgcggaccaggatccgggaatggacgccgagcagcaggagcgcctgtcggcggccctgacggcggccggtgtccggcaccgctgcgaggtctacgccggcgcccaccacggctacacgcaggccgacacctcggcctacgacccggaggcgaccgagcggcactggacggccctgctcgacctcctgaagcggacgttctga

SEQ ID NO: 41844 - protein, 251 aa, Streptomyces coelicolor A3(2)
MTATAGTALDIPTGDGTADAYLTRPADGGPHPAVLLYMDAFGLRPSLRSMADRLAGAGYTVLVPNVFYRSGRTPVVELPGFIDPRARPEIFERLGPIMRSLTPDLAMRDADAYLRLLAGRPEAADGPVALVGYCMGAALALRTAGTYPDRVAAVAGFHGANLATDGPHSPHLVAGDITAEAYFAHADQDPGMDAEQQERLSAALTAAGVRHRCEVYAGAHHGYTQADTSAYDPEATERHWTALLDLLKRTF

SEQ ID NO: 41845 - DNA, 744 bp, Thermosynechococcus elongatus BP-1
  CDS (1)..(744): transl_table=11
atggtggagatgaccagtcgttgggttaaagtcgtcaatggcgatctgctaattgatgcctacttggcagagccagtggctgccggccgttatccagcagtgattgtctttcaggaaatttttggcgtcaatgcccatatccgcgatgtgaccgaacgcattgcccgcgaaggctacgtggcgatcgcccccgccctttaccaacgcttcgcccccggctttgaaacgggctacactgcggctgatattgatttggggcgacagtacaaaaaccaaaccacagccgaggaactcctcagtgacacccaagccaccattgcctatctgcgtggcctcgaaaaggtggatggcgacgccattggtaccattggcttttgctttgggggtcatgtggcctatctggtggcccagttgccggacattaaggccacggcctcattctatggtgctgggattacaaccatgacccccggcggtggcctacccacgattgaaatcacaccaaaaattcgtggcacactctatgccttctttggcgatcgcgaccaaagtattcccatggagcaggtgaaacaaattgaaacggcgctgcgccaccatggcattcgccaccacatcttcatctatcctgcggatcatggctttttctgcgatcaacgggacagctacgatgcagcagcagcacgggatgcctgggaacaggtgaaaaacctcttcaacaccgtcctacggcagcaacactga

SEQ ID NO: 41846 - protein, 247 aa, Thermosynechococcus elongatus BP-1
MVEMTSRWVKVVNGDLLIDAYLAEPVAAGRYPAVIVFQEIFGVNAHIRDVTERIAREGYVAIAPALYQRFAPGFETGYTAADIDLGRQYKNQTTAEELLSDTQATIAYLRGLEKVDGDAIGTIGFCFGGHVAYLVAQLPDIKATASFYGAGITTMTPGGGLPTIEITPKIRGTLYAFFGDRDQSIPMEQVKQIETALRHHGIRHHIFIYPADHGFFCDQRDSYDAAAARDAWEQVKNLFNTVLRQQH

SEQ ID NO: 41847 - DNA, 411 bp, Shigella flexneri 2a str. 301
  CDS (1)..(411): transl_table=11
atgaatgatttctttgccgcaattgagtttatgcaacgctatccgcaagcgacaggtaaagtgggtattaccggattttgctatggcggtggcgtatcgaacgcggcggctgtcgcgtatccggaactggcctgcgcggtgccgttttatggtcgtcaggcacccactgccgatgtggcgaagattgaagcgcctttactactccacttcgcggaactggacacccgaatcaacgagggctggcctccttacgaggcggcgttgaaagacaataataaggtttatgaggcttatatctatccgggggttaatcacggattccataatgattccacgccccgttatgacaaatctgccgccgatcttgcctggcaaaggacactgaaatggttcgataaatatctctcctga

SEQ ID NO: 41848 - protein, 136 aa, Shigella flexneri 2a str. 301
MNDFFAAIEFMQRYPQATGKVGITGFCYGGGVSNAAAVAYPELACAVPFYGRQAPTADVAKIEAPLLLHFAELDTRINEGWPPYEAALKDNNKVYEAYIYPGVNHGFHNDSTPRYDKSAADLAWQRTLKWFDKYLS

SEQ ID NO: 41849 - DNA, 882 bp, Shigella flexneri 2a str. 301
  CDS (1)..(882): transl_table=11
gtgatttgttgcatgctgactatagttaacattgcgcaacatttttataagggtacggagaataccatggcaacaacacaacaatctggatttgcacctgctgcatcgcctctcgcttcgaccatcgttcagaccccggacgacgcgattgtggcgggcttcacctctatcccttcacaaggggataacatgcctgcttaccatgccagaccaaagcaaagcgatggcccactgccagtggtcattgtagtgcaggaaatttttggcgtgcatgaacatatccgcgacatttgtcgccgtctggcgctggaggggtatctggctatcgcacctgaactttacttccgcgaaggcgatccgaatgattttgccgatatccccacgttgcttagcggtctggtagcaaaagtgcctgactcgcaggtgctggccgatctcgatcatgtcgccagttgggcttcccgcaacggcggcgatgttcatcgtttaatgatcaccggattctgctggggtggacgtatcacctggctgtatgccgcgcataatccacagctaaaagccgcagtggcgtggtacggcaaactgacgggcgacaagtcgctgaattcaccgaaacaacctgttgatatcgcaaccgatcttaacgcgccggttctcggcttatatggtggtcaggataacagcattccgcaggagagcgttgaaacgatgcgccaggcgctgcgggctgctaatgcgaaagcagagattatcgtgtacccggatgccgggcatgcattcaacgctgattatcgcccgagctatcatgccgaatctgcgaaagatggctggcagcgtatgctggaatggtttaagcagtatggtgggaagaagtcgctgtaa

SEQ ID NO: 41850 - protein, 293 aa, Shigella flexneri 2a str. 301
MICCMLTIVNIAQHFYKGTENTMATTQQSGFAPAASPLASTIVQTPDDAIVAGFTSIPSQGDNMPAYHARPKQSDGPLPVVIVVQEIFGVHEHIRDICRRLALEGYLAIAPELYFREGDPNDFADIPTLLSGLVAKVPDSQVLADLDHVASWASRNGGDVHRLMITGFCWGGRITWLYAAHNPQLKAAVAWYGKLTGDKSLNSPKQPVDIATDLNAPVLGLYGGQDNSIPQESVETMRQALRAANAKAEIIVYPDAGHAFNADYRPSYHAESAKDGWQRMLEWFKQYGGKKSL

SEQ ID NO: 41851 - DNA, 798 bp, Pseudomonas putida KT2440
  CDS (1)..(798): transl_table=11
gtgaacatgcgagccctgctggccctgaccctgatgtgcagcgccgccctcgcccaagcggcggtagtgacccgtgaaattccgtatcaggacgacgatggcaaccgcctcgtcggctactacgcctacgatgacgcgctggacggcaaacgcccaggcatcgttgtggtgcatgaatggtggggcctgaacgactatgccaagcgtcgtgcgagagatctcgccgccctgggctacaaggcactggccatcgacatgtacggcgatggcaagcacaccgagcatccgcaggatgcccaggcattcatggccgcagcgatgaaggacccggccgcagcagcagcgcgcttcgacgcgggcctggagttgttgaagaagcagccgaatgtgaacaagcatcaactgggcgctgtcggctactgttttggcggcaaggtggtgctcgatgccgcacgccggggagaaaagctcgatggcgtggtgagcttccatggcgcactggccacccagaccccggcaaaacctggcgtggtgcgggccgatatcctggtcgagcatggtgcggcggacagcatggtcaccccacagcaggtggaggcatttaaggccgagatggatgcggccaaggtcaactaccagttcgtcagtattgaaggggccaagcacgggttcaccaaccccgatgccgatcggctgagccacggtgaacatggggggccggacattggctataacaaggcagcggacgagcgttcctgggcagatatgcaggcgttcttcaagaaggtgttcaaataa

SEQ ID NO: 41852 - protein, 265 aa, Pseudomonas putida KT2440
MNMRALLALTLMCSAALAQAAVVTREIPYQDDDGNRLVGYYAYDDALDGKRPGIVVVHEWWGLNDYAKRRARDLAALGYKALAIDMYGDGKHTEHPQDAQAFMAAAMKDPAAAAARFDAGLELLKKQPNVNKHQLGAVGYCFGGKVVLDAARRGEKLDGVVSFHGALATQTPAKPGVVRADILVEHGAADSMVTPQQVEAFKAEMDAAKVNYQFVSIEGAKHGFTNPDADRLSHGEHGGPDIGYNKAADERSWADMQAFFKKVFK

SEQ ID NO: 41853 - DNA, 927 bp, Escherichia coli CFT073
  CDS (1)..(927): transl_table=11
atgctttgcttaaaaaaacaccagttgaggagtgcaacgatgccgcgtttaaccgccaaagatttcccacaagagttgctggattactacgactattacgctcacgggaaaatctcgaaacgtgagttcctcaactttgcggcgaagtatgcagtgggcgggatgacggcattagcgctgtttgatttgctcaagccaaattatgcgctggcgactcaggtagagtttaccgacccggaaattgttgcagagtacatcacgtatccctcgccaaatggtcacggcgaggtacggggttatctggtgaagcccgcaaaaatgagcggcaaaacgccagccgtggtagtggtgcatgagaatcgagggctgaatccgtatatcgaagatgtgacgcggcgagtggcgaaggcggggtacatcgccctggcgccagacggtttaagctcagtaggtggctatcttggtaacgatgataaaggccgcgaactgcaacagcaggttgatccaaccaaactgatgaatgatttctttgccgcaattgagtttatgcaacgctatccgcaagcgacaggcaaagtgggtattagcggattttgctatggcgggggcgtatcgaacgcggcagcagtcgcgtatccggaactggcctgcgcggtgccgttttatgggcgtcaggcacccactgccgatgtggcgaagattgaagcgcctttactgctccactacgctgaactggatagccgaatcaacgagggctggcccgcttacgaggcggcgttgaaagccaataataaggtctatgaggcgtatatatatccgggggttaatcacggattccataatgattccacgccccgttatgacaaatctgccgccgatcttgcctggcaaaggacgctgaaatggttcgataaatatctctcctga

SEQ ID NO: 41854 - protein, 308 aa, Escherichia coli CFT073
MLCLKKHQLRSATMPRLTAKDFPQELLDYYDYYAHGKISKREFLNFAAKYAVGGMTALALFDLLKPNYALATQVEFTDPEIVAEYITYPSPNGHGEVRGYLVKPAKMSGKTPAVVVVHENRGLNPYIEDVTRRVAKAGYIALAPDGLSSVGGYLGNDDKGRELQQQVDPTKLMNDFFAAIEFMQRYPQATGKVGISGFCYGGGVSNAAAVAYPELACAVPFYGRQAPTADVAKIEAPLLLHYAELDSRINEGWPAYEAALKANNKVYEAYIYPGVNHGFHNDSTPRYDKSAADLAWQRTLKWFDKYLS

SEQ ID NO: 41855 - DNA, 672 bp, Bradyrhizobium japonicum USDA 110
  CDS (1)..(672): transl_table=11
gtgggacaagacatcagactgacggcctccgacaatttccagctgggcggctatcgcgccgatcccgcaggcaacccgaagggcgcggtggtggtgatccaggagatattcggggtcaatcatcacatccgctcggtctgcgatcggctggcgagcgaaggctatgtcgcgatcgcgccgtcgatcttcgaccgcacctcgcccaatttccagtcgggctatacgcccgacgagatcgccgaggcgcgcaagttcgtcgccagtcccgactgggccgcgatgctgcgcgacacccaagccgcgatcgatgcggtgaagggcgtcggaccggtcggcatcatcggcttttgcctcggcggcagcgtcgccttcgtcgcggcgacgcggctgtcgggcctgaaggcggcgatcggctattacggcggcgcggtcgtgcgctttgccgacgagacgccgaaggtgccgacgcaactgcatttcggcgagaaggatgccggcattcccctgaccgacgtcgagaccgtcaaggcgaaacggccggacgtggaggtcttcatctatcccggcgcccagcacggctttcattgcgacgagcgcgccagctacgacaaggcgagtgccgacatcgcctggccacgcagcatggaattcttcgcggagcatttgacgtaa

SEQ ID NO: 41856 - protein, 223 aa, Bradyrhizobium japonicum USDA 110
MGQDIRLTASDNFQLGGYRADPAGNPKGAVVVIQEIFGVNHHIRSVCDRLASEGYVAIAPSIFDRTSPNFQSGYTPDEIAEARKFVASPDWAAMLRDTQAAIDAVKGVGPVGIIGFCLGGSVAFVAATRLSGLKAAIGYYGGAVVRFADETPKVPTQLHFGEKDAGIPLTDVETVKAKRPDVEVFIYPGAQHGFHCDERASYDKASADIAWPRSMEFFAEHLT

SEQ ID NO: 41857 - DNA, 888 bp, Bradyrhizobium japonicum USDA 110
  CDS (1)..(888): transl_table=11
atgagtttcgaaacgatcatgacatccgacgtcgtcgggctgacgaaagttgccccggtctcgcgccgcggattcatgagcgcgaccgcagccgtcgccgctggctacacgcttgcggcaggtcccgtccgtgccgaggtgatcgcgacggataccaagggcctccaggccggcgacgccaggatcaaggtcggctccgaggagatgcctgcctatttcgcccgccccgccggcaacaccaaggcgccggtgatcatcgtggcgatggagattttcggcctgcacgaatacatcaaggacgtgacgcggcgcctggccaagctcggcgcattcgcaatcgcgcccgactattacttccgcaagggcgtcgacctgaccaaggtgaccgacatcaaggacctgttggcggtcgtgaatgccaagccggacgccgagctgctgtccgatctcgacgtgacggtggcgtgggcgggatcgcagggcggcgataccgccaagctcggtatcatcggcttctgccgcggcgggcgctccgtctgggaatatgccgctcacggcggtactctcaaggcgggtgtcgcattctatgggacggtggtcgaccccgccaatccactgtggccgaagagcccgctccagctcgcacccgagatgaagacgccggtgctcggcctctatggcggcgccgataccggcattcccgttgcgcaggtcgagcagctcaaggcggcgctcgagcagaacaagaagacggccgaattcaagatctaccccgaagcgccgcacggcttccatgccgactaccgcggcagctaccgcaaggacgccgcggaagatgcctggaagcaggccgaggcctggttcaagaaatatggcgtcctgagctga

SEQ ID NO: 41858 - protein, 295 aa, Bradyrhizobium japonicum USDA 110
MSFETIMTSDVVGLTKVAPVSRRGFMSATAAVAAGYTLAAGPVRAEVIATDTKGLQAGDARIKVGSEEMPAYFARPAGNTKAPVIIVAMEIFGLHEYIKDVTRRLAKLGAFAIAPDYYFRKGVDLTKVTDIKDLLAVVNAKPDAELLSDLDVTVAWAGSQGGDTAKLGIIGFCRGGRSVWEYAAHGGTLKAGVAFYGTVVDPANPLWPKSPLQLAPEMKTPVLGLYGGADTGIPVAQVEQLKAALEQNKKTAEFKIYPEAPHGFHADYRGSYRKDAAEDAWKQAEAWFKKYGVLS

SEQ ID NO: 41859 - DNA, 732 bp, Bradyrhizobium japonicum USDA 110
  CDS (1)..(732): transl_table=11
atgatcgaccagcagatcgcgattcccaccaaggacggccacaccgcaaccttcatcagccatcccgagcgtggcgggccgtttccggtcatcctgttctacatggatgcgccggcgatccgcgaagagctgcgcgacatggcgcgccggctcgcgacatcaggctattacgtgatgctgccgaacctctattaccgctccggcgtgatggagctgggcgcgctgccggccgacccgaacgcaccggagcgcaagcgcatgttcgcgctgatgagctcgctcaccattcccatgatcatggacgacacacgcgcgctgctcacttacgccgagggccaggccgccgcgaacacgaagattgtcggcaccgtcggctactgcatgagcggccgctacgcggtcaacgccgccacgcatttccccgatcgcgtcaaggccgccgcctcgatctacggggtgcagctcgcaaccgaccaggacgacagtccgcatctggccccagccaagaccagggccgagctctacttcgcctgcgccgagaccgatgtctacgcgccgccggagattatcgaaaaggtcaaagagggcatgaaaggtgccaaggccgaggtcgagatctatcccggcacgcatcacggcttcgccttccccaagcgcccggtctatgaccgcgacgccgccgagcggcactgggagcgtctgctggcgctctatcgccgcaatctcgtgtga

SEQ ID NO: 41860 - protein, 243 aa, Bradyrhizobium japonicum USDA 110
MIDQQIAIPTKDGHTATFISHPERGGPFPVILFYMDAPAIREELRDMARRLATSGYYVMLPNLYYRSGVMELGALPADPNAPERKRMFALMSSLTIPMIMDDTRALLTYAEGQAAANTKIVGTVGYCMSGRYAVNAATHFPDRVKAAASIYGVQLATDQDDSPHLAPAKTRAELYFACAETDVYAPPEIIEKVKEGMKGAKAEVEIYPGTHHGFAFPKRPVYDRDAAERHWERLLALYRRNLV

SEQ ID NO: 41861 - DNA, 888 bp, Pseudomonas syringae pv. tomato str. DC3000
  CDS (1)..(888): transl_table=11
atggaacgtctcaccgcgaaagactttgcgcctgaactgcttgagctttacgactactacgcacacggcaagatcaaccggcgcgagtttcttgaccgtgcagctctgttctcgctgggggggctgaccgcaggcgcgctacttgcctcgctgagccccgattatgcgctggccacacagatcgagttcaccgacccggacatcattgccgaatacgtgtcttatccatcgcccaaagggcatggtcaggttcgcggctacctggtacgtccggccaaggccaccggcaaggtgccagccattgtcgtggcgcacgagaatcgtggtttgaacccctacatcgaagatgtggcccgccgcgtcgccaaggccgggttcatcgcactggctccggacgggctgtcctcggtgggcggctatccgggcaacgacgacaagggccgtgagttgcaacagaaggtcgacccggaaaagctcatgaatgatttttttgccgccatcgagtggctgatgaagcatgacgcaaccaccggcaaggtcggcataaccggcttctgctatggcggcggggtgaccaacgcagcggcagtcgcctacccggagctgggcgcggcggtgtcgttctacggacgccagcccaatgctgaggacgtggtgaagatcaaggcgccggtgatgatccactacggcgaactggacacgcgcatcaacgaaggttggccagcgtacgagaaagcattgaaagcggcaggcacgacctacgaaacctatatctacccaggtgccaaccacggcttccacaatgactcgacgccgcgctacgacgaagccgccgccaaactggcctgggagcggaccctggggtggttcaacaagtacctggtgtga

SEQ ID NO: 41862 - protein, 295 aa, Pseudomonas syringae pv. tomato str. DC3000
MERLTAKDFAPELLELYDYYAHGKINRREFLDRAALFSLGGLTAGALLASLSPDYALATQIEFTDPDIIAEYVSYPSPKGHGQVRGYLVRPAKATGKVPAIVVAHENRGLNPYIEDVARRVAKAGFIALAPDGLSSVGGYPGNDDKGRELQQKVDPEKLMNDFFAAIEWLMKHDATTGKVGITGFCYGGGVTNAAAVAYPELGAAVSFYGRQPNAEDVVKIKAPVMIHYGELDTRINEGWPAYEKALKAAGTTYETYIYPGANHGFHNDSTPRYDEAAAKLAWERTLGWFNKYLV

SEQ ID NO: 41863 - DNA, 930 bp, Vibrio parahaemolyticus RIMD 2210633
  CDS (1)..(930): transl_table=11
atgaggacatggataatgctaaagcacacgacgtcaagtgaaaaggcggctcaccccatcccgcaagaagccttcgattggtacgacgaatacgcgcatggaaagatatcgcgccgagaatttattaatcggcttggtggccttgcggtgctcgggtttagcatgaccgcactggttgacgcgctgacaccaaactacgcgcttgccgagcaagtctccttcaatgatcctgaaatcaaagccacgtacgaaaccttttcgtcgccgaatgggcatggtgaagggcgtggttacttggtgatgcctcagaaaaagaccatcaaatcaccaacggttttggtgattcatgaaaaccgtggcctcaacccttacattaaagacgtcgcgagacgactagcgaaagatggttttatcgcctttgctcccgatgctctctacccgttaggtgggtatccgggaaatgatgatgaagggcgagcaatgcaaaaagagatggacagagccaagattgagcaagactttatagcggccgctaaatttatcaaacagcacgaacatggaaacggcaagcttggcgcggttggtttctgttttggtggttatgtcgtcaatatgctggcggcagttatgccaaatgagctcgatgcaggcgtacctttttatggaacacccgctgcagaagagattcaaaaacaagtgaaaggcccattaatgttgcatttcgcagggttggataaacgtgtgaatgacacttggccttcgtacgagcagcagttgattgcttcaggtgcgaagtaccaagctttgatgtatgaaaacgtcaatcatggtttccacaacgattcaaccgcacgttacgcacccgaggaagcggctcttgcttgggaacgtaccttagctttcttcaaagaacatctcatcgccagttaa

SEQ ID NO: 41864 - protein, 309 aa, Vibrio parahaemolyticus RIMD 2210633
MRTWIMLKHTTSSEKAAHPIPQEAFDWYDEYAHGKISRREFINRLGGLAVLGFSMTALVDALTPNYALAEQVSFNDPEIKATYETFSSPNGHGEGRGYLVMPQKKTIKSPTVLVIHENRGLNPYIKDVARRLAKDGFIAFAPDALYPLGGYPGNDDEGRAMQKEMDRAKIEQDFIAAAKFIKQHEHGNGKLGAVGFCFGGYVVNMLAAVMPNELDAGVPFYGTPAAEEIQKQVKGPLMLHFAGLDKRVNDTWPSYEQQLIASGAKYQALMYENVNHGFHNDSTARYAPEEAALAWERTLAFFKEHLIAS

SEQ ID NO: 41865 - DNA, 735 bp, Streptomyces avermitilis MA-4680
  CDS (1)..(735): transl_table=11
atgcccaccaagacgttgcggattcccaccacggacggccaggccgacgccttcgccgccttccccgaccacagcgagcggtacccaggggtgctgatgtacgcggacggcttcggcatccggcccgtgctgcgggagatggccctcgaactggccgggcacggctactacgtgctcgtccccaactccttctaccggcacggcccggcaccgctggtcgagcttcccgagtacatcggagaagggatccggcccgcggtcttcgcccagctgatgcccctgatcgaggcgcacaccgccgaacgtgtcctgagcgacgccgacgcctacctcaggttcctcaccacccaacccgaggtcggcgccggaccggtcgcggtgaccggctactgcataggcggcctctacgcgatgcgcaccgccgcggcccaccccgaccaggtggcggccgtcgccgcgttccacggcccggtgggtgtcgatggggccaatctcttctccaagctcaccgcccaggtccacctcggccacgccgaaggcgacatgacgcctgaggccctcggcgagctcaaccaggccctggatgcggcaggtgtcggctacacctccgagatctaccccggcaccatccacggcttcaccatgtccgacaccgacgcctatagcgccttcgggctgaagcgccactgggatcgcctgctcccccttctggaccgcaccctggccaacagctga

SEQ ID NO: 41866 - protein, 244 aa, Streptomyces avermitilis MA-4680
MPTKTLRIPTTDGQADAFAAFPDHSERYPGVLMYADGFGIRPVLREMALELAGHGYYVLVPNSFYRHGPAPLVELPEYIGEGIRPAVFAQLMPLIEAHTAERVLSDADAYLRFLTTQPEVGAGPVAVTGYCIGGLYAMRTAAAHPDQVAAVAAFHGPVGVDGANLFSKLTAQVHLGHAEGDMTPEALGELNQALDAAGVGYTSEIYPGTIHGFTMSDTDAYSAFGLKRHWDRLLPLLDRTLANS

SEQ ID NO: 41867 - DNA, 891 bp, Rhodopirellula baltica SH 1
  CDS (1)..(891): transl_table=11
atgaaacgcaaaaccgcagaccaatttgaacaacgtgttctcgatctgtacgacgactttgctcatgggcgattggatcgacgaggttacttgaagggactcgccgcatttgccgttggaggagtcacggtcgaggcgctcgaagaaagtctttcacctaactacgcatgggccgagcaagtctccgcgacggatccgcgaatcaagacggagacggtcacgtatgattcgcctgaaggcggtggtcagatcagtggtttgcttgctcgaccggcgaccggtgaaaagtttcccagtgttgtggtgattcatgagaaccgtggtttgaatccatacatcgccgacgttgcaagacgattggccgtggagggttttctcgcgttggcaccggatgctttgtcaccgttgggcggttaccccggcaatgacgatgatggtcgcgcgatgcagaggcgtcgtgaccgtggcgagatgacggaagacttcgtcgccgctgtcaaatggatcgacacgcatgagctttcgacggggaaggtcggtgcggtcggtttttgctttggtgggggcatggtcaaccaactcgcggttcgactgcccaacgttcttgacgctggagtgccgttctatggcagccaaccagatgcggaagacgtcgtcaaaatcaagactcctttgtcgatacaaaatgcggagctcgaccttcgaatcatggctggcgcggaagctttcaacgaagcgttgaaggcgaacgaagtgctttgtgagtcacacgtttatccgggagtcaatcatggtttccacaatgacaccacacctcgctacgacgaggccgcagccgaactggcgtggaaacgaacgcttgcctggttcaatcaatatttgaaggcatag

SEQ ID NO: 41868 - protein, 296 aa, Rhodopirellula baltica SH 1
MKRKTADQFEQRVLDLYDDFAHGRLDRRGYLKGLAAFAVGGVTVEALEESLSPNYAWAEQVSATDPRIKTETVTYDSPEGGGQISGLLARPATGEKFPSVVVIHENRGLNPYIADVARRLAVEGFLALAPDALSPLGGYPGNDDDGRAMQRRRDRGEMTEDFVAAVKWIDTHELSTGKVGAVGFCFGGGMVNQLAVRLPNVLDAGVPFYGSQPDAEDVVKIKTPLSIQNAELDLRIMAGAEAFNEALKANEVLCESHVYPGVNHGFHNDTTPRYDEAAAELAWKRTLAWFNQYLKA

SEQ ID NO: 41869 - DNA, 690 bp, Bordetella parapertussis 12822
  CDS (1)..(690): transl_table=11
atgaccatgatcacgctcaagacccgcgatggccagaccttcgaggcctatcacgccccggcgcccacggccggcgcgccgggcctggtgctgatccaggagatcttcggcattaaccccgccatgcgcgccgccgccgaccaatgggcccggctgggcttcgacgtgctgtgccccgacctgttctggcgccaggagccgggcgtgcagctggacccgacctccgaggccgatttcggccaggccgtgcgcctgatgcaggccatggacgagaaccaggccatcgccgacctggacaccgcccgcgcctggctggccgaacgcagcggcggcaaggtcgccggcctgggctattgcctgggcggacgcctggccgtgcgcctgaccatggacacgccggtgcaatgcgcggtcagctactacggcgtgatgctggaccagctgctgcccaccgtggacgcgcaggccgcgcccacgctgctgcacgtggccgagcaggaccgcttcgtgccgcccgaggcgcgcgccgtcatcctggaggcggccggcaagctgccgcaatgcgaggcgcacgtctatgaaggctgcgaccacgcgttcgcccgccccggcggcgagcactgggacgccgcggccgccgcgctggccgaggaacgctcggtggcgttcatgcagcgccacctcgcctga

SEQ ID NO: 41870 - protein, 229 aa, Bordetella parapertussis 12822
MTMITLKTRDGQTFEAYHAPAPTAGAPGLVLIQEIFGINPAMRAAADQWARLGFDVLCPDLFWRQEPGVQLDPTSEADFGQAVRLMQAMDENQAIADLDTARAWLAERSGGKVAGLGYCLGGRLAVRLTMDTPVQCAVSYYGVMLDQLLPTVDAQAAPTLLHVAEQDRFVPPEARAVILEAAGKLPQCEAHVYEGCDHAFARPGGEHWDAAAAALAEERSVAFMQRHLA

SEQ ID NO: 41871 - DNA, 747 bp, Bordetella bronchiseptica RB50
  CDS (1)..(747): transl_table=11
gtgacgcccgccgcgcgggcgttgcctgttccaccgcaacgcaaaggactatccgacatgaccatgatcacgctcaagacccgcgatggccagaccttcgaggcctatcacgccccggcgcccacggccggcgcgccgggcctggtgctgatccaggagatcttcggcattaaccccgccatgcgcgccgccgccgaccaatgggcccggctgggcttcgacgtgctgtgccccgacctgttctggcgccaggagccgggcgtgcagctggacccgacctccgaggccgatttcggccaggccgtgcgcctgatgcaggccatggacgagaaccaggccatcgccgacctggacaccgcccgcgcctggctggccgaacgcagcggcggcaaggtcgccggcctgggctattgcctgggcggacgcctggccgtgcgcctggccatggacacgccggtgcaatgcgcggtcagctactacggcgtgatgctggaccagctgctgcccaccgtggacgcgcaggccgcgcccacgctgctgcacgtggccgagcaggaccgcttcgtgccgcccgaggcgcgcgccgtcatcctggaggcggccggcaagctgccgcaatgcgaggcgcacgtctatgaaggctgcgaccacgcgttcgcccgccccggcggcgagcactgggacgccgcggccgccgcgctggccgaggaacgctcggtggcgttcatgcagcgccacctcgcctga

SEQ ID NO: 41872 - protein, 248 aa, Bordetella bronchiseptica RB50
MTPAARALPVPPQRKGLSDMTMITLKTRDGQTFEAYHAPAPTAGAPGLVLIQEIFGINPAMRAAADQWARLGFDVLCPDLFWRQEPGVQLDPTSEADFGQAVRLMQAMDENQAIADLDTARAWLAERSGGKVAGLGYCLGGRLAVRLAMDTPVQCAVSYYGVMLDQLLPTVDAQAAPTLLHVAEQDRFVPPEARAVILEAAGKLPQCEAHVYEGCDHAFARPGGEHWDAAAAALAEERSVAFMQRHLA

SEQ ID NO: 41873 - DNA, 789 bp, Bordetella bronchiseptica RB50
  CDS (1)..(789): transl_table=11
atgagtttcgccgccgccgcgggtagtaccgcacccaccacgatccataccgacacccagggcctgtcgcacggcgatttcgaactggcggtgccgggcggtccggtggccgcctattacgccgcgccggccgggcgcgagcaattgcccatcgtgctggtggtgcaggagattttcggcctgcacgagcacatcaaggatgtctgccgccgcctggcgcacgatggctatctggcggtctcggtcaacctgtaccagcgccagggcgacgcctcgcgctacgacaacattcccaggctggtcgccgaactggtgagcaaggtgccggacgagcaggtccatgccgacctggacgccagcctggcctgggctgccgcccatggcggcgatgccgcgcgggtgggggtgacgggcttttgctggggcggacgcaccacctggatgtatgcggcccgcaatcccgccgtgaaggcgggcgtggcctggtacggccgcctgtcctcaggccatggccccttgatcaagcaagtgccgctggacgtggccgggagcctgcatgcgccggtgctggggctgtatggcggcaaggacgaaagcattccgctggacgatgtgcgggccatggaagcacgcctgcagcagggcggcgcgcccgcccaggcatcgcgcatcgtggtgtatccgcaggccgggcatgccttcctggccgattaccgccccagttaccgcgccgccgatgcgcaggacggctggcggcgcatgctggattggttcgcgctgtacctgtag

SEQ ID NO: 41874 - protein, 262 aa, Bordetella bronchiseptica RB50
MSFAAAAGSTAPTTIHTDTQGLSHGDFELAVPGGPVAAYYAAPAGREQLPIVLVVQEIFGLHEHIKDVCRRLAHDGYLAVSVNLYQRQGDASRYDNIPRLVAELVSKVPDEQVHADLDASLAWAAAHGGDAARVGVTGFCWGGRTTWMYAARNPAVKAGVAWYGRLSSGHGPLIKQVPLDVAGSLHAPVLGLYGGKDESIPLDDVRAMEARLQQGGAPAQASRIVVYPQAGHAFLADYRPSYRAADAQDGWRRMLDWFALYL

SEQ ID NO: 41875 - DNA, 846 bp, Chromobacterium violaceum ATCC 12472
  CDS (1)..(846): transl_table=11
atgagcgacagcaacgcatcccttccccgccgcgctttcctggccggagcaggcagcctgggcttcgcccttgcggtccagcccatcgccgccagcaccatcgtcaccgacaaccggcaactgcaaaccggccagccggacatcgacaccggccatggaacgatgccgggctactacgcccgtcccgcccagggcgatggcccctggccgctggtgatcgtgatccaggaaatcttcggcgtgcacgaacacatccaggacctgtgccgccgcctggcgaagcagggctacctggcggtggcgccggaactgtatttccgccacggcaagccggcgcaagcgccggacatagacagcctgctgcgggatatcgtctccaaggtgccggacagcgaggtgctgagcgatctggacgcgacctggcgctgggccggcgcgcacggcgccgatctggaccgcgccgccgtcaccggcttctgctggggcggacgccaggcctggctctacgccgcgcacaatccacggctgaaggccgccgccgcctggtatggcaagctggaaggcgcggcgaacgccaatatgccgcgccagccgctggacatcgccggcgagttgaaggtgccggtgctggggttgtatggcgggcaggaccagagcatcccgctcgccggggtggataaaatgaaggccgcgctgagcgccgccggcaagggaagcgaaatcgtcgtctatccggacgctggccacggcttcaacgccgactaccgtcccagctatcatccgcgcgacgccggcgacgcctggcgcaggatgctggactggttcgcccgccacggcgcgcgctga

SEQ ID NO: 41876 - protein, 281 aa, Chromobacterium violaceum ATCC 12472
MSDSNASLPRRAFLAGAGSLGFALAVQPIAASTIVTDNRQLQTGQPDIDTGHGTMPGYYARPAQGDGPWPLVIVIQEIFGVHEHIQDLCRRLAKQGYLAVAPELYFRHGKPAQAPDIDSLLRDIVSKVPDSEVLSDLDATWRWAGAHGADLDRAAVTGFCWGGRQAWLYAAHNPRLKAAAAWYGKLEGAANANMPRQPLDIAGELKVPVLGLYGGQDQSIPLAGVDKMKAALSAAGKGSEIVVYPDAGHGFNADYRPSYHPRDAGDAWRRMLDWFARHGAR

SEQ ID NO: 41877 - DNA, 810 bp, Gloeobacter violaceus PCC 7421
  CDS (1)..(810): transl_table=11
gtgtgtgggagttcgtgggtggccaggctggtaaaacggcggcgatttatcgtgcaggtgttgacagcaggcagcgcactggtgtgggggggggctgctcatctgtcgtcggcttcaagccccagcactattcgcatttccggcgaaggggtgatcatcgaagcctatcgggctttaccggtggggcggccctgggccgctgtgttgctggtgcccgaggaggccggattgaacgcctttatcgccggggtggccgcggaactggccaccctgggtttcgcggtgctcgtgccggatctttattcgcggctgggaggcacggccgccctcggtcctaatccggccgcagcgctcgaaaaactcaacgacagcctgattgcccgcgacctcgacttgagctttgcgtacctagaaaagttgctcggtccgcagggcaagatcgccattctcggtttcggctgggggggcagcaaggccctcacctacgccaccgagaaccccgacatcgcggcggtggcggtcttctatgctcccaaccccgaaccggtgggccgcgtgctcaacctggaaatgccgttgctgggaaactacgcagccctcgacgaggcggtcacccccaagttggccgagttggaggcagccctcaccaaagcgggcaaaacttacgacttcaagatctacccgggtgtgcgcgccggtttttttggcgcggcgctcgccggaccacctggagcggcggcctcccgcgacgcctgggagcggacggtgcagtttttcaggcgcaccctcgccgcccaagaacaaccataa

SEQ ID NO: 41878 - protein, 269 aa, Gloeobacter violaceus PCC 7421
MCGSSWVARLVKRRRFIVQVLTAGSALVWGGAAHLSSASSPSTIRISGEGVIIEAYRALPVGRPWAAVLLVPEEAGLNAFIAGVAAELATLGFAVLVPDLYSRLGGTAALGPNPAAALEKLNDSLIARDLDLSFAYLEKLLGPQGKIAILGFGWGGSKALTYATENPDIAAVAVFYAPNPEPVGRVLNLEMPLLGNYAALDEAVTPKLAELEAALTKAGKTYDFKIYPGVRAGFFGAALAGPPGAAASRDAWERTVQFFRRTLAAQEQP

SEQ ID NO: 41879 - DNA, 879 bp, Gloeobacter violaceus PCC 7421
  CDS (1)..(879): transl_table=11
atggattcggatttgctcagtttgctgccccgggtggaggcgatcgaccgccgcacgttcatcgtgaccaccctggcggcaggttttgccctggcggtcttgccggtgggagcggcgaccatcaacaccgacaccaccggactgaccgccggggaagtgaaaatcccggtcaaagacggcgagattcccgcctaccgggcgatgcccgccaccggcaacaacctgccggtggtcctagtcgtgcaggaaatttttggcgtccacgagcacatcaaagatgtctgccgccgcttcgccaaactcggctacttcgccatcgccccggaactgtacgcccgccagggggacgtctccaagatccaggaagtccagaaagtcatcgaagtggtgaacaaagtgcccgacgcccaggtgctctccgacctcgacgccgccgtcgcctatgccgccgggaccgggcgggtgaacgccgagaaattggcggtcaccggtttttgctggggcgggcgaatcacctggctgtacgcggcccacaacccaaaaatcaaagcgggaggagcctggtacggccgtctggtgggccaatctagtcccaatactccgacctacccggtcgatgtcgcccccaagatcaaaggggcggtcctaggcctttacggcggccaggatcagggcatccccgtctccaccgtcgagcagatgcgcaaggtactcaaagcatcgggcaatccttcggagatcatcatctacgaacaggccccccacggcttccacgccgactaccgcccaagctaccgcccggaggcggcccaggacgcctggcagaaactgctcgcctggttcaaaaagcatggggttgcgcagcaggtgtcggggtaa

SEQ ID NO: 41880 - protein, 292 aa, Gloeobacter violaceus PCC 7421
MDSDLLSLLPRVEAIDRRTFIVTTLAAGFALAVLPVGAATINTDTTGLTAGEVKIPVKDGEIPAYRAMPATGNNLPVVLVVQEIFGVHEHIKDVCRRFAKLGYFAIAPELYARQGDVSKIQEVQKVIEVVNKVPDAQVLSDLDAAVAYAAGTGRVNAEKLAVTGFCWGGRITWLYAAHNPKIKAGGAWYGRLVGQSSPNTPTYPVDVAPKIKGAVLGLYGGQDQGIPVSTVEQMRKVLKASGNPSEIIIYEQAPHGFHADYRPSYRPEAAQDAWQKLLAWFKKHGVAQQVSG

SEQ ID NO: 41881 - DNA, 693 bp, Gloeobacter violaceus PCC 7421
  CDS (1)..(693): transl_table=11
atggcggagcgcatcaccatcgactcgaaggacggcagcttcggcgcctacgtggccagaccgggtgcgggcttcggccccggcctggtggtcatccaggaaatatttggcatcaacgccacgatgcgggccatcgccgacgcctttgcccgggcgggctacatcgccgtggtgccggatttgttctggcggctggagccgggagttgaactgattgaccagggcagcgatctcgaaaaagcctttggactctacaacgcctacgacgaagatctgggcgtcacggatctgattgccgccctcggtgccgtccgccaactggaaggctgcaccggcaaggtgggcacggtgggctactgcctgggaggcaaactcgcgtatctgatggccacccgctccgacgccgatgccaacgtcagctactacggcgtcggtatcgaacgcaacctggaggaagtgggcaacatttcccggccactgctgttgcatatcgccggggaggacgaactggtcgccccggccgcccgggggcgcattctggatgccgtggcgcaaaatccgctcatcaccacctatctctatccaggtctgggccacgcctttgcccgcgtggacggcaccacctatcaaaaggaagccgccgagctggccaacggccgtaccctcacatttttgagcagccacctgggctag

SEQ ID NO: 41882 - protein, 230 aa, Gloeobacter violaceus PCC 7421
MAERITIDSKDGSFGAYVARPGAGFGPGLVVIQEIFGINATMRAIADAFARAGYIAVVPDLFWRLEPGVELIDQGSDLEKAFGLYNAYDEDLGVTDLIAALGAVRQLEGCTGKVGTVGYCLGGKLAYLMATRSDADANVSYYGVGIERNLEEVGNISRPLLLHIAGEDELVAPAARGRILDAVAQNPLITTYLYPGLGHAFARVDGTTYQKEAAELANGRTLTFLSSHLG

SEQ ID NO: 41883 - DNA, 948 bp, Vibrio vulnificus YJ016
  CDS (1)..(948): transl_table=11
ttgccccgtttggcttttacatttctaggagtgaacaccatggttggcaaaacatcgaattcagcaacaaagcaacacatcccacaagaagcctttgattggtatgacgagtatgcacacggcaagattgaccgccgtgagtttttaaatcgcctagccgggttggcggtgcttggctttagtgttgcgacattaaccgaggcactgctgccggattacgcaaaggcggagcaagtgtcgtttaatgaccccgatatcaaagccagttatcaaacgttcccctcaccaaaaggccatggcgaaggcaaaggctatttagtggtgccaacgcaactgaccacgccgctaccagtggtgctcgtggtgcatgaaaatcgtggcctcaacccctacatccaagatgtcgcacgccgtttagccaagcagggttttgtcgcttttgcaccggatgcattagcgcctgtcggcggttatccgggtaatgacgaccaaggccgagagctgcaaaagaaccttgatagagcgaaaatagagcaagatttcattgccgcggcgcaatacctcaaaacgcatactctgagcaatggcaagctaggagcggttggtttttgttttggcggctatgtggtgaacatgttggcggccgttatgggtgagcagttaaatgctggggcaccgttttatggcacaccagcagaaaaatcgttacgagccgacatcaaagcgccccttcaactccatttcgccgaactcgaccaacgagtaaatgccacttggcctgattatgagcaagatctaaaagccatgaatgctcgctacaacgccttcatctatccgaaggtcaatcatggctttcataacgactcgaccgcgcgttatgcgccagaagaggcagagttggcgtggcaaagaaccgtggaatttttccgtcgcgagctcaaatcctaa

SEQ ID NO: 41884 - protein, 315 aa, Vibrio vulnificus YJ016
MPRLAFTFLGVNTMVGKTSNSATKQHIPQEAFDWYDEYAHGKIDRREFLNRLAGLAVLGFSVATLTEALLPDYAKAEQVSFNDPDIKASYQTFPSPKGHGEGKGYLVVPTQLTTPLPVVLVVHENRGLNPYIQDVARRLAKQGFVAFAPDALAPVGGYPGNDDQGRELQKNLDRAKIEQDFIAAAQYLKTHTLSNGKLGAVGFCFGGYVVNMLAAVMGEQLNAGAPFYGTPAEKSLRADIKAPLQLHFAELDQRVNATWPDYEQDLKAMNARYNAFIYPKVNHGFHNDSTARYAPEEAELAWQRTVEFFRRELKS

SEQ ID NO: 41885 - DNA, 675 bp, Rhodopseudomonas palustris CGA009
  CDS (1)..(675): transl_table=11
atgggcacgctgatcactttcaaacgtccggatggcaaggaagcgagcggctatctcgccaacgccgccagcggcagggcgccgggcgtagtggtgatccaggaatggtgggggctgtccgagcagatcaagggattgaccgaccgcctcgcgctggccggcttcgatgcgctggcgcccgacctctacaacggcacggtggtgccgtatcacgacacggacgccgccaataaagagatgagctcgctcgacttcatggacgccaccacccagacggtgcgcggcgcagtgaactatctgtcgcgcaacggcgccaaggttggtctcaccggcttctgcctcggcggggcggtgacggtgatcggcgcgtgcaagattccggaactgagcgctgcggtggtgttttacggcattccgccggagcaggccgccaagccagccgacgtacaggtgccgatgcagggccatttcgccaatcgcgacgattggtgcaccccgcaggtggtggatgcgttcgaggccggattgaaggccgccggcaagcaggccgagttcttccgctatgaggccgaccacgctttcgtcaacgagcagcgcgcggcggtgcatgaccgcgaggcggcggaactcgcgtggagtcgatcgatgcagttctttggaaagcatctctcctga

SEQ ID NO: 41886 - protein, 224 aa, Rhodopseudomonas palustris CGA009
MGTLITFKRPDGKEASGYLANAASGRAPGVVVIQEWWGLSEQIKGLTDRLALAGFDALAPDLYNGTVVPYHDTDAANKEMSSLDFMDATTQTVRGAVNYLSRNGAKVGLTGFCLGGAVTVIGACKIPELSAAVVFYGIPPEQAAKPADVQVPMQGHFANRDDWCTPQVVDAFEAGLKAAGKQAEFFRYEADHAFVNEQRAAVHDREAAELAWSRSMQFFGKHLS

SEQ ID NO: 41887 - DNA, 672 bp, Rhodopseudomonas palustris CGA009
  CDS (1)..(672): transl_table=11
gtgggacgcgacattacgctgaaggctgccgacggtttcgaactcgggggttatcgggccgatcccgccggcacgccgaaagccgcgatcgtggtgatccaggagatcttcggcgtcaatcatcacatccgcaacgtctgcgatcgcctcgcagcggaaggctatgtggcgctcgcgccatcggtcttcgatcgcagcgagcgcaacttccagagcggctattcgccggaggagatcgcggtggcgcgcaagttcgtcgccaatccggactggccggcgatgctgcgcgacacccaggcggcgatcgacgcggtgcaggccgtgggcccggtcggcatcatcggcttttgtcttggcggcagcgtcgcctatgcggcggccaccaagctgcacgggctaaaggccgcggtcggctattacggcggcgccatcgtgcgcttcgcagacgacaggccattggtgccgacgcaattgcatttcggcgaaaaggattctggcattccgctcagcgacgtcgacgcggtccgggccaagcggccggaggtcgagatcctggtctatccgggcgcccagcacggctttggctgcgacgagcgggcgagctacgacaagccgagctcagacctcgcgtggcaacgcagcctggcgttcttcgccgcgcatctgaagtaa

SEQ ID NO: 41888 - protein, 223 aa, Rhodopseudomonas palustris CGA009
MGRDITLKAADGFELGGYRADPAGTPKAAIVVIQEIFGVNHHIRNVCDRLAAEGYVALAPSVFDRSERNFQSGYSPEEIAVARKFVANPDWPAMLRDTQAAIDAVQAVGPVGIIGFCLGGSVAYAAATKLHGLKAAVGYYGGAIVRFADDRPLVPTQLHFGEKDSGIPLSDVDAVRAKRPEVEILVYPGAQHGFGCDERASYDKPSSDLAWQRSLAFFAAHLK

SEQ ID NO: 41889 - DNA, 702 bp, Mycobacterium avium subsp. paratuberculosis K-10
  CDS (1)..(702): transl_table=11
atgaccacgattcagatcgatacccccgacggaccgatcgatgcgctgctgagcactccggccggacagggcccttggccgggtgtagtggtgatccacgacgcgttcggctacggccgggacaagcagtcgatcaacgaccgcatcgcccgggccggctacctggcgctcaccccgaacatgtacgcgcgcggcggcctggtccgctgcatcacgcgggtcatgaaggagctggcggcccagcggggtcgcgcgctcgacgacatcctggctgcccgcgaccacctgcaggccatgccggaatgcacgggccgcgtcgggatcgcagggttctgcatgggcgggcgcttcgctcttgtcatgtcgcccaagggtttcagcgcgtccgcgccgttctacggcactcccctgcccggcaacctggacgaggtgctcgagggcgcatgcccggtggtagcgagtttcggcggccgcgatctcaccggcaagggcgcgccggaaaagctgcgaaaagtgaccgcggacaagaacatcaccgccgatatcaaggtctatccggtggccgggcacagcttcgccaacgagctgccggcccagccgctgctgcggatcgccggtttcggctacaacgaggaggccaccgaggacgcctggcgccgcgttttctccttcttcggcgagcatctggccgccacgccgtag

SEQ ID NO: 41890 - protein, 233 aa, Mycobacterium avium subsp. paratuberculosis K-10
MTTIQIDTPDGPIDALLSTPAGQGPWPGVVVIHDAFGYGRDKQSINDRIARAGYLALTPNMYARGGLVRCITRVMKELAAQRGRALDDILAARDHLQAMPECTGRVGIAGFCMGGRFALVMSPKGFSASAPFYGTPLPGNLDEVLEGACPVVASFGGRDLTGKGAPEKLRKVTADKNITADIKVYPVAGHSFANELPAQPLLRIAGFGYNEEATEDAWRRVFSFFGEHLAATP

SEQ ID NO: 41891 - DNA, 828 bp, Erwinia carotovora subsp. atroseptica SCRI1043
  CDS (1)..(828): transl_table=11
atgaagactgatgaacagacgaccttcaaacatcttccccaaaggttatccccagcagtggaaccgcagagcttctccatcattacgacggattctgtcggtattattgccagtgaaaccactattccttctcagggggagcaactacccgcgtatatcgccagaccggcgaaccatgacgggccgctcccaattgtcctggtggtgcaggagattttcggcgttcatcaacacattcaggatgtctgccgcaggctcgccaagcagggctacatggccattgcgccagagttgtattttcgtcagggtgaccccagccaatataacgacattcagcaaatcctgaccgagctggtgcataaggttcctgatacgcaggtgctgtccgacctcgatcacaccgccaactgggcgattaaacagggcggcgatgccagtaagctggcgataacggggttttgttggggcggtcgcatcacctggctctacgccgcgcacaatccgcagctcaaagcggccgttgcctggtacggcaaatttacgggtgagaaaacgctgaatagccccaaaaatccggtcgatatcgcaacagaattggaagcgcccgtgctggggttatacggagcgaaagacgggagtattccgctggaacacgtggatatcatgcggcaggcgctgcgtgccgccaacgcgacggcagaaattattgtctaccccgatgccgggcatgctttccatgccgattatcgccctagctaccatgaagaatccgcacgtgacggctggcagcgtatgctggcgtggttccagaaaaacggcgtggcgtaa

SEQ ID NO: 41892 - protein, 275 aa, Erwinia carotovora subsp. atroseptica SCRI1043
MKTDEQTTFKHLPQRLSPAVEPQSFSIITTDSVGIIASETTIPSQGEQLPAYIARPANHDGPLPIVLVVQEIFGVHQHIQDVCRRLAKQGYMAIAPELYFRQGDPSQYNDIQQILTELVHKVPDTQVLSDLDHTANWAIKQGGDASKLAITGFCWGGRITWLYAAHNPQLKAAVAWYGKFTGEKTLNSPKNPVDIATELEAPVLGLYGAKDGSIPLEHVDIMRQALRAANATAEIIVYPDAGHAFHADYRPSYHEESARDGWQRMLAWFQKNGVA

SEQ ID NO: 41893 - DNA, 771 bp, Burkholderia mallei ATCC 23344
  CDS (1)..(771): transl_table=11
gtgtccgcgcagacgatcaccaccgatgccgccggcctagacgtcgacaccgtccagatccgctcgggcgacgcgagcgtgcccgcctatcgcgcgcagccggacggcaagagcaatctgccggtgatcgtcgtgatccacgaggtgttcggcgtgcatgcgcacatcgccgacatctgccggcgcttcgcgaagctcggctatctggcgatcgcgccggatctgtatgcgcggcagggcgatccgtcgaagcatgcgtcgatccaggaactgatcgatcaggtggtcagcaaggtgcccgaccgtcaggtgatcgaggatctcgacgcgacggtgcgatgggcggggaagaacggcggggacctgtcgcggctcggcgtgacgggtttttgttggggcggccggcagacgtggcttttcgccgagcacaatccgcacgtgcgcgccgctgtcgcgtggtacggcaaggtggccggcgagacgaacgagatgacgccgttcaatcctgacgatcatgcggcgcaactgaaggcgccgacgctcggcctctacggcggcaaggacgacagcatttcgcagcgctcgctcgcgcggatgcgcgagcgtctcgcggcggccggcacgcaggccgcgcgcgaatcggaaatcgtcgtgtatccggatgcgggccacgcgttcttcgccgattaccgcccgagttacgtgaaggccgatgccgacgacggctggaagcgcgctatcgcatggtttcggcatcacggcgtgatgtga

SEQ ID NO: 41894 - protein, 256 aa, Burkholderia mallei ATCC 23344
MSAQTITTDAAGLDVDTVQIRSGDASVPAYRAQPDGKSNLPVIVVIHEVFGVHAHIADICRRFAKLGYLAIAPDLYARQGDPSKHASIQELIDQVVSKVPDRQVIEDLDATVRWAGKNGGDLSRLGVTGFCWGGRQTWLFAEHNPHVRAAVAWYGKVAGETNEMTPFNPDDHAAQLKAPTLGLYGGKDDSISQRSLARMRERLAAAGTQAARESEIVVYPDAGHAFFADYRPSYVKADADDGWKRAIAWFRHHGVM

SEQ ID NO: 41895 - DNA, 888 bp, Pseudomonas syringae pv. syringae B728a
  CDS (1)..(888): transl_table=11
atggaacgtctcactgcaaaagactttgctcctgaactgcttgagctctatgactactacgcgcacggcaggatcaatcggcgcgagtttctcgaccgagcagcgctgttcacttttggcggcatgaccgccagcgcgctgcttgcctcgctgagccccaactacgcgctggccgaacaagtggaattcaccgacccggacattattgccgagtatgtttcctacccttcgcccaacgggcacggtcaggttcgcggctatctggtacgcccggccaaagctaccgggaaagtaccggcagtggttgtcgcacatgagaatcgcggcttgaacccgtacatcgaagacgtggcgcgccgcgttgccaaagccggtttcattgcgctggcacctgacgggctgtcatcggtcggcggctatccaggcaacgatgacaagggccgtgagctgcagcagacagtcaacccggaaaagctcatgaacgacttctttgccgccatcgagtggctgatgaagcatgacgccaccaccggcaaggtcggcatcaccggtttctgctacggcggcggtgtggccaatgctgctgcggtcgcgtatccggaactgggtgctgcggtgtcgttctatgggcgtcagcccaacgccgaagacgtggtgaagatcaaggcgccggtgatgattcactacggcgaactggatacccgcatcaacgaaggctggccagcctatgaaaaagccttgaaagcggcgggcaagacgtacgaaacgtacatttatccgggcgccaatcatggtttccacaacgattccaccccacgctacgacgaagcagcggccaaactggcctgggatcgtacattggggtggttcaacaagtacctggtttaa

SEQ ID NO: 41896 - protein, 295 aa, Pseudomonas syringae pv. syringae B728a
MERLTAKDFAPELLELYDYYAHGRINRREFLDRAALFTFGGMTASALLASLSPNYALAEQVEFTDPDIIAEYVSYPSPNGHGQVRGYLVRPAKATGKVPAVVVAHENRGLNPYIEDVARRVAKAGFIALAPDGLSSVGGYPGNDDKGRELQQTVNPEKLMNDFFAAIEWLMKHDATTGKVGITGFCYGGGVANAAAVAYPELGAAVSFYGRQPNAEDVVKIKAPVMIHYGELDTRINEGWPAYEKALKAAGKTYETYIYPGANHGFHNDSTPRYDEAAAKLAWDRTLGWFNKYLV

SEQ ID NO: 41897 - DNA, 876 bp, Dechloromonas aromatica RCB
  CDS (1)..(876): transl_table=11
atgaaaaccgaacccgagttcgacagtcttgttccgccgcagacctttgatcgccgcagctttctggtgaccagtctgggggctggtttcgccctcgccactcagccggttatggcgcaaaccgcgatcaagaccgacgaagttggtttgattgccggcgaaatcaaagtcccggtcaaggatggcgagatggtcgcctaccgcgctgtgccgggtggtttgaccaagccgcctgtggtgttggtggtgtccgagatttttggtgcccacgaatacatccgcgatacctgtcgccgcctagccaagctcggctattgcgccatcggccccgacctctttgctcgccggggggatccccggcagattgccagcattcccgaaattctcgaaaagattaccagcaagacaccggacgcccaggtgttgagcgacctcgatgcctgcgtggcatgggccgctgcgaagggggcggatacgaaccgtttggcggtcaccggtttctgctggggcggtcgtatcgcctggttgtacagtgcccacaacccgagcgtcaaagcgggcgtggcctggtacggaaaactggttggtcccgccaacgagatcacacccaaacacccgaccgatttggtggggcagctcaaggccccggtgcttggtctctatggcggtctggacgccggcattccgctggaaaccgtcgaagccatggaaaaggccttgcagcaaggtagttcagcggccaaggcgtcggaaatccacgtttacgacaatgcgccgcatgccttccatgctgactaccgccccagttaccgcaaggaggaggccgaggatggctggaaacgcatgctggcctggttccgcaaaaacggtgtctga

SEQ ID NO: 41898 - protein, 291 aa, Dechloromonas aromatica RCB
MKTEPEFDSLVPPQTFDRRSFLVTSLGAGFALATQPVMAQTAIKTDEVGLIAGEIKVPVKDGEMVAYRAVPGGLTKPPVVLVVSEIFGAHEYIRDTCRRLAKLGYCAIGPDLFARRGDPRQIASIPEILEKITSKTPDAQVLSDLDACVAWAAAKGADTNRLAVTGFCWGGRIAWLYSAHNPSVKAGVAWYGKLVGPANEITPKHPTDLVGQLKAPVLGLYGGLDAGIPLETVEAMEKALQQGSSAAKASEIHVYDNAPHAFHADYRPSYRKEEAEDGWKRMLAWFRKNGV

SEQ ID NO: 41899 - DNA, 687 bp, Dechloromonas aromatica RCB
  CDS (1)..(687): transl_table=11
atggaacagcagatcggcactgagggccggatgatcgaattcaagcgtcccgatggctcggcttgccaggggtattacgccgaggccgggcaggataggccgggcatcgtggtcatccaggaatggtgggggctgaacccgcaaattcgcagcgtggccgaccgtcttgccgccgtcggcttcaatgcgctggcgcccgatctttaccatggccgggtggcgcaggatgtggatgaggccagccacatgatgaacggactggattttcctggcgccacttttcaggatatccgcggtgccgtggggcatctgctggcaagcggcaagggtaaggtggccgtcatgggcttctgcatgggcggcgcgctgaccgtggccagcgccgtgcatttgcccgaggtggctgcggcggtctgctattacggcataccgcccagggatttcgccgacccggccgcgatccggattcccttcctcggccatttcgccacccgcgacacctggtgtacgcctgatgtcgtggcccaactcgaaagcgccatgctggcagccggacagaagccggtgctctatcgctacgaggccgagcatgccttcttcaacaagctgcggccgacggtctatgatccacaggcggccgagttgtcgtgggagcgtacgctcactttcctgaaccagcacctgtaa

SEQ ID NO: 41900 - protein, 228 aa, Dechloromonas aromatica RCB
MEQQIGTEGRMIEFKRPDGSACQGYYAEAGQDRPGIVVIQEWWGLNPQIRSVADRLAAVGFNALAPDLYHGRVAQDVDEASHMMNGLDFPGATFQDIRGAVGHLLASGKGKVAVMGFCMGGALTVASAVHLPEVAAAVCYYGIPPRDFADPAAIRIPFLGHFATRDTWCTPDVVAQLESAMLAAGQKPVLYRYEAEHAFFNKLRPTVYDPQAAELSWERTLTFLNQHL

SEQ ID NO: 41901 - DNA, 705 bp, Ralstonia eutropha JMP134
  CDS (1)..(705): transl_table=11
atgcgacacatcggtcaaaccgtctcattcacccgccccgacggccagtcggtcaacggttaccttgccaagtcggatggcaccgacggtgcgccggccatcatcgtggtccaggagtggtgggggctgaacaaccagatccgcggcgtggctgaccgccttgcgcgcgccggctacaccgcgctggtgcccgacctctaccgcggcgccagcacggtcgagcagcaagaggcccaccatctgatgtccaagctgaacttcggcgatgccgtggcgcaggacatccgcggcgccgtgcaatatctcggcaccctgagcggcagcatcggcatcaccggcttctgcatgggcggcgcactgacgctgctgtcgctgaacgccatccccgagttgaaggcaggcgtgccgttctacggcatgccgccactggaggccatcgaccccgccaatatcaaggcggcggtgctggtccactcggcaacgcaggacgtgttcttcgcggccgagggcttcgacaagcttgaggagaagctgcgcgccggcggcgtcgatgcgacgttccaccgctacctcgcgcaccatgcctttgccaacgaggacgccatcggcgacggccgcatcgccggcacccagtacgacgccgcctgggcgcaggtggcctgggaccgcacgctgacgttcttcgcgcgtcacctctggcgctga

SEQ ID NO: 41902 - protein, 234 aa, Ralstonia eutropha JMP134
MRHIGQTVSFTRPDGQSVNGYLAKSDGTDGAPAIIVVQEWWGLNNQIRGVADRLARAGYTALVPDLYRGASTVEQQEAHHLMSKLNFGDAVAQDIRGAVQYLGTLSGSIGITGFCMGGALTLLSLNAIPELKAGVPFYGMPPLEAIDPANIKAAVLVHSATQDVFFAAEGFDKLEEKLRAGGVDATFHRYLAHHAFANEDAIGDGRIAGTQYDAAWAQVAWDRTLTFFARHLWR

SEQ ID NO: 41903 - DNA, 876 bp, Ralstonia eutropha JMP134
  CDS (1)..(876): transl_table=11
atgctgaaacccgaagtggaaagcctggtatccgggcagactttcaatcggcgcggtttcgtcaagacagcactgggctccgcgttcgccgcggctgcgctgccggcgatggcgcaggcgatcaagaccgacttcgcgggcctgaccgccggcgaagtgacgattccttcgggcggcttcagcatgccggcctaccgcgcgcagcccgagggcaagacgaagttgccggtggtgctggtggtcagcgagatcttcggcgtgcacgagcacatcgccgatgtttgccgccgctttgccaagcttggctacctggccattgcgccggagctgtttgcgcggcagggtgatccgcagagcttcggcaccatccaggaactgcagaccaacgtcatcgccaaggtgccggacgggcaggtcatgggtgatctcgacgcggccgtggcctgggccggcgccaatggtggcgacctgtcgaagctggcgatcacggggttctgctggggcgggcgcatcacgtggctgtatgccgcgcacaatgagcggctgaaggccggcgtggcctggtacgggcagctcgccggcacgcctacgccgctgaagccgaagaacccgctggacctggttgaccagttggacgcgccggtgctcggcctctatggcggcaaggacacgggcatcacgcaagagcaggtcgagaagatgaaggcggcgctgtcggcgtccccggatccggacgcaaaggcatcgaagttcgtcgtctatcccgaatccggccacgctttccacgccgattaccggccgagctatcgcgaggcggacgccaaggacggctggaagaagtgcctcgactggctgcgccagcacggcgtcgtctaa

SEQ ID NO: 41904 - protein, 291 aa, Ralstonia eutropha JMP134
MLKPEVESLVSGQTFNRRGFVKTALGSAFAAAALPAMAQAIKTDFAGLTAGEVTIPSGGFSMPAYRAQPEGKTKLPVVLVVSEIFGVHEHIADVCRRFAKLGYLAIAPELFARQGDPQSFGTIQELQTNVIAKVPDGQVMGDLDAAVAWAGANGGDLSKLAITGFCWGGRITWLYAAHNERLKAGVAWYGQLAGTPTPLKPKNPLDLVDQLDAPVLGLYGGKDTGITQEQVEKMKAALSASPDPDAKASKFVVYPESGHAFHADYRPSYREADAKDGWKKCLDWLRQHGVV

SEQ ID NO: 41905 - DNA, 1302 bp, Ralstonia eutropha JMP134
  CDS (1)..(1302): transl_table=11
atgcaggcagcagcggaagcgctcgctgcggcagtccccacagaacctatggaacttaaaggagcgacaggcatgggccagactatccagatccagacccaggacggcagtttcagcggttatctcgccatcccggcggcaggcaagggccccggcatcgtgttatgccaggagatcttcggggtcaatgccacgatgcggcaagtagcggactactacgccgaggaaggctacacggtgctggtgccggacttgttctggcgtattgcgcccggaatcgagctgacggaccgaggcgaggacttccagcgggcgctagggctatatcagcagttcgacgaggacaagggcgtgcaggatgtgggcgccgcgctcgatgcactgcgcgcacggccagaatgcgtcggccagaccggtgtgcttggcttctgcctgggtggcaagctggcctacctggcggcgtgccggttgcccggcgtggcttgtgccgtcggctactatggcgtcggcatcgaacgggcgctggacgaggcggacaatatccgaggacggctcgtgctgcatattgccgaacgagatggcttttgctcacccgaagcgcaggcgcagattcgtgaagcgctgggcggccggcccagcatcgaactgtacgtctatcctggcatggaccacgccttcgcgcgcgttggcggcgagcacttcgacaaggcgtcggcactgatggcgcaccagcgctccatcgcggcgtaccgcagcgagatgggcccgcactacgacttctccgcgctatgggacaagcactgcgagcacgaattcgccacgcgcgatgtggatgccaccatggcaacgatggtgcccgagccctacgtcaaccacatcccgacgatgaccggaggcgtgggctaccgccagctcaagcgcttctaccagcaccacttcgtccacagcaatccgcctgacaccacgctgatcccgctgtcgcgcacgatcggcgcgagccaggtggtcgacgagatgctgttctgcttcacccatacttgcgagatcgactggatgctgcccggcgtgccgccgaccggcaagcgcgtggagatcccgctgatcgcgattgtcaagttccgcggggacaagctctaccacgagcacatctactgggatcaggccagcgtgctcgtgcagatcggcaagctcgaccccaagggtttgccggtggcaggcgtggagaccgcgcgcaagctgctggaagaaacacagccgtctaacacgctgatggcgcggtggagcgagagcgagcgccagtga

SEQ ID NO: 41906 - protein, 433 aa, Ralstonia eutropha JMP134
MQAAAEALAAAVPTEPMELKGATGMGQTIQIQTQDGSFSGYLAIPAAGKGPGIVLCQEIFGVNATMRQVADYYAEEGYTVLVPDLFWRIAPGIELTDRGEDFQRALGLYQQFDEDKGVQDVGAALDALRARPECVGQTGVLGFCLGGKLAYLAACRLPGVACAVGYYGVGIERALDEADNIRGRLVLHIAERDGFCSPEAQAQIREALGGRPSIELYVYPGMDHAFARVGGEHFDKASALMAHQRSIAAYRSEMGPHYDFSALWDKHCEHEFATRDVDATMATMVPEPYVNHIPTMTGGVGYRQLKRFYQHHFVHSNPPDTTLIPLSRTIGASQVVDEMLFCFTHTCEIDWMLPGVPPTGKRVEIPLIAIVKFRGDKLYHEHIYWDQASVLVQIGKLDPKGLPVAGVETARKLLEETQPSNTLMARWSESERQ

SEQ ID NO: 41907 - DNA, 783 bp, Thiobacillus denitrificans ATCC 25259
  CDS (1)..(783): transl_table=11
atgaaaactgcccttgcgttgtcgctgttgatgttcacgtcttccgccctcgctgccgtgatcggcaaggacatcagctacaaggccggcgataccgtgatgaagggatttctcgcctatgacgacgcagtcgcgggcaagcgtgcgggcgtgctcgtggtgccggaatggtggggcgcgaacgactacccgagaaagcgtgcgcgcatgctcgccgaggcgggctacgtcgcactcgtcgtcgacatgtacggcgagggccaggtcaccgacaatcccaaggatgcgggcgcgctcgcgggtaacgtgaacaagaatccgcagctggcctacgcgcgcgtcgacgccgcgcgcgaatttctcgaccggcagccgcacgtcaagaaaggtgaaaccgctgccctcggctactgcttcggcggcggcgtcgtgctcaacgtcgtgcgcgcgggcatgccgctcaagtcggccgtgagctaccacggcgtgctcgcgaccgacatcgcggtgaagccgggtgacatcgaggcgaagctgcgtgtcttccatggcgaagccgatccgatcgttccgcccgagcaggtcgaggcgttcaagaccgagatggacaacgccaaggccgactacatgttcgtctcctatcccggcgtcaagcacaccttcaccaaccgcgaggccgacagctatgccgcccagttcggcctgccgctcaagtacgacaacgcggcggacaaggactcgtggatacgcacgctcgaattcctcaaggtgaccctgcactga

SEQ ID NO: 41908 - protein, 260 aa, Thiobacillus denitrificans ATCC 25259
MKTALALSLLMFTSSALAAVIGKDISYKAGDTVMKGFLAYDDAVAGKRAGVLVVPEWWGANDYPRKRARMLAEAGYVALVVDMYGEGQVTDNPKDAGALAGNVNKNPQLAYARVDAAREFLDRQPHVKKGETAALGYCFGGGVVLNVVRAGMPLKSAVSYHGVLATDIAVKPGDIEAKLRVFHGEADPIVPPEQVEAFKTEMDNAKADYMFVSYPGVKHTFTNREADSYAAQFGLPLKYDNAADKDSWIRTLEFLKVTLH

SEQ ID NO: 41909 - DNA, 756 bp, Anabaena variabilis ATCC 29413
  CDS (1)..(756): transl_table=11
atgttagtaaatcaaataggcaggagcaataaagtgcaaattgaaaaaacagaggtggaaatttctacgcctgatggacaaatgcctgcgttcttgtatcagccttgtgaacatggacaaaagccagccgtaattcttttaatggaagcatttggcttaacttctcacattcaggatgtagcagctcgaattgctaacgaaggctacgtagttctgactccagatttgtactatcgtgaattgacaaacaacaagtttggatatgaagaagttgagcaagctatggcgatgatgtaccgccttgacttcggtaaaccaattgaggaggatattagagcagcgatcgcttatctcaagttacagccttatgtattcccagaaaagattggcgtgactgggttttgcttgggtggtggtctgtcttttctcagcgcttgcaaattttcaaacgaaattgcggcggtagcttccttctacggaatggttctggatgattggatagaagcgataacaaacatctcagtacccatatacttattttacggtggtgtcgatccatttattccacttgaacgtgttcagcaaattgagactcggttccaggaacttagtaaggaatacacattgaaggtttatcctgatgctgatcatggttttttctgccatgagcgttcttcctataaccgttcagcagccgaagactcatggaatgagctgacacagttcttccacagacatttacaaaagtctgtctaa

SEQ ID NO: 41910 - protein, 251 aa, Anabaena variabilis ATCC 29413
MLVNQIGRSNKVQIEKTEVEISTPDGQMPAFLYQPCEHGQKPAVILLMEAFGLTSHIQDVAARIANEGYVVLTPDLYYRELTNNKFGYEEVEQAMAMMYRLDFGKPIEEDIRAAIAYLKLQPYVFPEKIGVTGFCLGGGLSFLSACKFSNEIAAVASFYGMVLDDWIEAITNISVPIYLFYGGVDPFIPLERVQQIETRFQELSKEYTLKVYPDADHGFFCHERSSYNRSAAEDSWNELTQFFHRHLQKSV

SEQ ID NO: 41911 - DNA, 747 bp, Anabaena variabilis ATCC 29413
  CDS (1)..(747): transl_table=11
atgactgagcaagtagttgccacagaaaccgttaacttttcgcaaaataatctacaaatagctgggtacttagcacagccacaagcaccaggttcctacccaggaattgtggttttacaggagatttttggcgttaacggtcatattcgggacgtgacagaacggattgctaaattggggtatgtggcgatcgctccggcgctgtttcaacgtcaagcaccaggctttgaaactggatacacaccccaagatattgaagttggcagaggttatgcaatgcaaaccaaagcatcagaattactcagcgatattcaagcagccatagattatctgaaaactctcccccaagtgaaacaaaatggctttggttgtattggcttctgctttgggggtcatgtagcctatcttgctgccactttaccagatatcaaagcgacggcatctttttacggtgcgggaattgctacccgtacatttggcggcggaaatcctactgtcacccgcacaccagaaatcaaaggcacactctatggcttttttggtacggaagatgccagtattcccccagagcaaatagaccaaatcgagacagagttagaaaaatacaacatttctcatcgtgtgttccgctacgatggagctgatcacggatttttctgtgaccgtcgtgccagctataatcctcaagcagcagctgctgcttgggagcaggtgcaacaactatttaagactgtgttaacaacatag

SEQ ID NO: 41912 - protein, 248 aa, Anabaena variabilis ATCC 29413
MTEQVVATETVNFSQNNLQIAGYLAQPQAPGSYPGIVVLQEIFGVNGHIRDVTERIAKLGYVAIAPALFQRQAPGFETGYTPQDIEVGRGYAMQTKASELLSDIQAAIDYLKTLPQVKQNGFGCIGFCFGGHVAYLAATLPDIKATASFYGAGIATRTFGGGNPTVTRTPEIKGTLYGFFGTEDASIPPEQIDQIETELEKYNISHRVFRYDGADHGFFCDRRASYNPQAAAAAWEQVQQLFKTVLTT

SEQ ID NO: 41913 - DNA, 756 bp, Anabaena variabilis ATCC 29413
  CDS (1)..(756): transl_table=11
atgacaagtacaggaattcgcacaactcaagttaaagtcccaaacggtgatttgcaaatagatgcttatctcgctgaaccgacaaaagagggaactttccctgccgtgattgtgattcaggaaatatttggggtaaatattcatattcgggaagttgctgagaagtttgcccacgaggggtatgtagctgttgctcctgcactttatcaacgaactgctcccggtttcgaggctaaatatacccaggaagatatccaacgtggtagaggctataaagatcagactaaagcagaggaaatattgagtgatattcaaagtgcgatcgcctatttgagaactttaccaaatgtccaaaaaggggcgatcggttcaattggcttctgttttggtggtcatgttgtttacttagctgccacattaccagacattaaagtgacagcatccttctacggtggagggattatcaactctacacctggtggtggtgaacctactattacccatacctcaaagattaaagcccccatttatgccttcttcggcactgaagatcaaggcatcccgctagaacacacagaacaaattgaagccgaattaaagaaacatcaaattcctcataaaatctttcgctatgaaggcgcagggcatggctttttctgcaaccatcgcgccagctataatcccgaagctgccgccgacgcttggcaacaagtcttagaattattccaaaaaaacctccaactgcaaacagtttaa

SEQ ID NO: 41914 - protein, 251 aa, Anabaena variabilis ATCC 29413
MTSTGIRTTQVKVPNGDLQIDAYLAEPTKEGTFPAVIVIQEIFGVNIHIREVAEKFAHEGYVAVAPALYQRTAPGFEAKYTQEDIQRGRGYKDQTKAEEILSDIQSAIAYLRTLPNVQKGAIGSIGFCFGGHVVYLAATLPDIKVTASFYGGGIINSTPGGGEPTITHTSKIKAPIYAFFGTEDQGIPLEHTEQIEAELKKHQIPHKIFRYEGAGHGFFCNHRASYNPEAAADAWQQVLELFQKNLQLQTV

SEQ ID NO: 41915 - DNA, 1227 bp, Burkholderia sp. 383
  CDS (1)..(1227): transl_table=11
atgacgaagcaaatcagaatcggcagtggcgacgcagcgttcgacgcctatctcgcgctgccggaagccggcaacggcccgaccatcgtgctgctgcaggagattttcggcgtcaatgccgagatgcgtgaagtcgccgacctgtatgcggcggagggatacgtcgtgatcgcgccggacctgttccaccagttcgcgccgaacatcgagctgggttacggcgatgacgatcatgcgaaggccttcgactattaccagcgcttcgacgtggcgcgtgccatcgtcgatatacgtgcaaccgtcgattatgcccgcgcgctgcccgaatcgaccggcaaggtcggcgtgctcggcttctgcctcggcggcaagctcgcgtatctcgctgcggcgcggtgcggcgtcgactgtgcggtcggctattacggtgtaggcatcgagcagtcgctcgatctcgtggagcgcatcgcgtgcccgatagcgctgcatttcggcggcaccgatacgctcaatccacccgaaaccgtgactgcgatacgcgcggcgctcgacagcaagccgaacgtcaagctgtacgaatatgcgggcgccggccatgcgttcagccgtagcggcccgaccttcgtcaagacggccgcgatgtccgcgcacacgcgcagtctcgcggtgttccgcaaggcgctcgggcccgactacgatctcggcgcgctcgccgatcatcatttccatctggagttcgccgcgcgcgacccggaggaaacgatgcagacgatggtacccgagccctacgtgaaccacgtgccgacaatgacagggggcaccggctacacggagctcaagcgtttctacacgcatcacttcatccacaacaacccggccgacatggcgatggtgccgatctcgcgggtggtcggcgtcgatcgcatggtggacgagttcatcctgacgttcacgcacgaccgggaaatcgactggctgttgccgggcgtggcgccgaccggcaagcgcgtggagatcccgatgatcgtcgtcgttgcgtttcgcgggccgaagctttacaacgagcatatctactgggatcaggcgagcgtgctcgtgcagctcgggctgctcgatccgcaggggctgccggtctcgggcgtcgaggccgcgcgcaagctgctcgatgaaacgctgccgtcgaacgcgctgatggcgcgctggcgcgagagcgaaccggcgcgatag

SEQ ID NO: 41916 - protein, 408 aa, Burkholderia sp. 383
MTKQIRIGSGDAAFDAYLALPEAGNGPTIVLLQEIFGVNAEMREVADLYAAEGYVVIAPDLFHQFAPNIELGYGDDDHAKAFDYYQRFDVARAIVDIRATVDYARALPESTGKVGVLGFCLGGKLAYLAAARCGVDCAVGYYGVGIEQSLDLVERIACPIALHFGGTDTLNPPETVTAIRAALDSKPNVKLYEYAGAGHAFSRSGPTFVKTAAMSAHTRSLAVFRKALGPDYDLGALADHHFHLEFAARDPEETMQTMVPEPYVNHVPTMTGGTGYTELKRFYTHHFIHNNPADMAMVPISRVVGVDRMVDEFILTFTHDREIDWLLPGVAPTGKRVEIPMIVVVAFRGPKLYNEHIYWDQASVLVQLGLLDPQGLPVSGVEAARKLLDETLPSNALMARWRESEPAR

SEQ ID NO: 41917 - DNA, 1248 bp, Burkholderia sp. 383
  CDS (1)..(1248): transl_table=11
atgcaaggacgtcacatcgagattccgtcgccggacggcggcacgtttcgcgcgtacctgagcacgccggccgccggcaaggggcccggcatcgtgctgtgccacgagatcttcggcgcgaacgcgacgatgcgggaggccgcggactactacgcggaggaaggctatacggtgctcgtgcccgacctgttctggcgccaggcgccgggagtcgaactcggttacacagcgaccgacatggaacgcgcgatggccctttaccgcgaatacgacgagaacaagggcgtcgaggatgtcggcgctgcactggacgcactcaagcagttaccggcatgcacgggcgaagccggcgtgctcggctactgcctcggcggcaagctcgcctatctcgccgcgtgccggctgcctggcgtggccgcagcggtcagctactacggcgtgggcatcgagcaggcgctcgacgaggcgtcgcatctgcacggccggctcgtgctgcagatcgcggggcaggaccgcttctgcccgcccgacgcgcagcagcgcattgccgacgcgctcgccgggcgcgacggcgtcgaagtgtatatgtatccgggcgtcgatcacgcgttcgcgcgcatcggcggcgatcatttcgacaaggccgccgcgatcatggcccaccagcgcgcgattgccgctttccgcgccgcgctcggcccgcgctacgacctgtccacgctgtgggaagcgcacctcaagcacgaattcgacacgcgtaacgtcgatgcaacaatggcgacgatggttgccgaaccgtacgtcaatcacattccgacgctgacgggcggcgtgggctacgacgcgctcaagcgcttctacacgcatcacttcgtgcatgcgaatccgccggacacgacgattacgccgatctcgcgcacgatcggcgcgagccagatcgtcgacgagctgctgttctgcttcacgcacaccaccgagatcgactggatgctgccgggcgtcgcgccgaccggcaagcgcgtcgagattccgctcgtcgcgatcgtcaagtttcgcggcgacaagctctatcacgagcacatctactgggatcaggcgagcgtgctcgtgcagatcggcctgctcgacccggccggcctgccggtcgcgggcgtcgaaacggcccgcaagctgctcgacgaaaccgtgccgtcgaacggcctgatgcgccgctggcaggacagcgagccgtcgtcgggtacgcattga

SEQ ID NO: 41918 - protein, 415 aa, Burkholderia sp. 383
MQGRHIEIPSPDGGTFRAYLSTPAAGKGPGIVLCHEIFGANATMREAADYYAEEGYTVLVPDLFWRQAPGVELGYTATDMERAMALYREYDENKGVEDVGAALDALKQLPACTGEAGVLGYCLGGKLAYLAACRLPGVAAAVSYYGVGIEQALDEASHLHGRLVLQIAGQDRFCPPDAQQRIADALAGRDGVEVYMYPGVDHAFARIGGDHFDKAAAIMAHQRAIAAFRAALGPRYDLSTLWEAHLKHEFDTRNVDATMATMVAEPYVNHIPTLTGGVGYDALKRFYTHHFVHANPPDTTITPISRTIGASQIVDELLFCFTHTTEIDWMLPGVAPTGKRVEIPLVAIVKFRGDKLYHEHIYWDQASVLVQIGLLDPAGLPVAGVETARKLLDETVPSNGLMRRWQDSEPSSGTH

SEQ ID NO: 41919 - DNA, 693 bp, Burkholderia sp. 383
  CDS (1)..(693): transl_table=11
gtgactgcccaatggatcgacatccccgccggtaacgacagcttcggcggctatctcgcgctgcccaagcgcggcaccggccccgccgtcatcatcatccaggagatcttcggcgtgaactcgcacatccgcgcggtcgccgaccagtacgcgtccgacggcttcgtcgcgctcgcgccggacgtgttctggcgcacgcagccgcgcgtcgagctgacctacgaaggcgcggatcgcgacaagggcatcgagctgatgaaaaagaccgacgtgggtctcgcggtcgcggacatcggcgcggcagccgatgcactgcgcgcacgccccgaagtggccggcaaggtcgccgcgatcggctactgcttcggcggccagctcgcgtaccgcgcggcggcgaccggcaagatcgacgcggccgtggcctactacggcggcggcatccagaacgcgctcgacctcgccggcaaggtcacgcagccgatcctgttccactacgcggaaaacgaccacggcatcccgctcacggccgtcgaccaggtgaaggccgcattcgccggccacgaccatgcgtcgttccacgtgtacccgggcgccgagcacggcttcaactgcacggaccgcgcgtcgtacaaccagcgcgcgtcggcgctcgcgcatggccgcacgctgaccttcctcgccgagcacctctaa

SEQ ID NO: 41920 - protein, 230 aa, Burkholderia sp. 383
MTAQWIDIPAGNDSFGGYLALPKRGTGPAVIIIQEIFGVNSHIRAVADQYASDGFVALAPDVFWRTQPRVELTYEGADRDKGIELMKKTDVGLAVADIGAAADALRARPEVAGKVAAIGYCFGGQLAYRAAATGKIDAAVAYYGGGIQNALDLAGKVTQPILFHYAENDHGIPLTAVDQVKAAFAGHDHASFHVYPGAEHGFNCTDRASYNQRASALAHGRTLTFLAEHL

SEQ ID NO: 41921 - DNA, 828 bp, Synechococcus elongatus PCC 7942
  CDS (1)..(828): transl_table=11
atgaacaacctgacacgccgccaatttctggcgactgccacccttgcgactggctttgccctggcggcccggccgatctcagctgctgtcatcaaaaccgatagcaaggggctagagacgggcacggcccaaattccaaccgctgatggactccttcctgcctactgggcgcgcccaactagtggtcaagtcttcccgatcgtgttggtcgtgcaagaaatcttcggcgtccacgagcatattcaggatgtctgtcgccgctttgccaaactgggttatctggcgatcgctccagagctgtttgtgcggcagggcgatgtttccaagttggagagcatcgacgaaatccgcaagattgtcagcaaagtgccggatgcgcaggtgatggcggatctcgatgccaccgttgcttgggcatcaacccaaaaaggcgatcgcgatcgcctcgcaattaccggtttctgctggggtggccgcatcacctggctttatgccgcccacaatccgcaggtgaaaaccggcgcggcttggtacggacgcctagttggaaactcgactgaactgacgcccaaacacccagtcgatgtcgctgccgaattgaaggttccagtcctggggctctacggtggcgaggatacaggcattccgttaggtaccgttcaacagatgcgcgatcgcctcaagaccggttcgagcaagtcggcaatcattgtctacgaaggagcaccccatgccttcttcgcagactaccgcccctcctatcgtcaaggcgatgcgcaggatgcttggcaacggctacagacttggtttaaacagcacggcgtttag

SEQ ID NO: 41922 - protein, 275 aa, Synechococcus elongatus PCC 7942
MNNLTRRQFLATATLATGFALAARPISAAVIKTDSKGLETGTAQIPTADGLLPAYWARPTSGQVFPIVLVVQEIFGVHEHIQDVCRRFAKLGYLAIAPELFVRQGDVSKLESIDEIRKIVSKVPDAQVMADLDATVAWASTQKGDRDRLAITGFCWGGRITWLYAAHNPQVKTGAAWYGRLVGNSTELTPKHPVDVAAELKVPVLGLYGGEDTGIPLGTVQQMRDRLKTGSSKSAIIVYEGAPHAFFADYRPSYRQGDAQDAWQRLQTWFKQHGV

SEQ ID NO: 41923 - DNA, 693 bp, Burkholderia thailandensis E264
  CDS (1)..(693): transl_table=11
atggcttcgcaatggatcgacatccccgcaggcaacgacacgttcggcggctacctcgcgctgcccaagcgcggcaggggcccggccatcgtcatcatccaggaaatcttcggcgtgaacggccacatccgctcggtcgccgatcaatacgcggccgacggctacgtcgcgctcgcacccgacgtgttctggcgcacgcagccgcgcgtcgagctcggctatgaaggcgcggaccgcgacaagggcatcgagctgctgcagaagacggacgtcgtgcaggcggtcgccgacatcggcgcggcagcggcggcgctgcgcgcgcgccccgaggtcgcgggcaagctcgccgcgatcggctattgcttcggcgggcgtctcgcgtatctcgcggcggcgcagcagcacgtcgacgtcgcggtcgcgtattacggcggcggcatccagaatcaagtcgacgtcgcggcgaaggtcacgcagccgatcctcttccactacgccggccacgaccagtcgattccgctcgacgcggtcgacaaggtgaaggccgcgttcgccggccgcgcgaacgccgagttccacctgtatccggacgcacagcacggcttcaactgctcggagcgcgcatcgtacgaccagcgcgcggcggcgctcgcgcacggccgcacgctgactttcctcgccgaacgcctgtaa

SEQ ID NO: 41924 - protein, 230 aa, Burkholderia thailandensis E264
MASQWIDIPAGNDTFGGYLALPKRGRGPAIVIIQEIFGVNGHIRSVADQYAADGYVALAPDVFWRTQPRVELGYEGADRDKGIELLQKTDVVQAVADIGAAAAALRARPEVAGKLAAIGYCFGGRLAYLAAAQQHVDVAVAYYGGGIQNQVDVAAKVTQPILFHYAGHDQSIPLDAVDKVKAAFAGRANAEFHLYPDAQHGFNCSERASYDQRAAALAHGRTLTFLAERL

SEQ ID NO: 41925 - DNA, 720 bp, Frankia sp. CcI3
  CDS (1)..(720): transl_table=11
atgaccaccgcagagaccgtcgtcatccccacccccgacgggcccgccccggccacgctcaccgaacccgatggtcccgcacgcggcggcgtcgtcgtcctccacgaggcgttcggcctcaccgagcacatcaccgatgtctgctcgaggttcgcgcgcgcgggctggcgggccatcgcccccgacctgttccaccgcgcgggctcgcccgtcttcgactacgacgacctcgcctccgcggtgaagatcctcgatgagctcaacggcaccgaccttctcgccgacatcgacgccgcgctggccatcctcgccgaggagggcaccgccatcgaccgctgcgccgtcgtgggcttctgcgtcggcgggagcatcgccttccaggctgcggtggcccggccgttcggcgccgcgagcaccttctacggtggcgggatcaccatgcgccgcttcggggaacccgcccagctggatctcgccgaccgcctgcaggcaccgtggctcggcctgtacggcgaccaggatccgagcatcctcgcttcggaggtggaggacctgcgggcggcgacacggaaggcgtccgtgcccgccgagatcgtccgttacccacaggccgggcacggcttccacaacgacgcccgcgccggcgcctaccacggcccgtcggcgaaggacgcctggtcacgcatgctgacctggttcgactcgcatgttcccggctga

SEQ ID NO: 41926 - protein, 239 aa, Frankia sp. CcI3
MTTAETVVIPTPDGPAPATLTEPDGPARGGVVVLHEAFGLTEHITDVCSRFARAGWRAIAPDLFHRAGSPVFDYDDLASAVKILDELNGTDLLADIDAALAILAEEGTAIDRCAVVGFCVGGSIAFQAAVARPFGAASTFYGGGITMRRFGEPAQLDLADRLQAPWLGLYGDQDPSILASEVEDLRAATRKASVPAEIVRYPQAGHGFHNDARAGAYHGPSAKDAWSRMLTWFDSHVPG

SEQ ID NO: 41927 - DNA, 699 bp, Novosphingobium aromaticivorans DSM 12444
  CDS (1)..(699): transl_table=11
atgggcgagaaaatcacgttcgcagctctggatggcgaaggcgaaatcccgggctacctcgcaacgccggacgggccgatccgcgcggcaatcattgtcattccggagatcttcggcgtgaatgccgggatccggcacaagtgcgaagggtgggcggcacagggctacatggcgttggcgccagacatcttctggcgattcgcgccgggcgtcgagcttgatcccgatgtgccggaacagatgcaggaggcattcgggtatttccagcagtacgatgcagacaagggcgtgaaggacatcgaggccgcaatccgcttcctgcgcggatacgaaggcatcgacaaggtcgggctggtcggcttctgtctgggcgggcggatggcctacatggcagccacacgaaccgatatcgatgcgtcggtgggatactatggcgtgatgatcgaccagatgctgaacgaatcgcacgcgatcgcgcggccgctgatgttgcacatccctaccgccgatcacttcgtcggaccggatgcgcagaaggctattcatgatgcccttgatccgcatccacgggtgacgctccacgactatgaggggctggaccacggtttcgcggcggaaatgggcaatcgccgcgacgatgacggtgccgagcttgccgaccggcggacgcgggatttcttcgcgcagcatcttggataa

SEQ ID NO: 41928 - protein, 232 aa, Novosphingobium aromaticivorans DSM 12444
MGEKITFAALDGEGEIPGYLATPDGPIRAAIIVIPEIFGVNAGIRHKCEGWAAQGYMALAPDIFWRFAPGVELDPDVPEQMQEAFGYFQQYDADKGVKDIEAAIRFLRGYEGIDKVGLVGFCLGGRMAYMAATRTDIDASVGYYGVMIDQMLNESHAIARPLMLHIPTADHFVGPDAQKAIHDALDPHPRVTLHDYEGLDHGFAAEMGNRRDDDGAELADRRTRDFFAQHLG

SEQ ID NO: 41929 - DNA, 735 bp, Methylobacillus flagellatus KT
  CDS (1)..(735): transl_table=11
atgctgattcaaagccatatcgtcgacctggaaacccccaccggcaccatgcgcacctatgtgcatcgtcctgccggcgaaggccgtttccccgccatcctgttctactccgaaatattccagcaaaccggccctatcgagcgtgccgcacgtttcctcgcaggccacggctatgccgtgctggtgccggaagttttccacgaactcaacccgatcggcaccgtgctcgcctatgacgacgcgggccgcgacaagggcaatgccgacaaggcggccaaagacgtacaaggttacgacagcgacaaccgcgccatgatcgaatgggtacagtcacaaccctggtttaatggcaatatcggcgctgcaggcttctgcatcggcggccacctggcattccgtgccgccctgcaaccggaagtcaaggccaccgcctgcttctatgccaccgacctgcatacccagatcatccccagcaagccgggccagcacagcatggaacgccttgccgacatcaagggcgaactgctcatgatctggggcaagcaggacaaccacatcccgaccgcaggccgcgtacaggtctaccaacaattaacggatgccggcctcagcttcacctggcacgaattcaacggccaacacgccttcatgcgcgacgagggcgaacgctacgacccacagctcgccgccatcggctaccaactggccttgcaattgttcggtaatacgctgtaa

SEQ ID NO: 41930 - protein, 244 aa, Methylobacillus flagellatus KT
MLIQSHIVDLETPTGTMRTYVHRPAGEGRFPAILFYSEIFQQTGPIERAARFLAGHGYAVLVPEVFHELNPIGTVLAYDDAGRDKGNADKAAKDVQGYDSDNRAMIEWVQSQPWFNGNIGAAGFCIGGHLAFRAALQPEVKATACFYATDLHTQIIPSKPGQHSMERLADIKGELLMIWGKQDNHIPTAGRVQVYQQLTDAGLSFTWHEFNGQHAFMRDEGERYDPQLAAIGYQLALQLFGNTL

SEQ ID NO: 41931 - DNA, 708 bp, Burkholderia xenovorans LB400
  CDS (1)..(708): transl_table=11
atgaaacagtcagcaggttcgatgatcacgttcagccgcccggacggccagcagatccagggctatctggccacgccgcagaagctggaaggtgcgcccggcattgtcgtgatccaggagtggtggggcgtgaacgagcagattcgcggcgtggcggaccggctcgcgcaggccggttatctggcgctggtgcccgatctgtttcgcggcaagaccacggtggaagaagcggaggcgcaccacctgctcgacgggctcgatttcggcgacgcggccacgcaggatgtgcgcggcgccgtccagtatctgaagcagcaaacggcgaaggtcggcgtgacgggcttttgcatgggcggcgcgctgaccctgctcgcgctgtgcaatgtgcccgaagtgtcggccggcgtggcctggtacggcttccctccgctggagtacatcgacgcatcgaaaatcaaggtgccggtgatcggtcattgggccacgcaagacgagttcttcgcggcagaaacggtcgatgcgctggaaagcaaactgaaggacgcgaatgtcgatgtcgagttttaccgctatctcgcgcaccacggcttcgccaacgaagaggccgtcggcccgggccggatcgcgagaacgcagttcgatccggtgtggtcgcaacgggcgtgggatcgcacgctgacgtttttcggccgcactttgtggaagtag

SEQ ID NO: 41932 - protein, 235 aa, Burkholderia xenovorans LB400
MKQSAGSMITFSRPDGQQIQGYLATPQKLEGAPGIVVIQEWWGVNEQIRGVADRLAQAGYLALVPDLFRGKTTVEEAEAHHLLDGLDFGDAATQDVRGAVQYLKQQTAKVGVTGFCMGGALTLLALCNVPEVSAGVAWYGFPPLEYIDASKIKVPVIGHWATQDEFFAAETVDALESKLKDANVDVEFYRYLAHHGFANEEAVGPGRIARTQFDPVWSQRAWDRTLTFFGRTLWK

SEQ ID NO: 41933 - DNA, 699 bp, Burkholderia xenovorans LB400
  CDS (1)..(699): transl_table=11
atgagcaccacttcccgatggatcgacattcccgccggtaaagacagtttcggcggctaccttgcgctgcccaaaggcggcaagggaccggccgtcatcatcattcaggaaatcttcggcgtgaacagccatatccgctcggtcgcggatcagtatgcccaggacggctacatcgcgctcgcaccggacgtgttctggcgggtgcagccgcgcgtggaattgacgtatgaaggcgcggatcgcgagaagggcatcgagctgatgcagaagaccaacgtcgatcaggccgtagccgatatcggcgcagccgccgccgcgttgcgtgccatgccggaagtgaccggcaagattgcggcgatcggctactgcttcggcggccggctcgcgtatctggccgcggcgcaaggcacgctcgacgcagcggtggcctactacggcggcggcatccagaaccagctcgacgaagcagcgaagatcaaggtgccgatgcaattccactacggcgagctcgacgcgcatattccggtgtcggctatcggacagattcaggagcgcttcgccggccgcaccgacgccgagttccacatctatccgaatgccgatcacggcttcaactgctcggaccgcgcgtcgtataaccagcgcgccgccgcgctggcgcatggccgcacgttgaccttcctcggcgagcgtctgtaa

SEQ ID NO: 41934 - protein, 232 aa, Burkholderia xenovorans LB400
MSTTSRWIDIPAGKDSFGGYLALPKGGKGPAVIIIQEIFGVNSHIRSVADQYAQDGYIALAPDVFWRVQPRVELTYEGADREKGIELMQKTNVDQAVADIGAAAAALRAMPEVTGKIAAIGYCFGGRLAYLAAAQGTLDAAVAYYGGGIQNQLDEAAKIKVPMQFHYGELDAHIPVSAIGQIQERFAGRTDAEFHIYPNADHGFNCSDRASYNQRAAALAHGRTLTFLGERL

SEQ ID NO: 41935 - DNA, 711 bp, Burkholderia xenovorans LB400
  CDS (1)..(711): transl_table=11
atgttgactgaagggatatcgattcaatcgtatgacgggcatacattcggcgcgctcgtgggctcgccggccaaagcgcccgctcccgtgattgtgatcgctcaagaaatatttggtgtgaacgcgttcatgcgagaaacggtgtcatggctggtcgaccaggggtatgcggcagtttgccctgatctgtacgcgcgccaggcgccaggtacagcactcgatccgcaggatgaggcgcagagagagcaagcctacaagctctggcaggccttcgacatggaggccggcgtgggcgatctggaggctgctatccgctatgcgcgacaccaaccctacagcaacggcaaggtgggattggtggggtattgcctgggcggtgcgcttgcctttctagtggccgccaaaggatacgtggatcgcgccgtaggctactacggtgttggactggagaagcagctcaacaaggtcccggaagtcaagcatccggcgttgtttcacatgggcggccaagaccacttcgtgcccgcgccaagccgccagctgattactgaaggcttcggtgccaatccattgctgcaagtgcactggtacgaagaggccggacactcgttcgccaggacgagcagttcgggctatgtggcgagtgccgcggcgttggccaacgaacgtacactggatttcctggcgcccttgcagagcaagaagccatga

SEQ ID NO: 41936 - protein, 236 aa, Burkholderia xenovorans LB400
MLTEGISIQSYDGHTFGALVGSPAKAPAPVIVIAQEIFGVNAFMRETVSWLVDQGYAAVCPDLYARQAPGTALDPQDEAQREQAYKLWQAFDMEAGVGDLEAAIRYARHQPYSNGKVGLVGYCLGGALAFLVAAKGYVDRAVGYYGVGLEKQLNKVPEVKHPALFHMGGQDHFVPAPSRQLITEGFGANPLLQVHWYEEAGHSFARTSSSGYVASAAALANERTLDFLAPLQSKKP

SEQ ID NO: 41937 - DNA, 1230 bp, Ralstonia metallidurans CH34
  CDS (1)..(1230): transl_table=11
atgggccagactatccagatccagacccaggacggcaacttcagtggctatctcgccactccggcaggaggcaagggccctggcatcgtgctgtgccaggagatcttcggcgtcaatgccaccatgcggcaggtggccgactactatgccgaggaaggctataccgtgctggtgccggatctgttctggcgcatcgagcacgggatcgagctatccgaccgtggggcggacttccagcgtgcactcggcttgtaccagcaatttgacgaagataagggcgtgcaggacgtcggcgccgctctcgccacgctacgccaacgccccgaatgcgctggccagaccggtgtgctcggcttctgcctcggcggcaagctggcctatctggcggcgtgccgactgccggacgtagcctgtgccgtcggctactacggggttggtatcgagcgcgcgcttggcgaggccagaaacatccgtggccggctggtactgcatgtcgccgagcgcgatggcttctgcccgcccgaggcgcaggcgagcatccgcgaagcgctgtccggccaacccggtgtcgaactgtacgtctatccggggatggatcacgcgttcgcgcgcaccggcggcgagcacttcgacaaggcctcggccctgatggcgcaccagcgttcgatcgcggcgttccgcgccgagatgggcccgcactacgatttctccgcgctgtgggataagcattgcgagtacgaattcgccacgcgcgatgtcgatgccacgatggcgacgatggtggccgagccatacgtcaaccacatcccgacgatgaccggtggcgtgggctaccggcagctcaagcgcttctaccagcaccacttcgtccacagcaatccgcccgacaccacgctgattccgctgtcccgcacgatcggcgccagccaggtagtggacgagatcctcttctgctttacccacacctgcgagatcgactggatgctccccggcgtgcctccaaccggcaagcgcgtagagatcccgctgatcgccatcatcaagttccgtggcgacaagctctatcacgagcatatctactgggaccaggccagcgtgctggtacaggtcggcctgctcgatcccaaggggctacccgtggccggagtcgagacggcacgcaagctgctggacgaaaccctgccatccaacacgctgatggcgcgctggagcgagagcgaaggcaagtaa

SEQ ID NO: 41938 - protein, 409 aa, Ralstonia metallidurans CH34
MGQTIQIQTQDGNFSGYLATPAGGKGPGIVLCQEIFGVNATMRQVADYYAEEGYTVLVPDLFWRIEHGIELSDRGADFQRALGLYQQFDEDKGVQDVGAALATLRQRPECAGQTGVLGFCLGGKLAYLAACRLPDVACAVGYYGVGIERALGEARNIRGRLVLHVAERDGFCPPEAQASIREALSGQPGVELYVYPGMDHAFARTGGEHFDKASALMAHQRSIAAFRAEMGPHYDFSALWDKHCEYEFATRDVDATMATMVAEPYVNHIPTMTGGVGYRQLKRFYQHHFVHSNPPDTTLIPLSRTIGASQVVDEILFCFTHTCEIDWMLPGVPPTGKRVEIPLIAIIKFRGDKLYHEHIYWDQASVLVQVGLLDPKGLPVAGVETARKLLDETLPSNTLMARWSESEGK

SEQ ID NO: 41939 - DNA, 765 bp, Acidobacteria bacterium Ellin345
  CDS (1)..(765): transl_table=11
atgaaagtggtacttgaaaagactctcgtggtcatgattgcggcgctgttgctgagttgcgcaacctttgcagcgacccccaaagaagttacctataagagcggcaacgacacggtcaaagccatcctgtatgcgcccgatggcgcgaagggcaagctgcccgcgcttgtcgtcattcatgagtggtgggggttgaatgattgggtgaaggaacaggcatcgaagctggcggaccagggatatgtgactctggcgatcgatctgtatcgcggcggcgtggcgaagacttccgacgaagctcatgagttgatgcggggcgtaccgaatgatcgggcgtcgcgagatttgacggcggcggcggagtttttgcggtcgcaaccgaatgtggatgcgtcgcgcgtaggagacattgggtggtgtatgggcggcggatatgcgctcgacctcgcgctctcggacgcgaagctgaaggcctcggtgattaattacgggcatctgatggtggaacctagcaatctggcgaagatcaacgctgcggtgctgggacttttcggcgcgcaggaccgcgggattccggtggacagcgtaaaggcgttcggcgacgagttgaagaagcaggggaagaccgtggagatcaagatttacgacgacgcgggacatgcgtttgagaatccgaataacaaggatgggtatcgagcggccgatgccgaggatgcttggaaacggacgacggcgtttttagagaagaatttgaagggcaaatag

SEQ ID NO: 41940 - protein, 254 aa, Acidobacteria bacterium Ellin345
MKVVLEKTLVVMIAALLLSCATFAATPKEVTYKSGNDTVKAILYAPDGAKGKLPALVVIHEWWGLNDWVKEQASKLADQGYVTLAIDLYRGGVAKTSDEAHELMRGVPNDRASRDLTAAAEFLRSQPNVDASRVGDIGWCMGGGYALDLALSDAKLKASVINYGHLMVEPSNLAKINAAVLGLFGAQDRGIPVDSVKAFGDELKKQGKTVEIKIYDDAGHAFENPNNKDGYRAADAEDAWKRTTAFLEKNLKGK

SEQ ID NO: 41941 - DNA, 675 bp, Myxococcus xanthus DK 1622
  CDS (1)..(675): transl_table=11
atgacaggacagacgcagctcatcggcaagcagggccaggcactggcgggctatctgagtgaagccccgaagggcgacgcgcccggagcggtggtgctcatccatgagtactggggcctcaacggccacacgcgcgacgtggcggaccggctggcgcgagaaggcttcaccgtcttcgcggtggacctctacgaaggccgcgtgacgaaggacgccagcgaggccaacgcgatgctgaaggcgatggcttgggacaaggccacggcggacctgcgcgccgcggtggaggcgctgcgcgcgcgaaagcccggcaccaaggtggccatcatgggcttctgcatgggcggcgcgctgacgctgctggccgccgcgaatgagccggggctcgacgccgccgtgcccttctacggcatccccccggaggaggccgcggacgtgtcacgcatccgcgcgccggtgctcgggcactacgcgaacaatgacgaatggtgctcgccggagcgcgtggacgcgttggagaagaggctgaaggggggcggcgtccccatggagattcaccgctacgacgcacagcacgccttcttcaatgacacgcgtccggaggtctactcaccggacaacgccgcgaaggcgtggcagcgcaccgtggacttcctccacgcgaagctcggctga

SEQ ID NO: 41942 - protein, 224 aa, Myxococcus xanthus DK 1622
MTGQTQLIGKQGQALAGYLSEAPKGDAPGAVVLIHEYWGLNGHTRDVADRLAREGFTVFAVDLYEGRVTKDASEANAMLKAMAWDKATADLRAAVEALRARKPGTKVAIMGFCMGGALTLLAAANEPGLDAAVPFYGIPPEEAADVSRIRAPVLGHYANNDEWCSPERVDALEKRLKGGGVPMEIHRYDAQHAFFNDTRPEVYSPDNAAKAWQRTVDFLHAKLG

SEQ ID NO: 41943 - DNA, 831 bp, Myxococcus xanthus DK 1622
  CDS (1)..(831): transl_table=11
atgcgccagggcctgctgttgatgatgggagcgctgctgctgagcgcctgcgtccagggccgttcccgggaagtgctccgcgagccgtccgccacgggcgctgtctccgaatcggagttcaaggcgctgcacacgctgcgcgaggacgcgccgccagcgcccaagggccaggaggtggaggtggccggcacgaaggcctacctgagcctgccccagggcgcccaggggccgctgcccgccgtcatcgtcatccatgagtggtgggggctcaatgaccacatccgccactggacggaccggctggccgcggagggctacgccgcgctggcggtggacctgtatggcggcaaggtggccacctcgcgggatgaggcgctggcgctgctgaaggccgtggacccggcgcgcgcgcaggagacgctgacggccgcgcacaccttccttcagcaggacgcgcgggtgcaggcgccgcgcacgggcaccatcggctggtgcttcgggggcggctggtcactgcacgcggccatggccatgccggagctggacgctgcggtcctctactacggcaacccggtgacggaggcgcgggagctcgccgccatccgcgcgccggtgctgggcatcttcggcacgaaggacccgtccatccccctggagacggtgcaggccttccggcaggccttggatgatgcgggtgtgcggcactacatcctggagttcgaagcggagcacgccttcgccaacccgtcgagtgagcgctacgacgcgcaggccgccgcgggtgcctggcagcaggtggcggccttcctggaccagcacctgcgtcagtag

SEQ ID NO: 41944 - protein, 276 aa, Myxococcus xanthus DK 1622
MRQGLLLMMGALLLSACVQGRSREVLREPSATGAVSESEFKALHTLREDAPPAPKGQEVEVAGTKAYLSLPQGAQGPLPAVIVIHEWWGLNDHIRHWTDRLAAEGYAALAVDLYGGKVATSRDEALALLKAVDPARAQETLTAAHTFLQQDARVQAPRTGTIGWCFGGGWSLHAAMAMPELDAAVLYYGNPVTEARELAAIRAPVLGIFGTKDPSIPLETVQAFRQALDDAGVRHYILEFEAEHAFANPSSERYDAQAAAGAWQQVAAFLDQHLRQ

SEQ ID NO: 41945 - DNA, 912 bp, Mycobacterium sp. MCS
  CDS (1)..(912): transl_table=11
gtgacaccgctgcagcgctacatcgccgaagagatcgcgaccgaccacgtcgacggattgctgtcccgccgtgaggcgttgcgcaggctctccctgatcggcatcggcaccgcgggcgcgaccgcactgttcgccgcgtgcagcgagaacaagcaggaggaagccgaggcgcccgtgacatcgagcggcgccgccacggtcagtgcgccgccgccgggatcgcagaacgcggtcccgactgagcccgtcacctgggcgggcccccgcggtgagttgcagggcgcgtgggcggcggcggaccagccgcgtggcgcggtgctggtgatccacgagaacaagggactcaacgactacatccggtcggtcgccggtcggttcggcggcatcggttactccgccctcgcgatcgatctgctctccgggcaggggggcaccgcgacgttcgccgatccggccgaggcgaccgcggcgctgagcaagctgccgcccgaggaggcggtcgccgatttgagatccggaatcgacgagttgagtcgccgggtgccggaccgcaaactcgcggcggtcgggttctgcatgggcgggggcatggtgtggcgactgttggcggcgggcgagccacgattggcagcggcggtgcccttctacggtccaaccccggagaaccccgacttctccggttcgaaagacgttgcggtgctgggcatctatgcttcgcaggaccagcgggtcaacgccagcgaacccgtcgcgcgcgccgcactcgaaaaggccggcatggtcttcgaactcgtcaccgagcccgatgccaaccacgccttcttcaacgacaccggtgagcgctacaacgccgccgccgccgccgacgcgtggaaacgcgtgcaggagtggttctcccgctacgtcgactga

SEQ ID NO: 41946 - protein, 303 aa, Mycobacterium sp. MCS
MTPLQRYIAEEIATDHVDGLLSRREALRRLSLIGIGTAGATALFAACSENKQEEAEAPVTSSGAATVSAPPPGSQNAVPTEPVTWAGPRGELQGAWAAADQPRGAVLVIHENKGLNDYIRSVAGRFGGIGYSALAIDLLSGQGGTATFADPAEATAALSKLPPEEAVADLRSGIDELSRRVPDRKLAAVGFCMGGGMVWRLLAAGEPRLAAAVPFYGPTPENPDFSGSKDVAVLGIYASQDQRVNASEPVARAALEKAGMVFELVTEPDANHAFFNDTGERYNAAAAADAWKRVQEWFSRYVD

SEQ ID NO: 41947 - DNA, 876 bp, Mesorhizobium sp. BNC1
  CDS (1)..(876): transl_table=11
atgtccaaacctcaaatcacacaagcgatgatcaaggcctatgacgagtacacgcatctgacactcgaccgccgcggcttcatggagaagcttacaaagcttgcgggatcgagcgcagccgcggtggctattgcgccgcttctggctgccaatgcggctcgggcagcaatcgtgccggaggacgacgcccggctgaatgcggaggatgtcacctatcctggcgcggaaggcgagatgaaggggtatttggtgcggccggccgatgcgcagggacctctcggggctgtgatcgtcattcatgaaaatcgcggcctcaatccgcacatccgcgatgtggcgcggcgagtggcgttagaaggattcgtcgcgctcgcaccggactttctgtcgccgcaaggcggcacaccggaaaacgaggacgaggcgcggcagcttttcagccagctcaatccggaccaggcggttgcaaacggcgttgccaccatcaccttccttgaaaatcacgacggcacgaacggaaaggtgggcgcggtcggcttctgctggggtggcgggaccgtgaacgcacttgctgtcaacgcgccttcgctggatgccgccgtggcctattacggctcccagcccgatccagagcaggtggaggagatcagtgcaccgctgcttctgcattatgcggggctggatgagcgcatcaatgcgggtatcgagacctttcgcagtgcgctcgatgcagccgggaaggaatacaccatccacatgtatgaaggcgtgaaccatgccttcaacaacgacacctcggaagcgcggtacaacaaggaggcagccgatcttgcctgggaccgcacaatagcgtttttcaaggaaaagcttgcctga

SEQ ID NO: 41948 - protein, 291 aa, Mesorhizobium sp. BNC1
MSKPQITQAMIKAYDEYTHLTLDRRGFMEKLTKLAGSSAAAVAIAPLLAANAARAAIVPEDDARLNAEDVTYPGAEGEMKGYLVRPADAQGPLGAVIVIHENRGLNPHIRDVARRVALEGFVALAPDFLSPQGGTPENEDEARQLFSQLNPDQAVANGVATITFLENHDGTNGKVGAVGFCWGGGTVNALAVNAPSLDAAVAYYGSQPDPEQVEEISAPLLLHYAGLDERINAGIETFRSALDAAGKEYTIHMYEGVNHAFNNDTSEARYNKEAADLAWDRTIAFFKEKLA

SEQ ID NO: 41949 - DNA, 771 bp, Rhodococcus sp. RHA1
  CDS (1)..(771): transl_table=11
atggttgtcgcagatgttctggaagtgacgacggaacgggagacgcacatgtccgagatcgacttgaccgacctcgctgcgcggcacgacggttcgctgaacttgcacggttatctggcgaggccgtccggtgagggtccgtggccgggggtggtgatggtgcacgaggcgttcggcttggacgaggtgatgcgccggcaggcggacaggctggcggctgcggggtttctgactttggcaccggatctgttcagtgcgggcggtgcgcgacgctgtctggtgtcgacgatgcgggcgatgctctcggggaagggccgggcgtatggcgacatcgaggctgcccgtcagtggttgtccggctcgtcggactgcacggggaagatcggtgtcatcggattctgcatgggcggcgggttcgccctgatgaccctgcgcacggggttcgatgcggcggcaccgaactacggggtcctgccgcgcgacctcgacgcggccgtggcgggtgcgtgcccggtggtcgccagttacggcggcaaggacttcgctctgcggaatgcggcggccaagttggagtcggcgctgacgaaggctggcgtggctcacgatgtgaaggagtaccccactgccggccacgcgttcttgaacgacgaggtggccggaccgaaggtgctgcgccccctggtgaaggtcgcggggatggtgcccgacccggaagccgccgccgacgcgtggaagaggatcgacggcttcttcggggagcacctgggttga

SEQ ID NO: 41950 - protein, 256 aa, Rhodococcus sp. RHA1
MVVADVLEVTTERETHMSEIDLTDLAARHDGSLNLHGYLARPSGEGPWPGVVMVHEAFGLDEVMRRQADRLAAAGFLTLAPDLFSAGGARRCLVSTMRAMLSGKGRAYGDIEAARQWLSGSSDCTGKIGVIGFCMGGGFALMTLRTGFDAAAPNYGVLPRDLDAAVAGACPVVASYGGKDFALRNAAAKLESALTKAGVAHDVKEYPTAGHAFLNDEVAGPKVLRPLVKVAGMVPDPEAAADAWKRIDGFFGEHLG

SEQ ID NO: 41951 - DNA, 696 bp, Rhodococcus sp. RHA1
  CDS (1)..(696): transl_table=11
gtgaccacaccactcaccagcatcacccccgaaggtcccgtccgcggcggtgtagtcgtgatccaggaggcgttcggcgtcaccgggcacatcgtcgacgtctgccgtcgtttcgccgacgccggataccacgcggtcgcgccgcacctgttccaccggagcggcgatccggtgctggagtacgacgacatgacgtcggcgatgtcgttgatcggtgagctcaccgctgcgcacatcgacgaggacgtcgacggggccgtcgcggctctgtcggcggcctcgatcgacccgcggaacaccgcgatcgtcggattctgcatgggcggaacggtcgcgttccacacggcggcgcgcctcgaactcggggcggcggtgagtttctacggcggtggcgtcgcgaagggacgattcggatatccgtcgcaactcgacgtcgccgggcagctccgaacgccgtggctcggcctgttcggcgaccgcgacaaggggattccgaccgaggatgtcgaggagttgcgtgacgcggtcgcgcacgccccggtggacaccgagatcgtccgctacgccgaggccgaacacggcttccactgcgacgaccgtcctgccgtgttcaacgaggcggccgcccgggacggttgggctcgcacgctgcagtggttcggcgcccacgtcgacgttgccgccggaaccgactga

SEQ ID NO: 41952 - protein, 231 aa, Rhodococcus sp. RHA1
MTTPLTSITPEGPVRGGVVVIQEAFGVTGHIVDVCRRFADAGYHAVAPHLFHRSGDPVLEYDDMTSAMSLIGELTAAHIDEDVDGAVAALSAASIDPRNTAIVGFCMGGTVAFHTAARLELGAAVSFYGGGVAKGRFGYPSQLDVAGQLRTPWLGLFGDRDKGIPTEDVEELRDAVAHAPVDTEIVRYAEAEHGFHCDDRPAVFNEAAARDGWARTLQWFGAHVDVAAGTD

SEQ ID NO: 41953 - DNA, 738 bp, Trichodesmium erythraeum IMS101
  CDS (1)..(738): transl_table=11
atgacacaattagaaatccataaaactcatattcaagtccctaatggagaccttcaaatagattcctatttagtacaaccattaggaactggtccatttccaggggtggtggttgttcaagaaatatttggggttaataaccatattcgggaagtaacagaaaaaattgctaaagaaggttatgtggcgatcgctccctcaatttaccaacgtcaagctcctggttttgaagtgggctacactgaggaggatgtaatattaggtcgcaagtacaaagaacaaactcgagcttcagaactactcagcgatattcaagctactattaattatctcaaaaatttacctactgttaaaccagataagttcggttgtatgggtttctgttttggaggccatgtaacttatctagcagctactttgcgagaaattcaagcaactgcttctttctatggggctggtattgctgttggtactcctggtggtggtgagcctactattactctcactcctaaaattagtggtacgatatattgcttttttggcacagaagatcctttaattcccatagaagaggtagaaaaaatagaagcagaattacagaaacataaaattaaacatcaagtatttcgttatcaagcagaccacggtttcttctgtgaccaccgtagtagttataatgctcaagctgctgctgatgcttgggaattgaccaaacaactttttcttcaaaatttataa

SEQ ID NO: 41954 - protein, 245 aa, Trichodesmium erythraeum IMS101
MTQLEIHKTHIQVPNGDLQIDSYLVQPLGTGPFPGVVVVQEIFGVNNHIREVTEKIAKEGYVAIAPSIYQRQAPGFEVGYTEEDVILGRKYKEQTRASELLSDIQATINYLKNLPTVKPDKFGCMGFCFGGHVTYLAATLREIQATASFYGAGIAVGTPGGGEPTITLTPKISGTIYCFFGTEDPLIPIEEVEKIEAELQKHKIKHQVFRYQADHGFFCDHRSSYNAQAAADAWELTKQLFLQNL

SEQ ID NO: 41955 - DNA, 963 bp, Shewanella sp. MR-4
  CDS (1)..(963): transl_table=11
atgagcccacaacccaagtccgacaataacgcgccagctgctcaacctatcccgcaggaggcctttgattggtacgatgaatatgcccacggcatcatcgaccgccgcgagtttatggctcgcctcgccggccttgtggcactggggtttaccatgacaacgctcactggcgcactcatgcccaactatgccttagccgaacaagtctcctttaacgatcccagcattcaagccagttatgtgaagtttccctcccccgaagggtatggagaagggcgcggctatttagtgatgccagcttccatgcttattcccggcaaagaggcgggcgatcctaagaccttggaccccactaaaaaagccgccgtggtgttagtggtgcatgaaaaccgtggcctgaatccctatatcgaagatgtggcccgccgcttagcggccaaaggctatatcgccttcgctcccgatgcgctttacagtctcggcggctatcccggtaatgacgatgcgggccgcgccatgcaagccagtctcgacagagccaaaatcgagcaggactttatcgccgccgcgcgctttctcaaggcgcatccacagagtaatggcaaactcggcgccgtcggtttctgctttggtggctacatagtcaatatgctcgccgccagcattcccgatgaactcgctgctggcgtgcctttttatggcacacccgcggcaacagagctacgcagccgagtcactggcccgctgatgttgcaatttgccgcgttagatcaacggattaacgacacttgggccgagtacgaaacccaattaaaggctaacaaggccgagtatattgcctacctctatcccaatgtgaatcatggtttccataacgattccaccgcacgctacgatgagccaaccgccgagctcgcatgggcaagaaccttggatttctttgggaagtacctacaaggttag

SEQ ID NO: 41956 - protein, 320 aa, Shewanella sp. MR-4
MSPQPKSDNNAPAAQPIPQEAFDWYDEYAHGIIDRREFMARLAGLVALGFTMTTLTGALMPNYALAEQVSFNDPSIQASYVKFPSPEGYGEGRGYLVMPASMLIPGKEAGDPKTLDPTKKAAVVLVVHENRGLNPYIEDVARRLAAKGYIAFAPDALYSLGGYPGNDDAGRAMQASLDRAKIEQDFIAAARFLKAHPQSNGKLGAVGFCFGGYIVNMLAASIPDELAAGVPFYGTPAATELRSRVTGPLMLQFAALDQRINDTWAEYETQLKANKAEYIAYLYPNVNHGFHNDSTARYDEPTAELAWARTLDFFGKYLQG

SEQ ID NO: 41957 - DNA, 963 bp, Shewanella sp. MR-7
  CDS (1)..(963): transl_table=11
atgagcccacaacccaagtccgataataacgcgcatgcttctcagcctatcccgcaggaggcctttgattggtacgatgaatatgcccacggcatcatcgaccgccgcgagtttatggctcgcctcgccggccttgtggcactggggtttaccatgacaacgctcactggcgcactcatgcccaactatgccttagccgaacaagtctcctttaacgatcccagcattcaagccagttatgtgaagtttccctcccccgagggctatggtgaagggcgcggttatttagtgatgccaacttccatgcttattcccggcaaagaggcgggcgatcctaagatcttagaccccactaaaaaagccgccgtggtgttagtggtacatgaaaaccgtggcctgaatccctatatcgaagatgtggcccgccgcttagcggccaagggctatatcgccttcgcccccgatgcgctttacagcctcggcggttatcccggtaatgacgatgcgggccgcgccatgcaagccagcctcgacagagccaaaatcgagcaggactttatcgccgccgcgcgctttttaaaggcgcatccacagagtaatggcaaactcggcgccgtcggtttctgctttggtggctacatagtcaatatgctcgccgccagcattcccgacgaactcgcggctggcgtgcctttttacggcacccccgcagcaacagagcttcgcggccgagtcacaggcccattgatgttgcaatttgccgccttagatcaacggattaacgacacttgggccgagtacgatacccaattaaaggctaacaaggccgagtatattgcctacctctatcccaatgtgaatcatggttttcataatgattccaccgcccgctacgatgagccaaccgccgagctagcatgggcaagaaccttggatttctttgggaaatacctacaaggttag

SEQ ID NO: 41958 - protein, 320 aa, Shewanella sp. MR-7
MSPQPKSDNNAHASQPIPQEAFDWYDEYAHGIIDRREFMARLAGLVALGFTMTTLTGALMPNYALAEQVSFNDPSIQASYVKFPSPEGYGEGRGYLVMPTSMLIPGKEAGDPKILDPTKKAAVVLVVHENRGLNPYIEDVARRLAAKGYIAFAPDALYSLGGYPGNDDAGRAMQASLDRAKIEQDFIAAARFLKAHPQSNGKLGAVGFCFGGYIVNMLAASIPDELAAGVPFYGTPAATELRGRVTGPLMLQFAALDQRINDTWAEYDTQLKANKAEYIAYLYPNVNHGFHNDSTARYDEPTAELAWARTLDFFGKYLQG

SEQ ID NO: 41959 - DNA, 738 bp, Shewanella sp. MR-7
  CDS (1)..(738): transl_table=11
atgttagtgactcagcaaactcaggatatcaacacgcccacagggccgatgcgaacttatgtctatcgcccagatgccccagggcaattcccctgtatcctcttctattctgagatttttcagcaaaccgcgcccatcgcccgcaccgcgactatcctcgctggccatggttttgtggtgttagtgccagaagtcttccatgagcttaatccgataggcacagtactagcctacgatgatgtgggtaaagataaaggcaatgccgataaatttgccaagcccttagagcagcacgacggcgacacccaagcccttatcgattttgcccgccagcagagttattgcacgggtaaggtcggcagtatgggtgtgtgtattggcggccacttagcctaccgcgccgcacttaatcccgagattttaggggcgttttgcctctatccgaccgacattcactccaataccctgccctgcgcctacggcaatgattcactgagtcgcagcggcgatattcaaggggaattagtgttagtgtttggcaaacaagatccccatatatcacccgaaggtcgggtattaatccaccaacaattgatggctaaaaaccgtaatttcagttggttagaggttaatgctcagcatgcctttatgcgtgatgagggtgagcgctacgatcccgcgctggcgctgcaaatgtatcaacaatccgtggcgttttttcaccgagtgttgagatga

SEQ ID NO: 41960 - protein, 245 aa, Shewanella sp. MR-7
MLVTQQTQDINTPTGPMRTYVYRPDAPGQFPCILFYSEIFQQTAPIARTATILAGHGFVVLVPEVFHELNPIGTVLAYDDVGKDKGNADKFAKPLEQHDGDTQALIDFARQQSYCTGKVGSMGVCIGGHLAYRAALNPEILGAFCLYPTDIHSNTLPCAYGNDSLSRSGDIQGELVLVFGKQDPHISPEGRVLIHQQLMAKNRNFSWLEVNAQHAFMRDEGERYDPALALQMYQQSVAFFHRVLR

SEQ ID NO: 41961 - DNA, 897 bp, Hyphomonas neptunium ATCC 15444
  CDS (1)..(897): transl_table=11
atggccgacggcgcgcaggacaagattgaaattccgcaggaagtcttccggctttatgacgcttactgccacggcgacctttcccgccgggctttcttctcaaggctgagcgcctatgccgggggcgggatcaccgtctcgatgctcgccgcctgcgtgatgcccgattacagccaggcccagacggtgaccggtgaggccgacctgatcgaagaagaaatcacctacgcgtcccccgatggcgccggaacaatgggcggctatctggtgcgcccggcgaatgcgacggggccgctgccggccattctcgtgatccacgaaaaccggggcctcaacccctatatccgcgatgtcacgcgccgcgccgcaaaggcaggctatgtcgccctcgggcccgacgcgctctatccgctcggcggctatcccggcaatgacgatgacgggcgcacgctgcaggcagagcgcacgcgcgaggcgatgtttgcggacttcgtggcgggcgccgaattcctgcgcgcgcatgaggcggtggatggcaatgtcggcgtcaccggcttctgctttggcggggcaatggcaaaccagctcgccgtcagcctgccctggctgaaagcttctgtgccgtattatggcggctggcctgcggccgaagaggcagcaaatcttgccgtgcccctccagatccatctggcgagcgatgatccgcgcgtgaatgaaggctgggtgccctatgaggcggcgctgaaggctgccggtaaggcctacgaactgcattggtatgatggcacgcagcatggtttccacaatgataccacgccgcgtttcaatcccgaggcagcggcgctcgcctggtcccggacgctggatttcttcggcaagcacctgcgcggcagctga

SEQ ID NO: 41962 - protein, 298 aa, Hyphomonas neptunium ATCC 15444
MADGAQDKIEIPQEVFRLYDAYCHGDLSRRAFFSRLSAYAGGGITVSMLAACVMPDYSQAQTVTGEADLIEEEITYASPDGAGTMGGYLVRPANATGPLPAILVIHENRGLNPYIRDVTRRAAKAGYVALGPDALYPLGGYPGNDDDGRTLQAERTREAMFADFVAGAEFLRAHEAVDGNVGVTGFCFGGAMANQLAVSLPWLKASVPYYGGWPAAEEAANLAVPLQIHLASDDPRVNEGWVPYEAALKAAGKAYELHWYDGTQHGFHNDTTPRFNPEAAALAWSRTLDFFGKHLRGS

SEQ ID NO: 41963 - DNA, 888 bp, Rhizobium leguminosarum bv. viciae 3841
  CDS (1)..(888): transl_table=11
atgacccgtatgacagccaaggatttccctcaggaacttctcgaactctacgattattacgcgcacgggaaaattaccaagcgcgagtttctcgaccgggccggcaaattcgccgtcggcggcgttacggcagctgccattctttcatcgctgagccccgactatgcactggcgacccaggtcgagttcaccgatccggatatatcggccgaatacatcacctatccctcgccaaagggaaatggcgatgtccgcggctatctcgttcgccccaaaaacgcgaccggcaaagtcgcggccgtggtggtcgttcatgagaacaggggcctgaacccctatatcgaggatgtggcgcggcgcgtggcgaaggcgggcttcatcgcccttgcgccggatggcctgacatccgtcggaggttatcccggcaacgacgaaaagggacgggaactccagcagaaggtcgaccccgaaaagctgatgaacgacttcttcgcggcggtcgaatttttgatgcaaagcgatctcaccaccggcaaggtcggcatcaccggcttctgctacggcggcggcgtctccaacgccgcggcggtcgcctatccggagcttgccgcagccgtgcccttctacggccggcagccacgcgccgaagacgtaccgaagatcaaggcgccgctgcttctccattatgccgggctggacaaggggatcaacgaaggctggccggcctatgaagctgcgctgaaatcagccggaaaaacattcgaggcctacgtctatcctgacgtcaatcacggctttcacaatgattccacaccccgctacgacgaagcggctgccaagctcgcctggcagcggacggtcgactggtttacgaaatacctcgcctga

SEQ ID NO: 41964 - protein, 295 aa, Rhizobium leguminosarum bv. viciae 3841
MTRMTAKDFPQELLELYDYYAHGKITKREFLDRAGKFAVGGVTAAAILSSLSPDYALATQVEFTDPDISAEYITYPSPKGNGDVRGYLVRPKNATGKVAAVVVVHENRGLNPYIEDVARRVAKAGFIALAPDGLTSVGGYPGNDEKGRELQQKVDPEKLMNDFFAAVEFLMQSDLTTGKVGITGFCYGGGVSNAAAVAYPELAAAVPFYGRQPRAEDVPKIKAPLLLHYAGLDKGINEGWPAYEAALKSAGKTFEAYVYPDVNHGFHNDSTPRYDEAAAKLAWQRTVDWFTKYLA

SEQ ID NO: 41965 - DNA, 1242 bp, Pseudomonas aeruginosa UCBPP-PA14
  CDS (1)..(1242): transl_table=11
atgggacagtacgtcagcatcgccgcgtccgacggcagcggccggttcgacgcgtatctcgcgctccccgccagcggcaaggggccgggcgtggtgatcggtcaggaaatcttcggcgtcaacgcgaacatgcgcgcggtggccgacctgtacgccgaagagggctacgtggccctggtccccgacctgttctggcggctccagccgggggtcgacctgggctacgacgaagcggccttcgccaaggccatcgagctgttccagcgcatcgacctggacgccgcggtggacgacatcgccgcctgtatcgagcacctgcgccaacgcgaggaggtggtccacgccgggatcggcttcgtcggcttctgcatgggcggcaagctggcctacctcgccgcgacgcgcaccgacgtctcctgctcggtgggctactatggcatgggcatcgaggcgctgctcgacgaggcgaaacagatcaagggccggctggtgctgcatttcgccgaacaggacgcctactgcccgcagcaggcccgcgacgcgatcctgccctgcctgcgcaacctgcccaagaccgagttgtacctctaccccggcgtcgatcacgccttcgcccgcgtcggcggcatgcacttcgacaaaccggcctacctgatggcccacgaacgcagcatcgccgccctgaagcgggagatcgggccgaacttcgacctctccgcgctgtgggacgagcatgtgcgccacgagttcgatacccgcgacgtcgccgcgaccatggcgaccatggtcgccgagccctacgtcaaccatgtcccgaccctcaccggcggcgtcggccagcgcgaactgagccgcttctaccgccatcacttcatccacggcaacccgccggacatgaccctcacgccgatttcgcggacggtgggggcgctgcaggtggtcgacgagttcgtcatgcgcttcacccacagctgcgagatcgactggctgctgcccggcgtcccgcccaccgggcgcttcgtggaaatccccatgctcggcgtggtgcgctttcgcggcgaccgcctttaccacgagcacatctattgggaccaggccggcgtgctggtgcagatcggcctgctcgacccgcagggcctgccggtcgcgggggtggaaagcgcgcgcaagctgctcgacgaaagcctgccgtcgaaccgcctgatggcgcgctgggcagccagcgaaggactcggcctctag

SEQ ID NO: 41966 - protein, 413 aa, Pseudomonas aeruginosa UCBPP-PA14
MGQYVSIAASDGSGRFDAYLALPASGKGPGVVIGQEIFGVNANMRAVADLYAEEGYVALVPDLFWRLQPGVDLGYDEAAFAKAIELFQRIDLDAAVDDIAACIEHLRQREEVVHAGIGFVGFCMGGKLAYLAATRTDVSCSVGYYGMGIEALLDEAKQIKGRLVLHFAEQDAYCPQQARDAILPCLRNLPKTELYLYPGVDHAFARVGGMHFDKPAYLMAHERSIAALKREIGPNFDLSALWDEHVRHEFDTRDVAATMATMVAEPYVNHVPTLTGGVGQRELSRFYRHHFIHGNPPDMTLTPISRTVGALQVVDEFVMRFTHSCEIDWLLPGVPPTGRFVEIPMLGVVRFRGDRLYHEHIYWDQAGVLVQIGLLDPQGLPVAGVESARKLLDESLPSNRLMARWAASEGLGL

SEQ ID NO: 41967 - DNA, 894 bp, Solibacter usitatus Ellin6076
  CDS (1)..(894): transl_table=11
atggagcgaaagaaggcgtcggaatatccgcaggagttgttgaacctgttcgatcgatatgtgcacggcgaaatcgaccggcgcagttttctcgagggcgcgaagaagtttgccgtgggaggcgtgaccgccactgcgatctgggagagcctccgtcccaattatgcgtgggcgcagcaggtccctaaagacgatgcgcgcatcaagaccgagtatgtgacggtagattcgccgcaggggaacgggagcatcaagggctacctggtgcgcccggcgaaggccgcgggaaaactgccgggcgtactggtggtgcacgagaatcgcggcctgaatccgtacatcgaagatgtggcgcgccggttgggcactgcgaatttcatcgcgttcgcgccggatgggttgaccagcgtgggcggctatcccggcgacgatgaaaagggcggcgcggccttcggcaaggtggatcgtcccaagatgacggaggatttcatcgcggcggcgcggtggctgaaggctcgtccggattgctcgggcaagatcggcgtggtgggcttctgcttcggcggcggaattgcgaacacgctggcggtgcgcatgggcgcggacctcaatgccgcggtcgcgttctatggcgggcagcctccggcggccgacgtggcgaagatcaaagctcctgtgatgctgcattacgggtctctggatacgcggttgacaggcgggtggccggcgtacgaagaggctctgaaggcgaaccaggttacctacgaggggtttgtttacgagggcgccaatcatggattccacaacgacaccacgccgcgcttcgatgagaaggcggcgaagcaggcgtgggaccggacgctggcgtttttcaataaatatttgagagggtag

SEQ ID NO: 41968 - protein, 297 aa, Solibacter usitatus Ellin6076
MERKKASEYPQELLNLFDRYVHGEIDRRSFLEGAKKFAVGGVTATAIWESLRPNYAWAQQVPKDDARIKTEYVTVDSPQGNGSIKGYLVRPAKAAGKLPGVLVVHENRGLNPYIEDVARRLGTANFIAFAPDGLTSVGGYPGDDEKGGAAFGKVDRPKMTEDFIAAARWLKARPDCSGKIGVVGFCFGGGIANTLAVRMGADLNAAVAFYGGQPPAADVAKIKAPVMLHYGSLDTRLTGGWPAYEEALKANQVTYEGFVYEGANHGFHNDTTPRFDEKAAKQAWDRTLAFFNKYLRG

SEQ ID NO: 41969 - DNA, 963 bp, Shewanella sp. ANA-3
  CDS (1)..(963): transl_table=11
atgagcccacaacccaagtccgacaataacgcgccagctgcccagcctatcccgcaggaggccttcgattggtacgatgaatatgcccacggcatcatcgaccgccgcgaatttatggctcgcctcgcaggccttgtggcactggggtttaccatgacaacgcttactggcgcactcatgcccaactatgccttagccgagcaagtctcctttaacgatcccagcattcaagccagttatgtgaagtttccctcccccgagggctatggtgaagggcgcggttatttagtgatgccagcttctatgctgattcccggcaaagaggctggcgattctaagaccctggaccccactaaaaaagcccctgtggtgttagtggtgcatgaaaaccgtggcctgaatccttatatcgaagatgttgcccgccgcttagcggccaagggctatatcgcctttgcccccgatgcgctttacagcctcggcggctatcccggcaatgacgatgcgggccgcgccatgcaagccagcctcgacagagccaaaatcgagcaggactttatcgccgcagcccgctttttaaaggcccacccccagagtaatggcaaactcggcgccgtcggtttctgctttggcggctatatagtcaatatgctcgccgccagcattcccgatgagctagctgctggcgtgcctttttatggcacgcctgcagccacagagctacgcagccgagttgaaggcccgctgatgttgcaatttgccgctttagatcaacggattaacgacacttggggcgagtacgaaacccaattgaaggctaacaaggccgagtatattgcctacctctatcccaatgtgaatcatggttttcataatgattccaccgcccgctacgatgagccaaccgccgagctcgcatgggcaagaaccttggatttttttgggaagtacctacaaggttag

SEQ ID NO: 41970 - protein, 320 aa, Shewanella sp. ANA-3
MSPQPKSDNNAPAAQPIPQEAFDWYDEYAHGIIDRREFMARLAGLVALGFTMTTLTGALMPNYALAEQVSFNDPSIQASYVKFPSPEGYGEGRGYLVMPASMLIPGKEAGDSKTLDPTKKAPVVLVVHENRGLNPYIEDVARRLAAKGYIAFAPDALYSLGGYPGNDDAGRAMQASLDRAKIEQDFIAAARFLKAHPQSNGKLGAVGFCFGGYIVNMLAASIPDELAAGVPFYGTPAATELRSRVEGPLMLQFAALDQRINDTWGEYETQLKANKAEYIAYLYPNVNHGFHNDSTARYDEPTAELAWARTLDFFGKYLQG

SEQ ID NO: 41971 - DNA, 738 bp, Shewanella sp. ANA-3
  CDS (1)..(738): transl_table=11
atgttagtgactcagcaaactcagaatatcaacacgcccacagggccgatgcgcacttatgtctatcgcccagatgccccagggcaattcccctgcatcctgttctattctgagatttttcagcaaaccgcgcccatcgcccgcaccgcaactatcctcgctggccatggttttgtggtgttagtgccagaggtcttccacgagctaaatccgataggcacagtgcttgcctacgacgatgtgggcaaagataaaggcaatgccgataaatttgccaaacccttagagcaacacgatagcgacacccaagcccttatcgactttgctcgtcagcagagttattgcaccggtaaggttggcagtatgggcgtgtgtattggcggccacttagcctaccgcgccgcacttaatcccgagattttgggggcgttttgcctctatccgaccgacattcactccaataccctgccctgtgcctatggcaatgactcgctgagtcgcagcggcgatattcaaggggaattagtgttagtgtttggcaagcaagatccccatgtatcacccgaaggtcgggtattgatccaccaacaattgatggctaaaaaccgcaatttcagttggttagaggttaatgctcagcatgcctttatgcgtgatgagggtgagcgctacgatcccgcgctggcgctgcaaatgtatcaacaatccgtggcgttttttcaccgtgtattgagatga

SEQ ID NO: 41972 - protein, 245 aa, Shewanella sp. ANA-3
MLVTQQTQNINTPTGPMRTYVYRPDAPGQFPCILFYSEIFQQTAPIARTATILAGHGFVVLVPEVFHELNPIGTVLAYDDVGKDKGNADKFAKPLEQHDSDTQALIDFARQQSYCTGKVGSMGVCIGGHLAYRAALNPEILGAFCLYPTDIHSNTLPCAYGNDSLSRSGDIQGELVLVFGKQDPHVSPEGRVLIHQQLMAKNRNFSWLEVNAQHAFMRDEGERYDPALALQMYQQSVAFFHRVLR

SEQ ID NO: 41973 - DNA, 711 bp, Mycobacterium smegmatis str. MC2 155
  CDS (1)..(711): transl_table=11
gtgacgatcaccatcagcacccccgacgggccgatcgacgctctgctgagcacaccgaccggatcgggaccgtggccgggcgtcgtgatcatccacgacgcgatcggatacggccccgacaacgagttggtctccgaacgcgtcgcgcaggccggctacctcgcgatcaccccgaacctgtactcacgcggcggccgtgcccggtgcatcacccggatgttccgggatctgctcacccagcgtggccgcgcgctcgacgacatcctcgccgcgcgcgatcacctcaagtcgctgcccgaatgcaccggcaccgtcggcgtcgtcggcttctgctcgggcggccagtttgcactcatcatgggccccaagggttttgccgcatccgcgccgttctacggcacaccgctcccccgtcacctcgaccggacgctcgacgcgtcgtgccccatcgtcgcgagcttcggacgccgcgacccactcggcatcggtgcgccggcgcggctgcggcgggtcgtcgaggccaagaacatcccggccgacatcaaggtgtacccgtcggccgggcacagcttcgccaacatcctgcccgcgcagcccctgctgcgcgtcactggtttcggctacgacgaggccgccaccaccgacgcctggacgcgcgtgttcgcgttcttcgacgagcatctcaagccgaagaccgcaggccaggcgtag

SEQ ID NO: 41974 - protein, 236 aa, Mycobacterium smegmatis str. MC2 155
MTITISTPDGPIDALLSTPTGSGPWPGVVIIHDAIGYGPDNELVSERVAQAGYLAITPNLYSRGGRARCITRMFRDLLTQRGRALDDILAARDHLKSLPECTGTVGVVGFCSGGQFALIMGPKGFAASAPFYGTPLPRHLDRTLDASCPIVASFGRRDPLGIGAPARLRRVVEAKNIPADIKVYPSAGHSFANILPAQPLLRVTGFGYDEAATTDAWTRVFAFFDEHLKPKTAGQA

SEQ ID NO: 41975 - DNA, 936 bp, Mycobacterium smegmatis str. MC2 155
  CDS (1)..(936): transl_table=11
gtgactccgctgcagcgatacatcgcagaagaaatcgccaccgatcacctcgacggactgatgtcacggcgcgaagcactgcgcaggctcggcctgctcggactgagcacggccgcggccaccgccgtcatcgccgcgtgcagtgaacgcgaacagaccacgacggccacgaccgagaacaccaccgacaccgcaggtccgccgacaaccgagacgcaaccgccgtcggcggaaccgccgggcatgcagactgcgctgcccaccgcggcggtgacgtgggccggaccgaccggtgaactgcagggcgcatgggccgaggcccccgacgcccgcggcgctgtgctcgtgatccacgagaacaagggactcaccgaccacatccgctcggtggcaggccgcttcgccggcatcgggtactcggcgctggcgatcgatctgctctcggggcagggcggcacgggacagttcgccgacccggccgatgccaccgccgcgttgagcaagatcccgccggaggagtttgtcgccaacctgcggtccgggatcgacgaattgtcccgtcgcgcgcccgaccgcaagctcgccgcggtcggcttctgcatgggcggcggactcgtatggcgcctgctcgccgcgggcacaccgcaattggccgccgccgtaccgttctacggtccgaccccggacgacccggacttcgccggttcgaaggacgtcgcggtgctcgcgttctacggtgcgctcgaccagcgggtcaacgccaccgaaccggtcgcgcgggcggcgctggagaaggccggcctggtgcacgaactggtcaccgaacccggtgccaatcacgcgttcttcaacgacaccggcgaccgttacgacccgacggccgcggccgacgcgtggcgacgcatccaggagtggttcaccgcgcacctcgcctga

SEQ ID NO: 41976 - protein, 311 aa, Mycobacterium smegmatis str. MC2 155
MTPLQRYIAEEIATDHLDGLMSRREALRRLGLLGLSTAAATAVIAACSEREQTTTATTENTTDTAGPPTTETQPPSAEPPGMQTALPTAAVTWAGPTGELQGAWAEAPDARGAVLVIHENKGLTDHIRSVAGRFAGIGYSALAIDLLSGQGGTGQFADPADATAALSKIPPEEFVANLRSGIDELSRRAPDRKLAAVGFCMGGGLVWRLLAAGTPQLAAAVPFYGPTPDDPDFAGSKDVAVLAFYGALDQRVNATEPVARAALEKAGLVHELVTEPGANHAFFNDTGDRYDPTAAADAWRRIQEWFTAHLA

SEQ ID NO: 41977 - DNA, 1005 bp, Azoarcus sp. BH72
  CDS (1)..(1005): transl_table=11
atgacccagaccgtcccgtccgccgttcccaccgccgctaccgcggagatcgacagcgccggcgccatctttgccggctcggtgctcggcgcgccgcccgcgcccggccagaccgccgccgatttcgcaccggaggtgctgagcctgttcgacaagtatgtgcacggcgtcatcccgcgccgcgagttcctgcgctccgcggccaagtacgcggtagccgggctcaccgccgaaggcctgctcaacgcgctcgcgccgcgctttgccgaggcgcagttcatcgatcacgacgacgctcgcatcagcgcgggctacgtcgagcatccctcgcccaagggctacggcacggtgaagggctatctggcccgtcccgccaggaccgccggccgtgcgcccacggtgctggtagtgcatgagaaccgcggcctcaacccgcacatcgaggacatcgcccgccgccttgccgtggatggcttcatcgccttcgcgccggacgcgctccacccgctcggcggctatcccggcgacgaggacaaggcgcgcgaactctttcccaagctcgaccaggccaagacgcgcgaggacttcatcgccgccgccggctacctgcgcgcgctgccgcagggcaacggcaaggtcggcgtggtgggcttctgctacggcggcggcgttgccaacttcctcgccacgcggattcccgatctggccgcggcggtgcccttctacggtggccagccgaccgcagaggaagctgcccgcatcaaggcgccgctgctgatccactacgccggcaacgacgagcgcatcaacgccggctggcccgcctacgaggccgcgctgaaagccgcgcgcgtgcgctacgagacgcacttctatcccggcgcccagcacggcttcaacaacaacaccacgccgcgcttcgatgccaccgcggcctcgctggcgtggcagcgcacgatcgcgttcttccgccagcacctcgccgacggggcgagggacgcctga

SEQ ID NO: 41978 - protein, 334 aa, Azoarcus sp. BH72
MTQTVPSAVPTAATAEIDSAGAIFAGSVLGAPPAPGQTAADFAPEVLSLFDKYVHGVIPRREFLRSAAKYAVAGLTAEGLLNALAPRFAEAQFIDHDDARISAGYVEHPSPKGYGTVKGYLARPARTAGRAPTVLVVHENRGLNPHIEDIARRLAVDGFIAFAPDALHPLGGYPGDEDKARELFPKLDQAKTREDFIAAAGYLRALPQGNGKVGVVGFCYGGGVANFLATRIPDLAAAVPFYGGQPTAEEAARIKAPLLIHYAGNDERINAGWPAYEAALKAARVRYETHFYPGAQHGFNNNTTPRFDATAASLAWQRTIAFFRQHLADGARDA

SEQ ID NO: 41979 - DNA, 819 bp, Azoarcus sp. BH72
  CDS (1)..(819): transl_table=11
atgacccgtcccgaccttgccgccttcgccaccgcgatccagcccgacgtggccgacaccgtccaacgtaccgatgacgccggccttgccactggcgacatccgcatccctgtgcccggcggcgaactgccggcctaccacgccgcccccgcgacgccggggccgcacccggtggtcctgctggtgcaggagatcttcggcgtgcatgagcacatccgcgacgtcgcccgccggctggcgaagctgggctacctggcggtggcgccggaactgttcttccgctccggcgaccccaagcgcgcgccgagcatggaagcgctgcgcagcgacttcgtcggccaggcggatgacgcccgggtggcggccgatctcgacgccgcgctggactgggcgctggcgcacggcggcgacgagaaccgggtgggcattaccggcttctgctggggcgggcgcgccacctggctgtacgccgcccaccagccgcgcctgaaggccgcggtggcctggtacggccggctgaccggcgagcgcaccgcgcgcaatccgcagcacccggccgatgtcgccgggcacctgcacgcgccggtgctcggcctctacggcggcgcggatacgctgattccgctcgcggccgtcgatgaactgcgcgccgcgctggccgccgcatccgacgggcgcgggcgggactccacggtgcatgtctatccggacgcgccgcacgccttctacgccgactatcgcgccagctaccgcgccgccgaggccgtcgacggctgggcacggatgcaggcgtggtttgcgcaacacggcgtggcctga

SEQ ID NO: 41980 - protein, 272 aa, Azoarcus sp. BH72
MTRPDLAAFATAIQPDVADTVQRTDDAGLATGDIRIPVPGGELPAYHAAPATPGPHPVVLLVQEIFGVHEHIRDVARRLAKLGYLAVAPELFFRSGDPKRAPSMEALRSDFVGQADDARVAADLDAALDWALAHGGDENRVGITGFCWGGRATWLYAAHQPRLKAAVAWYGRLTGERTARNPQHPADVAGHLHAPVLGLYGGADTLIPLAAVDELRAALAAASDGRGRDSTVHVYPDAPHAFYADYRASYRAAEAVDGWARMQAWFAQHGVA

SEQ ID NO: 41981 - DNA, 741 bp, Nostoc punctiforme PCC 73102
  CDS (1)..(741): transl_table=11
atggcagagcaagcaataattaccacaacggttaatcttttgcaagataatattcaagtgtcagcatatctggcagaaccaaaagaacctggatcttacccaggaatcgtggtcttacaagagatttttggtgtcaacgttcacattcgggatgttacagaacggattgccaaacttgggtatgtagcgatcgcacctgcactttttcaacgcactgctcctggctttgaaaccggatacacacccgaagatattgaaacgggcagaggctatgccatgcaaactcaagcctcagagttattgagcgatattcaattagcaattgactacctcaaaaatctgccccaagtaaaaaaagatagttttggctgtattggcttttgctttggcggtcatgtcgcatatcttgcagccactttaccagatattaaagctacggcttccttctacggtgctggaattaccacccgcacgccaggaggtggtcctcccactgttacccgcaccagagagattccaggcactctctatgccttctttggtaaagaagatgctagcatcccacccgaacaagtagatgagattgaagcagagttagaaaaatataaaattcctcatcgtgtgtttcgctacgatggagctgatcacggatttttctgtgaccttcgtgccagttataatcctaaagctgctgctgatgcttgggagcaagccaaacaactctttagtcaactgaactag

SEQ ID NO: 41982 - protein, 246 aa, Nostoc punctiforme PCC 73102
MAEQAIITTTVNLLQDNIQVSAYLAEPKEPGSYPGIVVLQEIFGVNVHIRDVTERIAKLGYVAIAPALFQRTAPGFETGYTPEDIETGRGYAMQTQASELLSDIQLAIDYLKNLPQVKKDSFGCIGFCFGGHVAYLAATLPDIKATASFYGAGITTRTPGGGPPTVTRTREIPGTLYAFFGKEDASIPPEQVDEIEAELEKYKIPHRVFRYDGADHGFFCDLRASYNPKAAADAWEQAKQLFSQLN

SEQ ID NO: 41983 - DNA, 777 bp, Nostoc punctiforme PCC 73102
  CDS (1)..(777): transl_table=11
atgacaaacacagaaattcgcaccactcaagttaaagtccctaacggggatttgcaaatcgatgcttacttagcggaaccggcacaaaaaggaaccttcccagccgttatcgtgattcaggaaatttttggggttaacattcacattcgagaagttgctgagaaatttgccaaagaaggctatgttgcgatgtctacgacgggctacgcctacgcaccgactttatttcaacgcactgctcctggttttgagggtggatacacccctgaagatgtccagcaaggaagagggtataaggaacagacaacagccgaggaaatattgagtgatattaaggctgcgatcgcttatttaaaaaacttaccaaatgtgcaaggagatgcgatcggctctattggtttctgctttggtggtcacgtagtttatctagctgccactttaccagatattaaagttacagcttccttctatggtggcggtattcccaactcaactcccggcggtggagaaccaaccatcacccgcactcctgatatcaagggtcccatttacgccttctttggccttgacgatcaaggaattccgttagagcaaacggaacagattgaggctgaattgaagaaaaatcagattacccatgctatatttcgctattctggtgcaggacatggctttttctgcaaccatcgctctagctacaatgccgaagctgctgccgatgcttggaaaaacgttcaagaacttttccaaaagaaccttcagcttcaaaaagtttaa

SEQ ID NO: 41984 - protein, 258 aa, Nostoc punctiforme PCC 73102
MTNTEIRTTQVKVPNGDLQIDAYLAEPAQKGTFPAVIVIQEIFGVNIHIREVAEKFAKEGYVAMSTTGYAYAPTLFQRTAPGFEGGYTPEDVQQGRGYKEQTTAEEILSDIKAAIAYLKNLPNVQGDAIGSIGFCFGGHVVYLAATLPDIKVTASFYGGGIPNSTPGGGEPTITRTPDIKGPIYAFFGLDDQGIPLEQTEQIEAELKKNQITHAIFRYSGAGHGFFCNHRSSYNAEAAADAWKNVQELFQKNLQLQKV

SEQ ID NO: 41985 - DNA, 864 bp, Magnetospirillum magnetotacticum MS-1
  CDS (1)..(864): transl_table=11
atgaaagacgacctcaagagtctcagccccaagatcgacatgacccggcgcggcttcgtgtcggcggccgtgctggccaccggctatgccctggcggtcagtcccgctgccgccggcgccatcagtaccgatacccagggtcttagcgccggggcggtgatgatccccacctcgggcggtcattccatgccagcctattccgccatgcctgcgggcaaagggccatttcccactattctggtgatccaggagatcttcggggtccacgagcatatcagggacgtctgccgccgcttcgccaagctgggctatctggccgtggcacccgagctgtatttccgccagggcgatccttcagtcctgaccgatattcccaccattttgtcgaccatcgtggccaaggtgcccgatgcccaggttttggccgatctggatgcctgcgccgcctgggcgcaagccaatggcggcgatgccgagcggctggccgtcaccggcttttgctggggtggccgtgccacctggctgtatgccgcccataatcccaagctgaaggcggcggtggcctggtatggcaagctggctggcgctccgactccggaaacgccgaagcagcccctggatttggccgccgatctctacgcgccggtgctgggactttatggcggcgccgatcagggtattccccttgataccgtcgagaaaatgaaggcggcggtgaagacggcgcgggtcaaggtggagttcgtggtctatcccgacacgccccacgccttccatgccgattaccgcccttcctaccgtgaggcgcaggccaaggacggctggtccaaggctttggcctggtttaaggcgaacggagtttaa

SEQ ID NO: 41986 - protein, 287 aa, Magnetospirillum magnetotacticum MS-1
MKDDLKSLSPKIDMTRRGFVSAAVLATGYALAVSPAAAGAISTDTQGLSAGAVMIPTSGGHSMPAYSAMPAGKGPFPTILVIQEIFGVHEHIRDVCRRFAKLGYLAVAPELYFRQGDPSVLTDIPTILSTIVAKVPDAQVLADLDACAAWAQANGGDAERLAVTGFCWGGRATWLYAAHNPKLKAAVAWYGKLAGAPTPETPKQPLDLAADLYAPVLGLYGGADQGIPLDTVEKMKAAVKTARVKVEFVVYPDTPHAFHADYRPSYREAQAKDGWSKALAWFKANGV

SEQ ID NO: 41987 - DNA, 831 bp, Burkholderia vietnamiensis G4
  CDS (1)..(831): transl_table=11
atgaataatcgagatcgaaacgatcgctgcgggagaagcggctgcggcgccctgcaccaccccccgattgatggcacactaggccgccctctcttacccgcggcgcgcaccgcgcgcccgctcgccaggagttcacacgtgacagcccaatggatcgacattccgaccggtagcgacagcttcggcggctacctcgcactccccaagcgcggcaccggccccgccgtcgtcatcatccaggagatcttcggcgtgaacgcgcacatccgcgcggtcgccgaccagtacgccgccgacggcttcgtcgcgctcgcgcccgacgtgttctggcgcacgcagccgcgcgtcgagctgacctacgacggcgccgatcgcgacaagggcatcgagctgatgaagaagaccgacatcggcctcgcggtagcggacatcggcgcggccgcggacgcattgcgcgcacgcgcggacgtcgccggcaaggtcgcggcgatcggctactgcttcggcggccagctcgcctaccgcgcggcggcggccggcacggtcgacgcggcggtcgcctattacggcggcggcatccagaatgcgctcgacctcgcggataaagtcacgcagccgatcctgttccactacgcggagaacgaccacgcgatcccgctcgacgcggtcgagcaggtgaaaggcgcgttcgcgggccgcggcaacgcctcgttccacgtgtaccccgacgcgagccacggcttcaactgcccggatcgcgcgtcgtaccatcagcgcgcgtcggcgctcgcgcacggccgcacgctgacgttcctcgccgaacagctgtag

SEQ ID NO: 41988 - protein, 276 aa, Burkholderia vietnamiensis G4
MNNRDRNDRCGRSGCGALHHPPIDGTLGRPLLPAARTARPLARSSHVTAQWIDIPTGSDSFGGYLALPKRGTGPAVVIIQEIFGVNAHIRAVADQYAADGFVALAPDVFWRTQPRVELTYDGADRDKGIELMKKTDIGLAVADIGAAADALRARADVAGKVAAIGYCFGGQLAYRAAAAGTVDAAVAYYGGGIQNALDLADKVTQPILFHYAENDHAIPLDAVEQVKGAFAGRGNASFHVYPDASHGFNCPDRASYHQRASALAHGRTLTFLAEQL

SEQ ID NO: 41989 - DNA, 1230 bp, Burkholderia vietnamiensis G4
  CDS (1)..(1230): transl_table=11
atgaaaggacgacacatcgaggttccgtcgccgcacggcggcacgtttcgcgcgtatctgagcacgccggcggccggcaaggggcccggtatcgtgttgtgccatgaaatcttcggcgcgaacgcgacgatgcgcgacgtggccgactattacgccgaagaaggctatacggtgctcgtgcccgatttgttctggcgtcaggcgccgggcatcgagctcggttacaccgcgccggacttcgagcgcgcgatggcgctgtaccgcgactacgacgaaaacgacggcgtcgacgacgtcgccgccgcgctggccgcgctgaccggccggccggagtgcacgggcaaggtcggcgtgctcggcttctgcctgggcggcaagctcgcctatctggccgcgtgccggctgccggacgtggcggccgcggtcagctattacggcgtcgggatcgagcacgcgctcgacgaggcggccggcgtgcgcggccggctcgtgctgcagatcgccgcccaggaccgcttctgcccgccggacgcgcaggcgcgcatcgccgcagcgctgagcggccgcgatggcgtcgaggtgtacgtgtatcccggcgtcgaccatgcgttcgcgcgcagcggcggcgatcacttcgacaaggcggccgccgtgatggcgcatcagcgcgcgatcgccgcgttccgtgcggcgctcggcccgcactacgatctgtccgcactgtgggaagaacacctgcgccacgaattcgacacgcgcaacgtcgacgcgacgatggccacgatggtcgcgcaaccgtacgtgaaccatatcccaacgctgaccggcggcgtcggccacgacgagctcaagcgcttctacacgcatcacttcgtgcatgcgaacccgcccgacacgacgattacgccgatctcgcgcacgatcggcgcgagccagatcgtcgacgaactgctgttctgcttcacccacaccaccgagatcgactggatgctgcccggcgtcacgccgaccggcaaacgcgtcgagattccgctcgtcgcgatcgtcaagttccgcggcaacaagctgtatcacgagcacatctactgggaccaggccagcgtgctcgtgcagatcggcttgctggacgcggccgggctgccggtcgccggcgtcgagacggcgcgcaagctgctcgacgaaacggtgccgtcgaaccggctgatgcagcactggcgcgacagcgcgtaa

SEQ ID NO: 41990 - protein, 409 aa, Burkholderia vietnamiensis G4
MKGRHIEVPSPHGGTFRAYLSTPAAGKGPGIVLCHEIFGANATMRDVADYYAEEGYTVLVPDLFWRQAPGIELGYTAPDFERAMALYRDYDENDGVDDVAAALAALTGRPECTGKVGVLGFCLGGKLAYLAACRLPDVAAAVSYYGVGIEHALDEAAGVRGRLVLQIAAQDRFCPPDAQARIAAALSGRDGVEVYVYPGVDHAFARSGGDHFDKAAAVMAHQRAIAAFRAALGPHYDLSALWEEHLRHEFDTRNVDATMATMVAQPYVNHIPTLTGGVGHDELKRFYTHHFVHANPPDTTITPISRTIGASQIVDELLFCFTHTTEIDWMLPGVTPTGKRVEIPLVAIVKFRGNKLYHEHIYWDQASVLVQIGLLDAAGLPVAGVETARKLLDETVPSNRLMQHWRDSA

SEQ ID NO: 41991 - DNA, 891 bp, Crocosphaera watsonii WH 8501
  CDS (1)..(891): transl_table=11
atgttatctatgcgtttatttattgccctggtgttaggaacttttttagtggtaatggggtggcaatcaaatctgtttgctacggagacacagttacctcctcgagataattatgcagactatatgtggcaagttcatcaaaatgagcgaccccttcctacggatattttaacgcaagcaccaacggaagatgatggcatgagcgcagagatggtaagctatgggactttagaaggagaagcgatcgccggttatctggcctctcccaaagatagcgatcgccccttacctgggattattgtcatccacgaatggtggggactaaatgataatatcaaagccatgacccgtaaaattgcagaacagggttatacagccttagcagtagatatgtatgggggagaaacagcccaaacccctgagaaagccagagaattagtcaccgaagccagaaataatcgcgatcgcctccaagagaatcttatcttagcctatgagtatttagaactagaaacaaacgccccaaccatagcttctattggatggtgtttcgggggtagtttatccttgcgaaccgccttattattccctaaaaccctagatgctgcggttatttattatgggggagagttggaaacagagccagaggtactaaaacccctagaaatgccaattttagggattttcggggagttagataaacggccatctcctgaaaccgttaaagagtttgaaacggctttgcagtctcttaacaaagaagttgacgtttatatttatcccaacgccgatcacgctttcgctaacccatcaggggaacgttataacccagaagcagcagccgatgcttgggaaaaaacccgagaatttttctctgaatatctgaaatga

SEQ ID NO: 41992 - protein, 296 aa, Crocosphaera watsonii WH 8501
MLSMRLFIALVLGTFLVVMGWQSNLFATETQLPPRDNYADYMWQVHQNERPLPTDILTQAPTEDDGMSAEMVSYGTLEGEAIAGYLASPKDSDRPLPGIIVIHEWWGLNDNIKAMTRKIAEQGYTALAVDMYGGETAQTPEKARELVTEARNNRDRLQENLILAYEYLELETNAPTIASIGWCFGGSLSLRTALLFPKTLDAAVIYYGGELETEPEVLKPLEMPILGIFGELDKRPSPETVKEFETALQSLNKEVDVYIYPNADHAFANPSGERYNPEAAADAWEKTREFFSEYLK

SEQ ID NO: 41993 - DNA, 783 bp, Crocosphaera watsonii WH 8501
  CDS (1)..(783): transl_table=11
ttggaggttaaacaaaacaatctcaaactaaaaatgacacagttaaatattacaaccgaaacccctgttatcaagaatggtgatttaagtattgatagttatcttgcgatgccagaaaaagagggtatctttcctggagtgatcgttattcaagaaatttttggggttaacgagcatattagggatgttactaggcgttttgctcaacaaggatatgttgccattgcccctgctatatatcaacgccttgcccctggatttgaaactggttatactgcggaggccattgatattggtaaaaggtacaaaaatcaaaccaaggcggacgaattactatcagatatccaagcaaccattgactatctttataccttgcctcaagtgaaaaaaaatggggtagggactatcggtttttgttttgggggtcatgttgtttatttggtctctaccttaccagaaattaaggccagtgcctcattttatggtgcaggaattgttaattggaaaccaggagaagacggaaaagccactgtggagtctacccccaatattaaaggaaaattatacgctttctttggtgtggaggatgctagtattcctgaagaacaagttgataccattgaaaaagctttacaagataataatattcctcatcaagtctttcgctatcaaggggcagaacatgggtttttctgtgatcaacgaggtagttataacccagaagcttcccaggatgcttggccaaaagtcttagaattattcaagactgaattactcggataa

SEQ ID NO: 41994 - protein, 260 aa, Crocosphaera watsonii WH 8501
MEVKQNNLKLKMTQLNITTETPVIKNGDLSIDSYLAMPEKEGIFPGVIVIQEIFGVNEHIRDVTRRFAQQGYVAIAPAIYQRLAPGFETGYTAEAIDIGKRYKNQTKADELLSDIQATIDYLYTLPQVKKNGVGTIGFCFGGHVVYLVSTLPEIKASASFYGAGIVNWKPGEDGKATVESTPNIKGKLYAFFGVEDASIPEEQVDTIEKALQDNNIPHQVFRYQGAEHGFFCDQRGSYNPEASQDAWPKVLELFKTELLG

SEQ ID NO: 41995 - DNA, 1242 bp, Kineococcus radiotolerans SRS30216
  CDS (1)..(1242): transl_table=11
gtgcggccgtccccgacggcggaccgagccggtcccccagctccaggcagatgcgctgggcggtcttcttgccgatgccgggcacccgcaccagcgcggcgtggtcctcggcggccactgcggcgcggatgccgtcggggcggtgcacggcgagcatggccagcgccatcctcgggcccacccccgaagcggtctggacgatctcgaagacctccttctcgtccgcgtcggcgaagccgaacagcgtcagcgagtcctcgcgcaccacgagggtggtgtgcagcagcgcctcctgcccgacccgcagcccggccagcgtcgccggggcggccaggacgagcatcccgacgccgccgacctccacgaccgccgagtccagccgcaccgcgagcacctgcccgcgcaccgacgcgatcacacgaccctccacccacgcacgacgaacactcgttcgagaggctagacggcaccccggacacgacccccgcaggcgcgccgcacgggctgcgggtgcagagtgcggacgtgacccacgaacagcacgagaaccccctccagaacgtcaccttcgacgcccccggcaccgagaccggccacgcccacggctacctgcgcgtccccggctccggcaccgggcccggcgtcgtcgtcgtgcaggagtggtggggcctgaccgaccaggtcgccggtgtcgtggaccgcctggccgccgagggcttcgtcgccctggcccccgacctctacggcgggcgcaccacccacgactccgaggaggcgttccggttcatgcaggagctgccgcccgagcgcgccgcccgcgacctcgccggcgccgtgacgtacctgctggagcgcccggagaccacctcggccgcggtcggggccgtcggcttctgcatgggcggcgcgttcgtcctggccctggccgcccagcagggcgagcggatcgccgcggccgtgccctggtacgggatcccgggcgcggacaccgactactcggggctgcgggcggcggtcctgggccactacggcgaggaggacacctcggtgccgctggagggcgtgcaggccaccgaggcgcggatccgggagcaggccggcgtcgaggtgacgatggaggtctacccggccccgcacgccttctacaacgacgagcggcccaactaccgggcggagtccgccgagctggcctggggccgcacgacggccttcctgcgcgggcgcttggccccccgggcctga

SEQ ID NO: 41996 - protein, 413 aa, Kineococcus radiotolerans SRS30216
MRPSPTADRAGPPAPGRCAGRSSCRCRAPAPARRGPRRPLRRGCRRGGARRAWPAPSSGPPPKRSGRSRRPPSRPRRRSRTASASPRAPRGWCAAAPPARPAARPASPGRPGRASRRRRPPRPPSPAAPRAPARAPTRSHDPPPTHDEHSFERLDGTPDTTPAGAPHGLRVQSADVTHEQHENPLQNVTFDAPGTETGHAHGYLRVPGSGTGPGVVVVQEWWGLTDQVAGVVDRLAAEGFVALAPDLYGGRTTHDSEEAFRFMQELPPERAARDLAGAVTYLLERPETTSAAVGAVGFCMGGAFVLALAAQQGERIAAAVPWYGIPGADTDYSGLRAAVLGHYGEEDTSVPLEGVQATEARIREQAGVEVTMEVYPAPHAFYNDERPNYRAESAELAWGRTTAFLRGRLAPRA

SEQ ID NO: 41997 - DNA, 744 bp, Erythrobacter sp. NAP1
  CDS (1)..(744): transl_table=11
ttgatccacgctgaaagcatcatgattcgagaggataaccaagccatgtcagacacagtttcgatctcgaccctggacaaaagcaaaagcttcaatgcctacgtggcgaggcccgagggaacaccacgggcagcaatcgtcgtcattcaggagatcttcggcgtaaacaccggcatccgccagaaatgcgacaagctggccaacgaaggctatctcgcgatcgcgccagaccttttctggcgccttgcgcctggaatcgagctagactcggacgttgaacctgaatttcaggaggctctgggtcacatgaacaattttgaccaggacgcaggcatcaaagacattcaggcgacaatcaaccatttgcgccaggcagaagctgtgcccaaggtcggctgcgtcggatattgtctgggcggtcggctcgcattcatgacagccgcacgcacggacgtcgatgcttccgtcgggtattacggtgttgggatcgatggattgcttagcgaaaaagaggcgatcgcagagcctctgatgctccatattccgaccgaggacggattcgtagataaggaaacacaggccgcgatgcatgaaggcctggacaaccaccccaaggcaacactgcacgactatgaaggtctcgaccacggatttgcgaccgagataggcaagcgccgtgacgaggaagccgcaaatctcgccgacagtcgtacgtccgcgttcttcaaagcacatctggcatga

SEQ ID NO: 41998 - protein, 247 aa, Erythrobacter sp. NAP1
MIHAESIMIREDNQAMSDTVSISTLDKSKSFNAYVARPEGTPRAAIVVIQEIFGVNTGIRQKCDKLANEGYLAIAPDLFWRLAPGIELDSDVEPEFQEALGHMNNFDQDAGIKDIQATINHLRQAEAVPKVGCVGYCLGGRLAFMTAARTDVDASVGYYGVGIDGLLSEKEAIAEPLMLHIPTEDGFVDKETQAAMHEGLDNHPKATLHDYEGLDHGFATEIGKRRDEEAANLADSRTSAFFKAHLA

SEQ ID NO: 41999 - DNA, 747 bp, Synechococcus sp. WH 7805
  CDS (1)..(747): transl_table=11
gtgcccttgcgctgctggtgggcacccacaggagtcgaaacaggtgcagttggtcgggttgcacgtaaccgtaacgaaactgagtcatatcaggagcgaaaacgtgctgttctcgttctgcccgaagtgtttggcgtcaacgcctgggtgaggtcggtggctgatcgcatcgccgctacgggagtgcctgctctggcgatgcctctgttcgcccgcacggctccagagctcgatctgagctatggcgagatgcaactggccgaaggccgtggtcacaagatcgccacgaccgcggctgcgcttctggccgatggaacggccgcgatcagttggctgcgcagacaactcaacgatcctcaggcggagatcactgtggtgggattttgtttcggagggcatgtggccctgctcatggcttccctgcctgaggtaaccagaaccttcgatttctatggtgccggtgtggtgcagggccgtccgggaggtggtgcgcccaccctggacagtctgccccaggtgcaaggggagctcacttgtctcttcggtttggacgatcctttgatccccaaggtggatcgggatgccatcgaatcagctctgcgccaggcggatccctccggtgagaggttgcgttgcgtcagctttcccgacgccgatcacggtttcatgtgtgatgcgcgcgctgcgtatcagccggaggctgctgcgcagggttggcaggtgctgctggaggcgctcaggcgttag

SEQ ID NO: 42000 - protein, 248 aa, Synechococcus sp. WH 7805
MPLRCWWAPTGVETGAVGRVARNRNETESYQERKRAVLVLPEVFGVNAWVRSVADRIAATGVPALAMPLFARTAPELDLSYGEMQLAEGRGHKIATTAAALLADGTAAISWLRRQLNDPQAEITVVGFCFGGHVALLMASLPEVTRTFDFYGAGVVQGRPGGGAPTLDSLPQVQGELTCLFGLDDPLIPKVDRDAIESALRQADPSGERLRCVSFPDADHGFMCDARAAYQPEAAAQGWQVLLEALRR

SEQ ID NO: 42001 - DNA, 891 bp, Pseudoalteromonas tunicata D2
  CDS (1)..(891): transl_table=11
atgacaacacctcagtttcaacaaatcccacaagaagcatttgattggtatgatgattatgcccatggcgccatggacagacgtacttttatgaaaaagcttggtacattaaccgcgttaggcttttccatggcggtattaaccagcgctttgcttccaaattatgttttggccgaacaagtctcatttaatgatcctgatattaaagccagttacgctgaatttgactcgccgctaggtcatggcaaaggtcgtggttatttagccgtgccgaccaataccacagcaaagctaccaagtgtattggtggtgcatgaaaatagagggctaaatccttacattaaagacgttgcaagacgcttagcaaaagcgggatttttagcctttgcaccagatgcactcttcccgcttggaggatatcctggcaatgatgatgacggtcgagcaatgcaaagcagcttggctcgcgaaaaaattcaattcgattttatcgctgccagccagtttttaaaaacgcacccgctaagttcaggtaagttgggcgtagtaggattttgttttgggggctacatggccaattacttagccgcatcagccaatgagttaattgatgccgcagtcccattttatggcacgccagcggcaaaagaattacgcaaaaatatcaaagcgcctttactgattcacttagctcaattagatactcgcgtaaatcaaacttggcccgaataccaagcagacctcgatagtctaggtattaaatacaccatgcatatgtaccaagccgctaatcatggttttcataacgactccacctctcgttatgataaagcccaagccgaacttgcatggcagcgcacactcgactttttcaaactgcacttagtttaa

SEQ ID NO: 42002 - protein, 296 aa, Pseudoalteromonas tunicata D2
MTTPQFQQIPQEAFDWYDDYAHGAMDRRTFMKKLGTLTALGFSMAVLTSALLPNYVLAEQVSFNDPDIKASYAEFDSPLGHGKGRGYLAVPTNTTAKLPSVLVVHENRGLNPYIKDVARRLAKAGFLAFAPDALFPLGGYPGNDDDGRAMQSSLAREKIQFDFIAASQFLKTHPLSSGKLGVVGFCFGGYMANYLAASANELIDAAVPFYGTPAAKELRKNIKAPLLIHLAQLDTRVNQTWPEYQADLDSLGIKYTMHMYQAANHGFHNDSTSRYDKAQAELAWQRTLDFFKLHLV

SEQ ID NO: 42003 - DNA, 918 bp, Vibrio sp. Ex25
  CDS (1)..(918): transl_table=11
atggttctaaagcactcaaattctaaaaacaaggcgtcacatcccattccacaagaagctttcgattggtatgacgaatacgcgcatggcaaaatctctcgccgagagtttctcaaccgtcttggtggcctcgctgttttaggttttagtatgacggccctagttgatgccctgactccaaattatgcgctcgcagagcaagtttcctttaatgatcctgagatcaaagcaacctatgaaacctttgcctcgcccaatggacatggggaaggtagcggctatttggttgtgccacaaaagaagaccttaaaatcgccgaccgtgttggtgattcatgaaaatcgaggtctaaacccatacatcaaagatgtcgccaggcgactcgcgaaagatggctttattgctttcgctcctgacgcgctttatccactcggcggctatccggggaacgatgatgaaggtcgcgccatgcagaaagagatggacagagccaagatcgaacaagattttattgctgctgctaatttcattaaacactacgagggtgggaacggtaaattgggcgcagttgggttctgcttcggtggatacatcgtcaatatgcttgcagcggtaatgccagaagagctggatgcaggtgtgcctttctacggaacaccagcggcgcaagagattcaaaagcaggtcaaagggccgttgatgattcacttcgcagggctcgataagcgcgtcaacgacacatggcctgcctatgagcagcaattgatcgcgaacgatgcgcaatatcaagcgttaatgtatgaaaacgtcaaccacggcttccataacgactcaacagcacgctacgcaccggaagaagcggcactcgcttgggagcgcacactcggcttcttcaaagaacatctcgcctctagttaa

SEQ ID NO: 42004 - protein, 305 aa, Vibrio sp. Ex25
MVLKHSNSKNKASHPIPQEAFDWYDEYAHGKISRREFLNRLGGLAVLGFSMTALVDALTPNYALAEQVSFNDPEIKATYETFASPNGHGEGSGYLVVPQKKTLKSPTVLVIHENRGLNPYIKDVARRLAKDGFIAFAPDALYPLGGYPGNDDEGRAMQKEMDRAKIEQDFIAAANFIKHYEGGNGKLGAVGFCFGGYIVNMLAAVMPEELDAGVPFYGTPAAQEIQKQVKGPLMIHFAGLDKRVNDTWPAYEQQLIANDAQYQALMYENVNHGFHNDSTARYAPEEAALAWERTLGFFKEHLASS

SEQ ID NO: 42005 - DNA, 891 bp, Alteromonadales bacterium TW-7
  CDS (1)..(891): transl_table=11
atgaattcacctcaaatagatcacattcctcaagaagcgtttgattggtacgacgaatatgcccatggtttaatggaccgtcgcacttttatgaaaaaactaggtggccttgcagcactgggaatttcaatgagtgtgctcaccagcgcgcttttacctaactacgcacttgcagagcaagtctcgtttaacgatgacgatattaaagccacctacgaggaatttgattcgccaaacgggcatggtaagggtaaaggttatttagcggtgcctagcaaaattgaaggtaaactgccggttgtattagttattcacgaaaaccgtggtttaaacccttacataaaagatgtagcaaggcgcttagccaaaaaaggctttattgcttttgcccccgacgcacttttcccgcttggtggctatccgggcaatgatgatgaggggcgtgcaatgcaacgcacaatggacagagctaaaattcaaaacgactttgtagccgccgctcactttttaaaagcccaccctagcagcaacggcaaattaggcgccgtaggcttttgttttgggggttatattgttaactacttagccgcagttgatagtgacttactcagcgcgggagtgcccttttatggcacacctgcaagtgaaagcttacacaaaaatataaaagcccctttactgattcaattaggtgaacttgataaacgcgttaacgccacatggcctgagtatgaaaaaagcttaaaagctaacaatgttgagtacactatgcacatgtacgaaggtgctaatcatggttttcataacgactctactgggcgttatgatgagcaaaaagcagagcttgcttggcagcgtaccttagcgttttttaatgaaaaattaagctaa

SEQ ID NO: 42006 - protein, 296 aa, Alteromonadales bacterium TW-7
MNSPQIDHIPQEAFDWYDEYAHGLMDRRTFMKKLGGLAALGISMSVLTSALLPNYALAEQVSFNDDDIKATYEEFDSPNGHGKGKGYLAVPSKIEGKLPVVLVIHENRGLNPYIKDVARRLAKKGFIAFAPDALFPLGGYPGNDDEGRAMQRTMDRAKIQNDFVAAAHFLKAHPSSNGKLGAVGFCFGGYIVNYLAAVDSDLLSAGVPFYGTPASESLHKNIKAPLLIQLGELDKRVNATWPEYEKSLKANNVEYTMHMYEGANHGFHNDSTGRYDEQKAELAWQRTLAFFNEKLS

SEQ ID NO: 42007 - DNA, 726 bp, marine gamma proteobacterium HTCC2143
  CDS (1)..(726): transl_table=11
atgatagaaactcacgttgatataacaacaaaagatggtgcgatgaatacttttattgcctgccctgaggaggatggtcccttccctatggtgatatttgccatggatgcgccgggtaagcgcgaggagttgcacgacatggccagacgcatcgctgccgttggttattatgtggtcctgcctaatttgtattatcggaaagtacgtgaatttcatatgtatatggaaggtgttactcgcgaaaaaatgtttgagcagatggatgccctgagcaacgatttattttgcgacgacgtgcaggcaatttttgatcatgttgatggcaacgaccgtgttgcaacggggccggtcggaattgttggttactgcatgagtggtccattcgctgttgccgcagctgggcgtttccctgatcgagttaaggtagcagcttcactgcacggcgtgcgtttgatcactgaagccgcggattcgccgcatttggcggcagaaaaaataaccggagagttgtatatcggctgtgccgaaacagactcttgggcgccccccgaaatgatcgaggccttagatgcacatctgaagacgacggcctgtaattatcgcattgagtggtatccaggtaccgagcatggatttgtctttccgcagcggggcgatatttataataagtcagcggccgagcgacattgggagcgtttgtttgccatgtttgcgcgcaatctataa

SEQ ID NO: 42008 - protein, 241 aa, marine gamma proteobacterium HTCC2143
MIETHVDITTKDGAMNTFIACPEEDGPFPMVIFAMDAPGKREELHDMARRIAAVGYYVVLPNLYYRKVREFHMYMEGVTREKMFEQMDALSNDLFCDDVQAIFDHVDGNDRVATGPVGIVGYCMSGPFAVAAAGRFPDRVKVAASLHGVRLITEAADSPHLAAEKITGELYIGCAETDSWAPPEMIEALDAHLKTTACNYRIEWYPGTEHGFVFPQRGDIYNKSAAERHWERLFAMFARNL

SEQ ID NO: 42009 - DNA, 816 bp, Escherichia coli B
  CDS (1)..(816): transl_table=11
atggcaacaacacaacaatctggatttgcacctgctgcatcgcctctcgcttcgaccatcgttcagaccccggacgacgcgattgtggcgggcttcacctctatcccttcacaaggggataacatgcctgcttaccatgccagaccaaagcaaagcgatggcccactgccagtggtcattgtagtgcaggaaatttttggcgtgcatgaacatatccgcgacatttgtcgccgtctggcgctggaggggtatctggctatcgcacctgaactttacttccgcgaaggcgatccgaatgattttgccgatatccccacgttgcttagcggtctggtagcaaaagtgcctgactcgcaggtgctggccgatctcgatcatgtcgccagttgggcttcccgcaacggcggcgatgttcatcgtttaatgatcaccggattctgctggggtggacgtatcacctggctgtatgccgcgcataatccacagctaaaagccgcagtggcgtggtacggcaaactgacgggcgacaagtcgctgaattcaccgaaacaacctgttgatatcgcaaccgatcttaacgcgccggttctcggcttatatggcggtctggataacagtattccgcaggagagcgttgaaaccatgcgccaggcgctgcgggctgctaatgcgaaagcagagattatcgtgtacccggatgccgggcatgcattcaatgctgattatcgcccgagctatcatgccgaatctgcgaaagatggctggcagcgtatgctggaatggtttaagcagtatggtgggaagaagtcgctgtaa

SEQ ID NO: 42010 - protein, 271 aa, Escherichia coli B
MATTQQSGFAPAASPLASTIVQTPDDAIVAGFTSIPSQGDNMPAYHARPKQSDGPLPVVIVVQEIFGVHEHIRDICRRLALEGYLAIAPELYFREGDPNDFADIPTLLSGLVAKVPDSQVLADLDHVASWASRNGGDVHRLMITGFCWGGRITWLYAAHNPQLKAAVAWYGKLTGDKSLNSPKQPVDIATDLNAPVLGLYGGLDNSIPQESVETMRQALRAANAKAEIIVYPDAGHAFNADYRPSYHAESAKDGWQRMLEWFKQYGGKKSL

SEQ ID NO: 42011 - DNA, 711 bp, Pseudomonas aeruginosa
  CDS (1)..(711): transl_table=11
atgttgactgaagggatatcgattcaatcgtatgacgggcatacattcggcgcgctcgtgggctcgccggccaaagcgcccgctcccgtgattgtgatcgctcaagaaatatttggtgtgaacgcgttcatgcgagaaacggtgtcatggctggtcgaccaggggtatgcggcagtttgccctgatctgtacgcgcgccaggcgccaggtacagcactcgatccgcaggatgaggcgcagagagagcaagcctacaagctctggcaggccttcgacatggaggccggcgtgggcgatctggaggctgctatccgctatgcgcgacaccaaccctacagcaacggcaaggtgggattggtggggtattgcctgggcggtgcgcttgcctttctagtggccgccaaaggatacgtggatcgcgccgtaggctactacggtgttggactggagaagcagctcaacaaggtcccggaagtcaagcatccggcgttgtttcacatgggcggccaagaccacttcgtgcccgcgccaagccgccagctgattactgaaggcttcggtgccaatccattgctgcaagtgcactggtacgaagaggccggacactcgttcgccaggacgagcagttcgggctatgtgccaagtgccgccgcgttggccaacgaacgtacactggatttcctggcgcccttgcagagcaagaagccatga

SEQ ID NO: 42012 - protein, 236 aa, Pseudomonas aeruginosa
MLTEGISIQSYDGHTFGALVGSPAKAPAPVIVIAQEIFGVNAFMRETVSWLVDQGYAAVCPDLYARQAPGTALDPQDEAQREQAYKLWQAFDMEAGVGDLEAAIRYARHQPYSNGKVGLVGYCLGGALAFLVAAKGYVDRAVGYYGVGLEKQLNKVPEVKHPALFHMGGQDHFVPAPSRQLITEGFGANPLLQVHWYEEAGHSFARTSSSGYVPSAAALANERTLDFLAPLQSKKP

SEQ ID NO: 42013 - DNA, 729 bp, Acidithiobacillus caldus
  CDS (1)..(729): transl_table=11
atgtctgcaatacaatccgagtggctggaactgaacccttcgcttcgcgcctggtacgcgcgccccacgaatcctggaccgcaccccgcggtactcgtattcatcgaggcctttggcgtgaacgagcattttcgagagctggcagagcgcctcgccaaggccggttactgcgccatcgtgcccgacatctatcacggcaaggtctatgaatacacggacttcgacggcgccatcgggcacctgcgcacgctcaaggacgaccaggtcatggcggaagcccaaaccaccgtggcgagtgtactccagcgtcctgaggtacgtggtccaaaggtcggtgtgctgggcttttgtatgggtgggcgctatgccttcctcgccaatgcccagctcgctgagcgcgtggcggcgaccgtagctttttacggcggcggtatcgccccggataaagaccctgccggacgtccgccgctcctgggtcacgtgaaccagatgcaggctcccctgctcctgctctacggcgccgaggacagctccattaccccggaagagcatggccgcatcgctgcggccctgagcaccgccaagaagcgttatacgctcacggtctttccggaggccccgcacggcttcttcagtgaccgccgcgacagctaccgcgccggaccggcgcaggagggctgggaaatgaccctggcgcatctcgggcgcggcttgggagtgcaggcgtga

SEQ ID NO: 42014 - protein, 242 aa, Acidithiobacillus caldus
MSAIQSEWLELNPSLRAWYARPTNPGPHPAVLVFIEAFGVNEHFRELAERLAKAGYCAIVPDIYHGKVYEYTDFDGAIGHLRTLKDDQVMAEAQTTVASVLQRPEVRGPKVGVLGFCMGGRYAFLANAQLAERVAATVAFYGGGIAPDKDPAGRPPLLGHVNQMQAPLLLLYGAEDSSITPEEHGRIAAALSTAKKRYTLTVFPEAPHGFFSDRRDSYRAGPAQEGWEMTLAHLGRGLGVQA

SEQ ID NO: 42015 - DNA, 765 bp, Rhodococcus opacus
  CDS (1)..(765): transl_table=11
atgtgccatgcgggtttgaccgatccgaacgcaccggcggttttacacattgaagtagaagtcgatgtgcccggcgggaaaatgccggccactctatatctaccgaataccggcaagggtccaggaattagcctacttaccgacatgtatggcccgattccattttatcgcgcggtcgcgtcacggctagccgccgagggctacgtcgtgcttctatcggactacttcttcaggcaaggtcggttgcctgcggagacacgtgaggagggcttcagtcgacactctcgctccgatgaagtcactgcgatagatgaccatgcagcagctgtcagttggcttcaacgccgtccggaagttgtgcaggatagggtaggtttgcttggcttttgtctgggtggaaccattgcgctgaatctgtgcgcagccggggcgaatgcagtcgccgtctgctactacgccttcccgttcagcttcggaaacccttgtcgaagaaaggctccgagaccaatcgatatcgcatcagaaatctctgcacctgtgttatcgcactggggtgacgcggactatatcccgctctcggagatcgaggcgttcggcgctgcgatgcgcaagttcggtcatccctataccgagcgcgtgtattccggcgccgggcatggctttctggcaggtctcgtggagcgaagtggcgactcctccgccgcgcacgagtcttgggaattgacccaagccttcttttccaggcatctgggaggctcgcgatga

SEQ ID NO: 42016 - protein, 254 aa, Rhodococcus opacus
MCHAGLTDPNAPAVLHIEVEVDVPGGKMPATLYLPNTGKGPGISLLTDMYGPIPFYRAVASRLAAEGYVVLLSDYFFRQGRLPAETREEGFSRHSRSDEVTAIDDHAAAVSWLQRRPEVVQDRVGLLGFCLGGTIALNLCAAGANAVAVCYYAFPFSFGNPCRRKAPRPIDIASEISAPVLSHWGDADYIPLSEIEAFGAAMRKFGHPYTERVYSGAGHGFLAGLVERSGDSSAAHESWELTQAFFSRHLGGSR

SEQ ID NO: 42017 - DNA, 931 bp, Arabidopsis thaliana
  CDS (43)..(762)
agatcctcgattccttcgttttctcgcttatcagtgcgatcaatggcggattcagctttcaggaaaattcagatccaaagagatgacactacatttgatgcctatgtggtcggtaaagatgatgcgcctgggattgtggtgattcaagaatggtggggtgttgactttgagatcaagaaccatgctattaaaatctcacaacttgagcctggattcaaagcccttatacctgacttgtatcgaggaaaggttggtttggatactgcagaggcacagcatctaatggatggccttgattggccaggtgctatcaaagatatccgcgcttctgttaattggctaaaatccaatggctcaaaaaaggttggtgccactggaatgtgcatgggaggtgcattagctatagctagctctgtattggttcctgaggtggatgctgttgttggattctatggaaccccttcctcagagctcgcagatccagcacaagctaaggcacctattcaggctcattttggagagctcgacaattttgttggtttttctgatgtcacggcagcaaagaatctcgaagagaagctgaaagcgtctggagtagcacatgaagttcacatctatccaggtaatggacacgcgttcttgaacaggagtccagaaggagtgagcagaaggaaaagcatgggactttctgatgaagatgaagccgcagtggagcttgcttggtctcgcttcacctcctggatgaaacagtacttggcttaagctttcttccatcaggcagcaatggttgatgtaagtcccaaaacgttgtgtgatgcccaatcatctttaaataaggacattgctcttagaacttttaatctgaaccaaataaagaggtttgttcacttgtgaatcagtattgagtggaaatgttcgaagccttttttgc

SEQ ID NO: 42018 - protein, 239 aa, Arabidopsis thaliana
MADSAFRKIQIQRDDTTFDAYVVGKDDAPGIVVIQEWWGVDFEIKNHAIKISQLEPGFKALIPDLYRGKVGLDTAEAQHLMDGLDWPGAIKDIRASVNWLKSNGSKKVGATGMCMGGALAIASSVLVPEVDAVVGFYGTPSSELADPAQAKAPIQAHFGELDNFVGFSDVTAAKNLEEKLKASGVAHEVHIYPGNGHAFLNRSPEGVSRRKSMGLSDEDEAAVELAWSRFTSWMKQYLA

SEQ ID NO: 42019 - DNA, 711 bp, Pseudomonas aeruginosa
  CDS (1)..(711): transl_table=11
atgttgactgaagggatatcgattcaatcgtatgacgggtatacattcggcgcgctcgtgggctcgccggccaaagcgcccgctcccgtgattgtgatcgctcaagaaatatttggtgtgaacgcgttcatgcgagaaacggtgtcatggctggtggaccaggggtatgcggcagtttgcccagatctgtacgggcgccaggcgccaggtacagcactcgatccgcgggatgaggcgcagagagagcaagcctacaagctctggcaggccttcgacatggaggccggcgtgggcgatctggaggctgctatccgctatgcgcgacaccaaccctacagcaacggcaaggtgggattggtggggtattgcctgggcggtgcgcttgcctttctagtggccgccaaaggatacgtggatcgcgccgtaggctactacggtgttggactggagaagcaactcaacaaggtcccggaagtcaagcatccggcgttgtttcgcatgggcggccaagaccacttcgtgcccgcgccaagccgccagctgattactgaaggcttcggtgccaatccattgctgcaagtgcactggtacgaagaggccggacactcgttcgccaggacgagcagtccgggctatgtggcgagtgccgcggcgttggccaacgaacgtacactggatttcctggcgcccttgcagagcaagaagccatga

SEQ ID NO: 42020 - protein, 236 aa, Pseudomonas aeruginosa
MLTEGISIQSYDGYTFGALVGSPAKAPAPVIVIAQEIFGVNAFMRETVSWLVDQGYAAVCPDLYGRQAPGTALDPRDEAQREQAYKLWQAFDMEAGVGDLEAAIRYARHQPYSNGKVGLVGYCLGGALAFLVAAKGYVDRAVGYYGVGLEKQLNKVPEVKHPALFRMGGQDHFVPAPSRQLITEGFGANPLLQVHWYEEAGHSFARTSSPGYVASAAALANERTLDFLAPLQSKKP

SEQ ID NO: 42021 - DNA, 933 bp, Zymomonas mobilis
  CDS (1)..(933): transl_table=11
atggctttaaaaggcctttttttagacaaaataagagatcaggcgattaaccgccgccgtcttgggaaagcaattctacaatttgggacggccggtctgttatcagagacggttatcggacgcgctttggcagcagaagaaaatccccctgcaaagaagtctttcccttttccgattgataaaggagatgataatcctttgctgaatacccatcgggttaattggcgggttaccaatggggaattgatgcatggctatattgcggtaccggccgctgccagaaataaattgccgactgttctcattatccatgatgagcaagggttggattttgccacacgggaatatacccgtaaaatggcattgaatggctatattgccttggcaccggattttctgtctgcttggggtggtatgccggatgatcccgccaaaacacgcgccttgttaaggggagtcgattggtcatggcttgtcaaagatgccgcaatgacggtcgattggcttaaaaatcagcgctattctacaggaaaagtcggggctatcggttttggttggggtggcaaactggctcaatataccgctgcgcaagcccaagatgcgttacgggcagcagtcgcttattatagcgagacgccccctatgaatgaagctgcccatatcaaagcgccgttacagcttcatttcggcacatcagattctgcggttaatgcggcggctttaaattgggtgtcagccctgaaaagcgcctctgtgccattggaatgttatttttatcccaatgccggacatggttttatgaatgaaacccagcctgcttataatgaagcggctgcaaatgaggcgtggaagcgtagcgctgaattttggccgctaatcttaatccaaaagaaagcctgcttcataaaatcaataagggagagcaaaagttag

SEQ ID NO: 42022 - protein, 310 aa, Zymomonas mobilis
MALKGLFLDKIRDQAINRRRLGKAILQFGTAGLLSETVIGRALAAEENPPAKKSFPFPIDKGDDNPLLNTHRVNWRVTNGELMHGYIAVPAAARNKLPTVLIIHDEQGLDFATREYTRKMALNGYIALAPDFLSAWGGMPDDPAKTRALLRGVDWSWLVKDAAMTVDWLKNQRYSTGKVGAIGFGWGGKLAQYTAAQAQDALRAAVAYYSETPPMNEAAHIKAPLQLHFGTSDSAVNAAALNWVSALKSASVPLECYFYPNAGHGFMNETQPAYNEAAANEAWKRSAEFWPLILIQKKACFIKSIRESKS

SEQ ID NO: 42023 - DNA, 696 bp, Aquifex aeolicus
  CDS (1)..(696): transl_table=11
atgggacaaatggtggagtttgagaaaaacggagttaaggtcaggggatacatagctactccgaagtgggctggtcctgcggtgttggtctttcacgagtggtgggggcttgaaagtccgctttccaatataaaggagatatgtgacaaactggcggatgagggatttgtagcctttgctccggacttttacaagggtcaatatgcggacaacccggacgatgcgggaaaactcatgaccgagatgtttgaaaagagaatggacgaagtcgatagaatatttcaggcttccgttgagttcgtaaaagagtgcaggtacacataccctaaaaaagtggggataaccggtttttgttgtggtggaacacttgcgatgtactttgccgcaaagtttcccgaaatggtagacgcaagcctgccattctacggactacctcaacttactcagataaatgcagaaaatataaaagtacctattttcttcatacttgcggaaaaagacgaattcgttaataacgacgaagtaatagacatagcaaagacagtatggaaaaatggagtggacgttcaggtaaaagtattctccggcgttacgcatgcgttcttaaacgaaaagagagaggacgtttacgatcccaagcgtgcctgtgaagcgtgggaactggcggtaaacttcttcaaaacatacctcaaataa

SEQ ID NO: 42024 - protein, 231 aa, Aquifex aeolicus
MGQMVEFEKNGVKVRGYIATPKWAGPAVLVFHEWWGLESPLSNIKEICDKLADEGFVAFAPDFYKGQYADNPDDAGKLMTEMFEKRMDEVDRIFQASVEFVKECRYTYPKKVGITGFCCGGTLAMYFAAKFPEMVDASLPFYGLPQLTQINAENIKVPIFFILAEKDEFVNNDEVIDIAKTVWKNGVDVQVKVFSGVTHAFLNEKREDVYDPKRACEAWELAVNFFKTYLK

SEQ ID NO: 42025 - DNA, 816 bp, Escherichia coli
  CDS (1)..(816): transl_table=11
atggcaacaacacaacaatctggatttgcacctgctgcatcgcctctcgcttcgaccatcgttcagaccccggacgacgcgattgtggcgggcttcacctctatcccttcacaaggggataacatgcctgcttaccatgccagaccaaagcaaagcgatggcccactgccagtggtcattgtagtgcaggaaatttttggcgtgcatgaacatatccgcgacatttgtcgccgtctggcgctggaggggtatctggctatcgcacctgaactttacttccgcgaaggcgatccgaatgattttgccgatatccccacgttgcttagcggtctggtagcaaaagtgcctgactcgcaggtgctggccgatctcgatcatgtcgccagttgggcttcccgcaacggcggcgatgttcatcgtttaatgatcaccggattctgctggggtggacgtatcacctggctgtatgccgcgcataatccacagctaaaagccgcagtggcgtggtacggcaaactgacgggcgacaagtcgctgaattcaccgaaacaacctgttgatatcgcaaccgatcttaacgcgccgattctcggcttatatggtggtcaggataacagcattccgcaggagagcgttgaaaccatgcgccaggcgctgcgggctgctaatgcgaaagcagagattatcgtgtacccggacgccgggcatgcattcaacgctgattatcgcccgagctatcatgccgcatctgcagaagatggctggcagcgtatgctggaatggtttaagcagtatggtgggaagaagtcgctgtaa

SEQ ID NO: 42026 - protein, 271 aa, Escherichia coli
MATTQQSGFAPAASPLASTIVQTPDDAIVAGFTSIPSQGDNMPAYHARPKQSDGPLPVVIVVQEIFGVHEHIRDICRRLALEGYLAIAPELYFREGDPNDFADIPTLLSGLVAKVPDSQVLADLDHVASWASRNGGDVHRLMITGFCWGGRITWLYAAHNPQLKAAVAWYGKLTGDKSLNSPKQPVDIATDLNAPILGLYGGQDNSIPQESVETMRQALRAANAKAEIIVYPDAGHAFNADYRPSYHAASAEDGWQRMLEWFKQYGGKKSL

SEQ ID NO: 42027 - DNA, 876 bp, Methylobacterium extorquens
  CDS (1)..(876): transl_table=11
atgaccgcgttcgatgccgacctgcggagcctcgcggctcagacgaccctctcacggcgcaccgtgatcgccacgagtctcgccacgggcttcgcgctcgccgtgcagcccgtcgcggcccagaccaccatcgccacggacgcgaacggcctgatcgccggcgaggtgaagattccgatgcaggacggcgtgatcccggcctaccgagccatgccggccgagggcggcccctttccgacgatcctggtcgtgcaggaaatcttcggcgtgcatgagcacatcaaggatgtgtgccgccgtctggccaagctcggctatttcgccctggcgcccgaactctatgcccggcagggcgacgtctcgaccttgaccgacatccagcagatcgtgagcgaggtcgtctccaaggtgcccgacgaccaggtgatgagcgacctcgacgcggcggtcgccttcgccaagggcacgggcaaggccgacacggctcgcctcgggattaccggcttctgctggggcgggcgcatcacctggctctacgccgcgcacaatccggcggtgaaggccggcgtggcctggtacgggcggctcgtcggcgacagctcggcgctgatgccgaagaaccccgtcgatgtcgccgccgacctcaaggcgccggtgctcggcctctatggcggggccgatcagggcattccggtcgccacgatcgaccggatgaaggaggcctgccgggccgccggaaagacctgcgatttcgttgtctatccggaggcggggcacgccttccacgccgattatcgtccgagctaccgcgcggagccggcacaggacggctggaagcggctgcaggactggttccggcagtacggcgtcgcctga

SEQ ID NO: 42028 - protein, 291 aa, Methylobacterium extorquens
MTAFDADLRSLAAQTTLSRRTVIATSLATGFALAVQPVAAQTTIATDANGLIAGEVKIPMQDGVIPAYRAMPAEGGPFPTILVVQEIFGVHEHIKDVCRRLAKLGYFALAPELYARQGDVSTLTDIQQIVSEVVSKVPDDQVMSDLDAAVAFAKGTGKADTARLGITGFCWGGRITWLYAAHNPAVKAGVAWYGRLVGDSSALMPKNPVDVAADLKAPVLGLYGGADQGIPVATIDRMKEACRAAGKTCDFVVYPEAGHAFHADYRPSYRAEPAQDGWKRLQDWFRQYGVA

SEQ ID NO: 42029 - DNA, 813 bp, Salmonella typhimurium
  CDS (1)..(813): transl_table=11
atgacaacgacacatccatccggctttgcacctgcagcctccccacttgcccctacgatgattcatacgcctgatggggccattagcgcggggataacgtcgattccctctcagggcgacgatatgcccgcctattacgccagaccaaaagcgagcgacggcgcgctgccggtggtcattgtggtacaggaaatttttggcgtacatgaacacattcgcgatatttgccgacgactggcgctggaaggctatctcgctatcgcgccggagctctatttccgcgaaggcgaccccaatgatttcgccgatatacccacattattgagcgggctggtggctaaagtacccgattcgcaagtccttgccgacctggatcacgtcgccagttgggcttcgcgcaacggcggggatgcgcatcggctgatgatcaccggtttttgttggggaggccggattacctggctgtacgccgcgcacaacccacagttaaaagcggcggtagcatggtacggcaagctggtgggcgacacgtcactcaattcgccgaagcatcccgttgatatcgccaccgatcttaacgcgccggtactgggtttatacggcgggcaggataccagtattccacaggagagcgtggaaaccatgcgtcaggcgctacgcgccgctaatgcgaaggcggaaatcgtggtctatcccgatgcagggcacgcgtttaatgccgattatcgtccgggctaccacgaagcctcagcgaaagacggctggcaaagaatgctggaatggttcgcgcagtacggtgggaaaaaaggctaa

SEQ ID NO: 42030 - protein, 270 aa, Salmonella typhimurium
MTTTHPSGFAPAASPLAPTMIHTPDGAISAGITSIPSQGDDMPAYYARPKASDGALPVVIVVQEIFGVHEHIRDICRRLALEGYLAIAPELYFREGDPNDFADIPTLLSGLVAKVPDSQVLADLDHVASWASRNGGDAHRLMITGFCWGGRITWLYAAHNPQLKAAVAWYGKLVGDTSLNSPKHPVDIATDLNAPVLGLYGGQDTSIPQESVETMRQALRAANAKAEIVVYPDAGHAFNADYRPGYHEASAKDGWQRMLEWFAQYGGKKG

SEQ ID NO: 42031 - DNA, 774 bp, Sulfolobus solfataricus
  CDS (1)..(774): transl_table=11
atggaaaaggagatattttatgattcagacggagctaaaataagggctttcctagctaccccagaaaatcctaaattggcagtaatagtaatacatgaaatatggggtcttaatgataatataaaagatatttcaagaaggttagcaaatgagggctatatggcactagctcctcaattatacactaggaatgaggatgttctaaacgaggggaacattcaaaatgtaatgatgaaagtatggagtataccaccagagaagaggaatgatccaaattcttatcaacaaataatgtcagcgttagatgaaaaaggtaaaaaagtagctgagttattggtcttaaatagacaaaagacggaggaacagatgataaaggacgctattaaggcttacgagtacgtaagctcacaaggtgttaaaaagatagtcagtatgggcttctgtatgggtgggggtttggcatttcagttagcgaccgaagtaccactagatgggacaatagtcttttacggcagaaatccacaaccattggaggcaatccagaagataaaggggccaatattaggtctatatgctggagaggacccgccaatagatgcggggttaccagatctaatttccgctataataaaatataagaaggatttagaactcaaaatttaccccggagcgtatcatgcgttctttaatgatagagggcgttcgtataataaggaagcagctgaagatgcttgggaaagagtaaagagctttctaaggagggtgtcaaagtga

SEQ ID NO: 42032 - protein, 257 aa, Sulfolobus solfataricus
MEKEIFYDSDGAKIRAFLATPENPKLAVIVIHEIWGLNDNIKDISRRLANEGYMALAPQLYTRNEDVLNEGNIQNVMMKVWSIPPEKRNDPNSYQQIMSALDEKGKKVAELLVLNRQKTEEQMIKDAIKAYEYVSSQGVKKIVSMGFCMGGGLAFQLATEVPLDGTIVFYGRNPQPLEAIQKIKGPILGLYAGEDPPIDAGLPDLISAIIKYKKDLELKIYPGAYHAFFNDRGRSYNKEAAEDAWERVKSFLRRVSK

SEQ ID NO: 42033 - DNA, 804 bp, Yersinia pestis
  CDS (1)..(804): transl_table=11
atggcaacggcccaccatactgaccaactacattcgttacaaacccacggtattcactgtggggaaacaacgatcccctctcagggtgatgagctacccgcttatattgctaaacctgaccaacatacagggccataccctgtggtgattgtcgtgcaagaaatctttggcgtgcatgaacatattcaggatatctgccgccggctcgccaaacagggctatttagccatagcgcccgaattgtattttcgtcagggcgatgccaaagactatagtaatattaatgagttagtgaataatctggtaaaaaaagtccctgatcgtcaggttttggtggatctcgatcacaccgctcattgggcatcccgccacggtggggacaccaaaaaattggccattaccggattttgctggggcgggcgtatcgcatggttatatgccgcacataatccacagttgaaggcggccgtggcctggtatggcaaattggttggtgaaaaaaccttattcctaccgaaatatccggtcgatgttgctatcgatctctgcgccccagtgttggggctatatggaggtaaagacaccagtatcccagcagagcatattgaaactatgcgccaggcattacgcgctgcgaatgccgatgctgagattattgtttatccagaggctgggcatgcttttaatgccgactatcgcccaagctatcatgcagagtcggcccaagatggctggcaacgtatgcttgattggtttacccaacatggtgtctcggccatccccattccagaagaaacgcaataa

SEQ ID NO: 42034 - protein, 267 aa, Yersinia pestis
MATAHHTDQLHSLQTHGIHCGETTIPSQGDELPAYIAKPDQHTGPYPVVIVVQEIFGVHEHIQDICRRLAKQGYLAIAPELYFRQGDAKDYSNINELVNNLVKKVPDRQVLVDLDHTAHWASRHGGDTKKLAITGFCWGGRIAWLYAAHNPQLKAAVAWYGKLVGEKTLFLPKYPVDVAIDLCAPVLGLYGGKDTSIPAEHIETMRQALRAANADAEIIVYPEAGHAFNADYRPSYHAESAQDGWQRMLDWFTQHGVSAIPIPEETQ

SEQ ID NO: 42035 - DNA, 705 bp, Ralstonia eutropha
  CDS (1)..(705): transl_table=11
atgttatcagacggcgttgagatcacgtcgcgctcgggtggtcgctttggtgcctacctcggaaagccgacgacggactccgcacccatcgtcgtgatcgcgcaggagattttcgggatcacgcctttcataagagaaaccgtggaatggctcgttggtgcgggctttggttgcgtgtgtccggatctgtactggagacaggcgccgaatatcgagcttgatgcaaacgtaccatcggaacgggaacaggcgcttgcgttgtttcgcgactttgacatggaggcaggagtcaatgacctttcatgcgccattgaatacgctcgtgcgctccctttctcgaacggtcgtgtcgctgtagtcgggtactgcctgggaggtgcgctggcgtttgatgtggcggcgcgatcattggccgattgctcaatcggctattacggcgtgggacttgaaaaaaaggtctcactggtgccagctattacacgaccggcgatgttccacatgggtaccaaagatcactatgtcacagaagaggcccgtagcattctcgaagagcatttcggtcgaaacaaaaatctgagtctgcactggtatccagtggggcattcatttgcacggtcatccagcccaaatttcgatcaggcggcgacaactgtggccaatgctcggacgctcgaactgcttgcaatgttgaaggacccttcatga

SEQ ID NO: 42036 - protein, 234 aa, Ralstonia eutropha
MLSDGVEITSRSGGRFGAYLGKPTTDSAPIVVIAQEIFGITPFIRETVEWLVGAGFGCVCPDLYWRQAPNIELDANVPSEREQALALFRDFDMEAGVNDLSCAIEYARALPFSNGRVAVVGYCLGGALAFDVAARSLADCSIGYYGVGLEKKVSLVPAITRPAMFHMGTKDHYVTEEARSILEEHFGRNKNLSLHWYPVGHSFARSSSPNFDQAATTVANARTLELLAMLKDPS

SEQ ID NO: 42037 - DNA, 696 bp, Aquifex pyrophilus
  CDS (1)..(696): transl_table=11
atgggacagatggtagagtttgagaagaacggcgttaaggtaaggggctatatagctacccccaagtggggcggaccgggcgttatcgtaatccacgagtggtggggtcttgagagtcccctttcaaatataaaggagatttgcgacaggtttgctcaggaaggttttgttgccttcgcacccgacttttacgaagggaagtacgcggacaatcccgacgatgcgggaaagctcatgacggacatgtttgaaaacagaatggataaggtggatgccatttttaaggcctccgtagatttcctcaaggagtgcaggtacacctctcccaagaaagttggtgttacaggattctgttgcgggggaaccctttccatgtattttgcgggtaagtttcctgaccttattgacgcaagcgttcccttttacggacttccccagatcacaaaaatagacgcggaaaacataaaagttcccatattcttcatacttgccgagaaggacgagtttgttaacaacgatgaggttatagatatagcgaagaaagtttggaagaacggcgttgatgtgaaggtgaaagtttactcgggcgttactcacgcattcctgaacgagaagagagaggacgtttacgacccctgcagggcacaggacgcctggaacctaaccgtcgcattcttcaaggaatacctgacctaa

SEQ ID NO: 42038 - protein, 231 aa, Aquifex pyrophilus
MGQMVEFEKNGVKVRGYIATPKWGGPGVIVIHEWWGLESPLSNIKEICDRFAQEGFVAFAPDFYEGKYADNPDDAGKLMTDMFENRMDKVDAIFKASVDFLKECRYTSPKKVGVTGFCCGGTLSMYFAGKFPDLIDASVPFYGLPQITKIDAENIKVPIFFILAEKDEFVNNDEVIDIAKKVWKNGVDVKVKVYSGVTHAFLNEKREDVYDPCRAQDAWNLTVAFFKEYLT

SEQ ID NO: 42039 - DNA, 720 bp, Brassica napus
  CDS (1)..(720)
atggccgattcagctttcaagaaaatccaaatccaaagagatgacactacgttcgatgcgtatgtggttggtaaagatgatgcgcccgggattgttgtgattcaagaatggtggggtgttgaagttgagatcaagaaccacgctattaaaatctcacagcttgaccctggtttcaaagcccttatacctgacttatatagaggaaaggtgggtcttgatgctgcagaggcaaagcatttaatggatggccttgactggccaggtgctgtcaaggatatcagcgattctgttaattggcttaaagctaatggctccaaaaaggttggtgtgactggaatgtgcatgggaggtgcactagctatagctagctctgttttgattccagaggttgatgctgctgttggattctatggaactccttcctctgagcttgcagatccagcacaagccaaggcacctattcaggcccattttggagagcttgaccatattgttggtttctctgatgtcacggcagcaaggaatctcgaagagaagctgaaagcatcgggagtagcacacgaggttcacatttactcggggaacgggcacgcgttcttgaacaggagccctgaaggagtgcgcagaaggaagagtttgggagattctgatgatgacgaagctgcggtggagcttgcttggtctcgcttcaactcttggatgaaacattacttggtttaa

SEQ ID NO: 42040 - protein, 239 aa, Brassica napus
MADSAFKKIQIQRDDTTFDAYVVGKDDAPGIVVIQEWWGVEVEIKNHAIKISQLDPGFKALIPDLYRGKVGLDAAEAKHLMDGLDWPGAVKDISDSVNWLKANGSKKVGVTGMCMGGALAIASSVLIPEVDAAVGFYGTPSSELADPAQAKAPIQAHFGELDHIVGFSDVTAARNLEEKLKASGVAHEVHIYSGNGHAFLNRSPEGVRRRKSLGDSDDDEAAVELAWSRFNSWMKHYLV

SEQ ID NO: 42041 - DNA, 855 bp, Zea mays
  CDS (1)..(855)
atggccacagcgcgcctgctccgttgcgcctcctccaccttccttttcagcacctgcaccaccaatccgttgcgctcgtgctcccctctcgtccgccgccagcacccccgcgccgccatggccacggactcctccgccgcctcgttccagaagatccagatccagcgcgaggacaccacttttgatgcttatgttgttggcaaagaaaatgctcctggaattgtggttttgcaagagtggtggggagttgactatgagataaagaaccatgcgatccacatttcccaacttggtggaggatacagagcactcattccagatttataccgtggaaaagttgctctcgatgttgctgaggcacaacatctgatggagggtctcgactggcagggtgcagtcaaggatatccaggcttcagttaaatggctgaagtcaaatggatcacccaaggttggtgttactggctattgcatgggaggtgctttatcaattgcaagtggagttttagtcccagaggttgatgctgttgttgctttctatgggacaccatcttctgagcttgctgatccttctaaggctaaggctcctatacaggctcatttcggggagcatgacagttttgttggtttttcagatgtcactgcagccaagtccctggaggagaagctcaaatcttccgggataccatatgaagttcacatataccctggatgttcgcatgccttcatgaacacttcgcctgaggcactcaagaggaagaaggggatgggtctgactgatgagaaccaggaagccgtcgacctggcctggtctcgcttctcttcttggatgggccggttcctcggatctgcttga

SEQ ID NO: 42042 - protein, 284 aa, Zea mays
MATARLLRCASSTFLFSTCTTNPLRSCSPLVRRQHPRAAMATDSSAASFQKIQIQREDTTFDAYVVGKENAPGIVVLQEWWGVDYEIKNHAIHISQLGGGYRALIPDLYRGKVALDVAEAQHLMEGLDWQGAVKDIQASVKWLKSNGSPKVGVTGYCMGGALSIASGVLVPEVDAVVAFYGTPSSELADPSKAKAPIQAHFGEHDSFVGFSDVTAAKSLEEKLKSSGIPYEVHIYPGCSHAFMNTSPEALKRKKGMGLTDENQEAVDLAWSRFSSWMGRFLGSA

SEQ ID NO: 42043 - DNA, 25 bp, Artificial sequence
  primer
atgaatgatttctttgccgcaattg

SEQ ID NO: 42044 - DNA, 28 bp, Artificial sequence
  primer
ttaggagagatatttatcgaaccatttc

SEQ ID NO: 42045 - protein, 241 aa, Artificial sequence
  consensus sequence
  Variant (2)..(3): Xaa in position 2 to 3 is any amino acid
  Variant (5)..(16): Xaa in position 5 to 16 is any amino acid
  Variant (17)..(19): Xaa in position 17 to 19 is any or no amino acid
  Variant (21)..(22): Xaa in position 21 to 22 is any amino acid
  Variant (24)..(28): Xaa in position 24 to 28 is any amino acid
  Variant (29)..(35): Xaa in position 29 to 35 is any or no amino acid
  Variant (37)..(38): Xaa in position 37 to 38 is any amino acid
  Variant (39)..(80): Xaa in position 39 to 80 is any or no amino acid
  Variant (82)..(98): Xaa in position 82 to 98 is any amino acid
  Variant (99)..(139): Xaa in position 99 to 139 is any or no amino acid
  Variant (141)..(141): Xaa in position 141 is any amino acid
  Variant (143)..(143): Xaa in position 143 is any amino acid
  Variant (146)..(162): Xaa in position 146 to 162 is any amino acid
  Variant (163)..(166): Xaa in position 163 to 166 is any or no amino acid
  Variant (169)..(190): Xaa in position 169 to 190 is any amino acid
  Variant (191)..(202): Xaa in position 191 to 202 is any or no amino acid
  Variant (204)..(225): Xaa in position 204 to 225 is any amino acid
  Variant (226)..(233): Xaa in position 226 to 233 is any or no amino acid
  Variant (235)..(237): Xaa in position 235 to 237 is any amino acid
  Variant (238)..(238): Xaa in position 238 is any or no amino acid
  Variant (240)..(240): Xaa in position 240 is any amino acid
EXXGXXXXXXXXXXXXXXXAXXGXXXXXXXXXXXXPXXXXXXXXXXXXXXXXXXXXXXXXXXXXXXXXXXXXXXXXXXXXDXXXXXXXXXXXXXXXXXXXXXXXXXXXXXXXXXXXXXXXXXXXXXXXXXXXXXXXXXXGXCXGGXXXXXXXXXXXXXXXXXXXXXYGXXXXXXXXXXXXXXXXXXXXXXXXXXXXXXXXXXDXXXXXXXXXXXXXXXXXXXXXXXXXXXXXXYXXXXHXF

SEQ ID NO: 42046 - DNA, 1014 bp, Escherichia coli
  CDS (1)..(1014): transl_table=11
atgcgtgtactgggtattgaaacttcctgcgatgaaaccggcatcgccatttacgacgatgaaaaaggtttgttagccaaccaattgtatagtcaggtgaaattgcacgctgactacggcggcgtcgtgcctgaactggcctcccgcgatcatgtgcgtaaaaccgtaccgttgatccaggcggcgctaaaggagtctggtttaacggcaaaagacattgatgctgtggcctataccgcaggccctggattagtcggcgcgctactggttggcgcgaccgtggggcgttctctggcgtttgcctgggacgttccggcgatccctgtacaccatatggaagggcatctgttagcgccgatgctggaagataacccgccggaatttccgtttgttgcgctgcttgtttccggcggtcatacgcagttaatcagcgtgactggcattggtcagtacgagctgctcggcgagtctatcgatgatgccgccggggaagcgtttgataaaaccgcgaagctgctggggctggattatcctggcgggccgttactgtcgaaaatggcggctcagggtactgccgggcgctttgtcttcccgcgtccgatgaccgaccgtccggggctggatttcagcttctccggcctgaaaaccttcgcggcaaataccattcgtgacaacggcaccgacgaccagacgcgtgctgatatcgcccgcgcctttgaagatgcggtggtcgatacgctgatgattaagtgcaagcgggcgctggatcagacgggctttaagcgactggtcatggcgggcggcgtgagtgctaaccgtacgttacgggcgaagctggctgaaatgatgaaaaaacgccgcggcgaagtgttctacgcgcgtccggaattttgtactgataacggcgcgatgatcgcctatgccggaatggtgcggtttaaagcaggcgcgacggcggatctcggcgttagcgtgcgtccgcgctggccgctggcggagttaccggctgcgtaa

SEQ ID NO: 42047 - protein, 337 aa, Escherichia coli
MRVLGIETSCDETGIAIYDDEKGLLANQLYSQVKLHADYGGVVPELASRDHVRKTVPLIQAALKESGLTAKDIDAVAYTAGPGLVGALLVGATVGRSLAFAWDVPAIPVHHMEGHLLAPMLEDNPPEFPFVALLVSGGHTQLISVTGIGQYELLGESIDDAAGEAFDKTAKLLGLDYPGGPLLSKMAAQGTAGRFVFPRPMTDRPGLDFSFSGLKTFAANTIRDNGTDDQTRADIARAFEDAVVDTLMIKCKRALDQTGFKRLVMAGGVSANRTLRAKLAEMMKKRRGEVFYARPEFCTDNGAMIAYAGMVRFKAGATADLGVSVRPRWPLAELPAA

SEQ ID NO: 42048 - DNA, 1014 bp, Yersinia pestis CO92
  CDS (1)..(1014): transl_table=11
atgcgagtattgggtatagaaacgtcctgcgatgaaaccggaattgcagtctatgacgataaagccggtctgttagctaaccaattgtacagtcaggtaaaattacacgctgactacggtggtgtcgtacctgaactggcctcccgtgatcacgtgcgtaagaccgtacccctgattcaggcggcgttgaaagaagccaatttgagcgccaaagatatcgatgcggtggcttatacagcaggccctggtttggtgggggcgttgttagtgggggcgaccattggtcgggcattagctttcgcatggggagtccctgcggtaccggttcatcatatggaaggccatttgttggcaccaatgctggaagaaaatgcaccagagttcccgtttgttgcgctgctggtatccggcggccatacccaattgattagtgtgaccggtattggtgaatatttgctgttgggcgaatctgttgatgatgcggcaggcgaggcctttgataagacagcaaaactactagggctggattaccccggtgggccaatgttgtcgcgtatggctcaacaaggtactgtggggcgttttacctttccgcgcccaatgactgatcgccctgggctggattttagtttttccggcctgaaaacgttcgcggcgaatactattcgtgctaatggtgatgatgaccaaacccgtgccgatatcgcccgagcattcgaagatgcggtggttgatacgttggcgatcaagtctaaacgtgcattagatcagacgggttttaaacgcttagtcattgccgggggcgtgagcgctaaccagacactgcgattaaaactggccgatatgatgcaaaaacgaggcggtgaagtattctatgcccgacccgaattttgcactgacaatggcgcgatgattgcctatgccgggatggtcaggttgcgaagtaacctgaacagtgagttgagtgtgtcggtgcggccgcggtggccgttatctgagttaccaaaagtctga

SEQ ID NO: 42049 - protein, 337 aa, Yersinia pestis CO92
MRVLGIETSCDETGIAVYDDKAGLLANQLYSQVKLHADYGGVVPELASRDHVRKTVPLIQAALKEANLSAKDIDAVAYTAGPGLVGALLVGATIGRALAFAWGVPAVPVHHMEGHLLAPMLEENAPEFPFVALLVSGGHTQLISVTGIGEYLLLGESVDDAAGEAFDKTAKLLGLDYPGGPMLSRMAQQGTVGRFTFPRPMTDRPGLDFSFSGLKTFAANTIRANGDDDQTRADIARAFEDAVVDTLAIKSKRALDQTGFKRLVIAGGVSANQTLRLKLADMMQKRGGEVFYARPEFCTDNGAMIAYAGMVRLRSNLNSELSVSVRPRWPLSELPKV

SEQ ID NO: 42050 - DNA, 1020 bp, Vibrio vulnificus YJ016
  CDS (1)..(1020): transl_table=11
atgcgcattctcggcattgaaacctcctgtgatgaaacaggaatcgccatttatgacgatgaaaaaggcctactggcccataaattatatagccaaattaaactgcatgccgattacggcggtgtcgtgcctgagctcgcttctcgtgaccacgtgaagaaaaccattcctcttattaaagaggcgttgaaagaagccaatttaacagcaaaagatattgatggtgttgcttacacagcagggccaggtttggttggggcacttttggtgggggcaacgatcggtcgaagcctcgcttacgcttggggagtgccagccgttccggttcatcatatggaaggtcacttgctcgcacctatgcttgaagacaacccaccgccgtttccatttgtagcggtattggtctcgggtggtcactcgatgatggtggaagtgaaaggcattggtgagtacaaaatcctaggcgaatccattgatgatgcggcgggtgaagcattcgataagacggcgaagctcatgggcctagattatccaggtggtccattgctgtctaaattggccgaaaaagggacgccgggtcgctttaagtttccgcgtccgatgaccaatgtgcccggtttggacatgagcttctctggtttgaaaacctttaccgcaaataccattgcggcgaatggtgatgatgaacaaacacgcgccgatattgcgtacgcttttgaagaggccgtgtgtgccacattggcgatcaaatgtaagcgcgcgctagagcaaacgggtatgaaacgtattgtgattgcgggtggggtgagtgccaaccgtcgtcttcgtgctgagctagaaaaactggcgcacaaagtgggtggggatgtctattatccacgtaccgagttttgtactgataatggtgcaatgatcgcgtatgcgggcatgcaacgtttgaagaataatgaagtgtcagatcttgcggtagaggcccgacctcgctggccaattgatcaattgacgccagtgatgaaataa

SEQ ID NO: 42051 - protein, 339 aa, Vibrio vulnificus YJ016
MRILGIETSCDETGIAIYDDEKGLLAHKLYSQIKLHADYGGVVPELASRDHVKKTIPLIKEALKEANLTAKDIDGVAYTAGPGLVGALLVGATIGRSLAYAWGVPAVPVHHMEGHLLAPMLEDNPPPFPFVAVLVSGGHSMMVEVKGIGEYKILGESIDDAAGEAFDKTAKLMGLDYPGGPLLSKLAEKGTPGRFKFPRPMTNVPGLDMSFSGLKTFTANTIAANGDDEQTRADIAYAFEEAVCATLAIKCKRALEQTGMKRIVIAGGVSANRRLRAELEKLAHKVGGDVYYPRTEFCTDNGAMIAYAGMQRLKNNEVSDLAVEARPRWPIDQLTPVMK

SEQ ID NO: 42052 - DNA, 1020 bp, Photobacterium profundum SS9
  CDS (1)..(1020): transl_table=11
atgcgtatattgggcatcgaaacgtcttgtgatgaaactggcgttgcgattttcgatgatgagcaaggtttactgtcacatgagctttacagtcaggtgaaattgcatgctgattatggtggcgttgtacccgagttagcttctcgtgatcacgttaaaaaaaccattccgttaatcaaagaagcattgaaaaaagcggggttaacaccagcagatcttgatggtattgcttataccgcaggcccgggtttggttggggcgttattagtgggtgcaaccattggtcgtagcctcgcatattcgtggggtttacccgctgtggctgtacaccatatggaagggcatttactggctccaatgctagaagataacgcccctgatttcccatttgtggcattgctggtttctggcggtcataccatgatggttgaagtgcaaggtattggtgagtatcaaattttaggcgaatctgttgatgatgccgcaggtgaagcttttgataaaacagccaagcttatgggtttagattaccctggtggtccgttgttatcaaagctggctgaaaagggcacgaaagggcgttttaaattccctcgtcctatgacagatcgacctggtttagacttcagtttttcgggcctaaagacgtttgctgcaaatacgatccgagccaacgacgatgacgaacaaacgcgtgctgatattgcatttgctttccaagaagcggtggttgatacattggcaattaagtgtaaacgggcactgaaacaaacgggtttgaaacgtttggttatcgctggcggggtaagtgctaattcttacttacgccaagagttaggttcgttgatgacaaaactgaatggtgaggtcttttatcctcgaacagagttttgtacagataacggtgcaatgatcgcgtatgcaggaatgcaacgattgaaaaatcaagaattgatggacttgagtgtaaaagcgtacccacgctggccgatcgatcagttgaaaccgttaaataaataa

SEQ ID NO: 42053 - protein, 339 aa, Photobacterium profundum SS9
MRILGIETSCDETGVAIFDDEQGLLSHELYSQVKLHADYGGVVPELASRDHVKKTIPLIKEALKKAGLTPADLDGIAYTAGPGLVGALLVGATIGRSLAYSWGLPAVAVHHMEGHLLAPMLEDNAPDFPFVALLVSGGHTMMVEVQGIGEYQILGESVDDAAGEAFDKTAKLMGLDYPGGPLLSKLAEKGTKGRFKFPRPMTDRPGLDFSFSGLKTFAANTIRANDDDEQTRADIAFAFQEAVVDTLAIKCKRALKQTGLKRLVIAGGVSANSYLRQELGSLMTKLNGEVFYPRTEFCTDNGAMIAYAGMQRLKNQELMDLSVKAYPRWPIDQLKPLNK

SEQ ID NO: 42054 - DNA, 1035 bp, Idiomarina loihiensis L2TR
  CDS (1)..(1035): transl_table=11
atgcgggtattgggtattgaaacgtcttgtgatgaaacgggtgttgcggtgtacgacaccgaaaaaggcttattagcccaccagttgtactcgcaggtgaaactgcatgccgactacggcggcgtagtgcccgagctggcatctcgtgaccacgtgcgcaagaccttaccgttgattaaagctgcgctcaaagaggccgggatttcgcatcagcaactggatggtattgcttatacaatggggcctgggctggttggtgctctgttagttggtgcttgtattggtcgtagtctggcttttggatggaatttacccgcggttggagttcatcatatggaaggccatttgctggcgcctatgctggaagaaaaccagcccgaatttccttttgtcgccttgttggtttccggcgggcatactcaactggttcaagtaaaaggtataggcgattatcatttgctgggcgaatcagtagacgacgccgcaggcgaggcttttgataaaacagctaagctaatggggcttgattatcccggggggccgcgattggctgctttggctgaacagggcaacagcgatcgttttacctttcccagaccaatgacagacagaccaggtcttaatttttctttcagtggtttgaaaacttctgcggctaatactctggccgctaatgacagtgatgagcagaccctggcggatattgcgcgggcatttgaagatgcggtggttgataccttggtgattaaatgtcgccgggcgctaaaagaaaccggttacaagcgtttggtcgttgccggtggggtcagtgccaataagcatttacgcgcaaaacttgaagctttattagaaaaacaaaagggccagatattttacccgcgtacggaattttgtactgataacggtgcgatgatcgccttagcgggcgctctgcgtttagaagcgggagaacgtgagccattggcagtgaaaacacacccaagatggccgatgacagatttgaaacccatggtgaatattagcgacgccgtttaa

SEQ ID NO: 42055 - protein, 344 aa, Idiomarina loihiensis L2TR
MRVLGIETSCDETGVAVYDTEKGLLAHQLYSQVKLHADYGGVVPELASRDHVRKTLPLIKAALKEAGISHQQLDGIAYTMGPGLVGALLVGACIGRSLAFGWNLPAVGVHHMEGHLLAPMLEENQPEFPFVALLVSGGHTQLVQVKGIGDYHLLGESVDDAAGEAFDKTAKLMGLDYPGGPRLAALAEQGNSDRFTFPRPMTDRPGLNFSFSGLKTSAANTLAANDSDEQTLADIARAFEDAVVDTLVIKCRRALKETGYKRLVVAGGVSANKHLRAKLEALLEKQKGQIFYPRTEFCTDNGAMIALAGALRLEAGEREPLAVKTHPRWPMTDLKPMVNISDAV

SEQ ID NO: 42056 - DNA, 1026 bp, Azotobacter vinelandii
  CDS (1)..(1026): transl_table=11
atgctcgttctggggctggaaacctcctgcgacgaaaccggcgtcgcgctttacgacagccggcgcggcctgctggccgacgcgctgttcagccagatcgatctgcaccgcatctatggcggggtagtgcccgaactggcctcgcgggatcacgtcaagcgcatgctgccgctcttgcgccaggtgctcgacgaatccggctgccgcaccggggacatcgacggcatcgcctataccgcaggacccggcctggtcggcgcgctgctggtcggcgcctcctgcgcccaggcgctggcgctggcctggggggttccggcgctcggcgtgcatcacatggagggtcatctgctggcgccgatgctggaggaacagccgccgcagtttcccttcgtcgccctgctggtttccggcggtcatacccaactggtgcgggtcgacggcatcggtcgctaccaggtgctcggcgagtcgctggacgacgccgccggcgaggctttcgataagaccgccaagctgctcggcctcggttatcccggcggtccggagatcgcccgcttggcacaggacggccggcccgggcgtttcgtcttcccgcggccgatgaccgaccggccaggcctggagttcagcttcagcggcctcaagaccttcgccctgaatacctggcagcactgccgggcgagcggcgacgacggcgagcaatcgcgccgcgatatcgctctggccttccagcaggcggtggtggagacgctgatcatcaagtgccggcgggcgctgaagcagaccggcctgaagcgtctggtcatcgccggcggggtgagtgccaaccaggcgttgcgttcggcgctggagcggatgctcggcgaactggatggccaggtgttctacgcccggccgcgcttctgcaccgacaacggcgcgatgatcgcctatgctggctgccagcgtttgctggccggccagcgggatgggccggcgattcaggtccatgcgcgctggccgatggagaccctgccggcgctctga

SEQ ID NO: 42057 - protein, 341 aa, Azotobacter vinelandii
MLVLGLETSCDETGVALYDSRRGLLADALFSQIDLHRIYGGVVPELASRDHVKRMLPLLRQVLDESGCRTGDIDGIAYTAGPGLVGALLVGASCAQALALAWGVPALGVHHMEGHLLAPMLEEQPPQFPFVALLVSGGHTQLVRVDGIGRYQVLGESLDDAAGEAFDKTAKLLGLGYPGGPEIARLAQDGRPGRFVFPRPMTDRPGLEFSFSGLKTFALNTWQHCRASGDDGEQSRRDIALAFQQAVVETLIIKCRRALKQTGLKRLVIAGGVSANQALRSALERMLGELDGQVFYARPRFCTDNGAMIAYAGCQRLLAGQRDGPAIQVHARWPMETLPAL

SEQ ID NO: 42058 - DNA, 1029 bp, Haemophilus influenzae R2846
  CDS (1)..(1029): transl_table=11
atgaaaatcttaggcattgaaacttcctgtgatgaaacgggcgtggcgatttatgatgaagaaaaagggttaattgctaatcaactttatactcaaattgccctgcatgcagattatggtggtgtggttcctgaattagcatcacgcgatcatattcggaaaacagcgcctcttattaaagcggcattagaagaagctaagttaacggcgagcgatattgatggtgttgcttatacgagtggccctgggcttgttggcgcattgcttgttggtgctacgattgcacgttctttagcctatgcttggaatgtgccagcgattggtgttcatcatatggaagggcatttacttgcgccaatgcttgatgaaaattcaccgcactttccttttgttgctctgttggtatcgggtggccacactcaattagtgcgtgtcgatggtgtaggaaaatatgaagtgataggagaatctattgatgatgctgctggcgaagcctttgataaaacagcaaaattacttggattagattatccgggcggtgcggcactttctcgtttagcggaaaaaggcacgccaaatcgctttatatttccacgcccaatgacagatcgtgcaggtcttgattttagtttttctggtttaaaaacatttgccgcgaatacagttaatcaagcgattaaaaacgagggcgaactgacagaacaaactaaagtagatattgcttatgctttccaagatgcggtggtagatactcttgccattaaatgtaagcgtgcattgaaagaaacaggttataaacgtttagtgattgcgggaggggtgagcgcaaataaaaaactccgagaaacgcttgcgcacttaatgcaaaatttaggtggcgaagtgttttatcctcaacctcaattttgtacagataatggcgcaatgattgcttacacaggtttgttacgtttaaaacaaggtcagcatagcgatctggctattgatgttaagcctcgttgggcaatgacggaattactggcaatttag

SEQ ID NO: 42059 - protein, 342 aa, Haemophilus influenzae R2846
MKILGIETSCDETGVAIYDEEKGLIANQLYTQIALHADYGGVVPELASRDHIRKTAPLIKAALEEAKLTASDIDGVAYTSGPGLVGALLVGATIARSLAYAWNVPAIGVHHMEGHLLAPMLDENSPHFPFVALLVSGGHTQLVRVDGVGKYEVIGESIDDAAGEAFDKTAKLLGLDYPGGAALSRLAEKGTPNRFIFPRPMTDRAGLDFSFSGLKTFAANTVNQAIKNEGELTEQTKVDIAYAFQDAVVDTLAIKCKRALKETGYKRLVIAGGVSANKKLRETLAHLMQNLGGEVFYPQPQFCTDNGAMIAYTGLLRLKQGQHSDLAIDVKPRWAMTELLAI

SEQ ID NO: 42060 - DNA, 1026 bp, Pseudomonas aeruginosa
  CDS (1)..(1026): transl_table=11
atgcgcgtgctgggactggaaacgtcctgcgacgaaaccggcgtcgccctttacgacagcgaacgcggcctgctggccgacgcgctgttcagtcagatcgacctccatcgcgtctacggcggcgtcgtgcccgagctggcctcgcgcgaccacgtcaagcgcatgctgccgctgatccgccaggtgctcgacgagtccggctgcacgccggcggatatcgacgcgatcgcctataccgccggtcccggcctggtcggcgccctgctggtgggggcttcctgtgcccaggcgatggccttcgcctggggcgtgccggcggtcggcgtgcaccacatggaagggcacctgctggcgccgatgctggaagagcagccaccgcggttcccgttcgtcgccttgctggtttccggcggtcacacccagttggtgcgggtggacggtatcggccgctaccagttgcttggcgaatcggtggacgatgccgccggcgaagccttcgacaagaccgccaagctgatcggcctgggctatcccggtggtccggaaatcgcccgcctggcggagcgcggcactcctggccgcttcgtgttcccgcggccgatgaccgatcgccccggcctggacttcagcttcagcgggctcaagacctttaccctgaacacctggcagcgttgcgtcgaggccggcgacgacagcgagcagacccgctgcgacatcgccctggcgttccagaccgcggtggtcgagaccctgctgatcaagtgccgtcgcgccttgaagcagaccggcctgaagaacctggtgatcgccggcggcgtcagcgccaaccaggcgctgcgcagcggcctggaaaagatgctcggcgaaatgaaggggcaggtgttctacgcccgcccgcgcttctgcaccgacaatggcgcgatgatcgcctacgccggctgccagcgcctgctcgccggccagcatgacggcccggcgatcagcgtccagccgcgctggccgatggagtcgctgccggcggtctga

SEQ ID NO: 42061 - protein, 341 aa, Pseudomonas aeruginosa
MRVLGLETSCDETGVALYDSERGLLADALFSQIDLHRVYGGVVPELASRDHVKRMLPLIRQVLDESGCTPADIDAIAYTAGPGLVGALLVGASCAQAMAFAWGVPAVGVHHMEGHLLAPMLEEQPPRFPFVALLVSGGHTQLVRVDGIGRYQLLGESVDDAAGEAFDKTAKLIGLGYPGGPEIARLAERGTPGRFVFPRPMTDRPGLDFSFSGLKTFTLNTWQRCVEAGDDSEQTRCDIALAFQTAVVETLLIKCRRALKQTGLKNLVIAGGVSANQALRSGLEKMLGEMKGQVFYARPRFCTDNGAMIAYAGCQRLLAGQHDGPAISVQPRWPMESLPAV

SEQ ID NO: 42062 - DNA, 1014 bp, Salmonella typhi
  CDS (1)..(1014): transl_table=11
  misc_feature (127)..(127): n is a, g, c or t
  misc_feature (241)..(241): n is a, g, c or t
  misc_feature (304)..(304): n is a, g, c or t
atgcgtgtactgggtattgaaacatcttgcgatgaaaccggcatcgctatttacgacgacaaaaaaggtctgttagccaaccaattgtatagtcaggtgaaattacatgctgattacggcggcgtantgcctgaactggcttcccgcgatcatgtgcgtaaaaccgtgccgctgattcaggcggcattaaaagaagccgctctgacagcgagcgatatcgacgcggtggcctataccgcangcccgggcttggtcggcgcgctgctggtcggcgcaaccgtcgggcgttcgctggcatttgccnggaatgtgccagccattcctgtacaccatatggaaggtcatctgctggcgccaatgctggaagataaccctccggatttcccgtttgtggcgctgctggtctccggcggacatacgcagctcattagcgtgaccggaatcggtcagtacgaactgctgggagagtcgattgacgatgccgccggtgaagcgtttgataaaaccgccaaattgttggggctggattatcctggcggcccgatgctgtcgaaaatggcgtcgcaggggacggcggggcgttttgtctttccgcgcccgatgaccgatcgcccggggctggattttagtttttccggtctgaaaacctttgccgctaacaccattcgtagtaatggcgacgacgaacaaactcgcgctgatatcgcgcgcgcttttgaagatgcggtcgtggatacgctgatgatcaagtgcaagcgcgcgctggaaagcaccggttttaagcgtcttgtcatggcgggcggcgtcagcgctaaccgcacgctgcgtgcgaagcttgccgaaatgatgcaaaaacgccgcggcgaagtgttctatgcgcgcccggaattttgtaccgacaacggggcgatgatcgcctatgccggaatggtgcggtttaaggcgggcgttacggcggatcttggcgtaacggtacgtccgcgctggccgctggccgagctgccggcggcgtaa

SEQ ID NO: 42063 - protein, 337 aa, Salmonella typhi
  misc_feature (43)..(43): The Xaa at location 43 stands for Leu, Met, or Val.
  misc_feature (81)..(81): The Xaa at location 81 stands for Arg, Cys, Gly, or Ser.
  misc_feature (102)..(102): The Xaa at location 102 stands for Arg, Gly, or Trp.
MRVLGIETSCDETGIAIYDDKKGLLANQLYSQVKLHADYGGVXPELASRDHVRKTVPLIQAALKEAALTASDIDAVAYTAXPGLVGALLVGATVGRSLAFAXNVPAIPVHHMEGHLLAPMLEDNPPDFPFVALLVSGGHTQLISVTGIGQYELLGESIDDAAGEAFDKTAKLLGLDYPGGPMLSKMASQGTAGRFVFPRPMTDRPGLDFSFSGLKTFAANTIRSNGDDEQTRADIARAFEDAVVDTLMIKCKRALESTGFKRLVMAGGVSANRTLRAKLAEMMQKRRGEVFYARPEFCTDNGAMIAYAGMVRFKAGVTADLGVTVRPRWPLAELPAA

SEQ ID NO: 42064 - DNA, 1014 bp, Klebsiella pneumoniae subsp. pneumoniae MGH 78578
  CDS (1)..(1014): transl_table=11
atgcgtgtactgggcattgaaacatcctgcgatgaaaccggcatcgcgatttatgacgaccagcaaggtctgttagccaaccaattgtatagtcaggtgaaactgcatgcggattacggcggcgtggtgccggagctggcatcgcgcgaccacgtgcgcaaaacggtgccgctgatccaggcggcgctgaaagaagccggtctgacggcgaaagatatcgacgccgtcgcctatacggcgggtccaggcctggtcggcgcgctgctggtcggggcgaccgttggccgggcgctggccttcgcctggaacgtgccggcgatcccggtacaccatatggaagggcatctgctggcgccgatgctggaagataatccgccggcgttcccgttcgtcgcgctgctggtttccggcggccacacccagttgattagcgtcaccggtattggtcagtatgaactgctgggcgagtcgattgacgatgcggcgggcgaagcctttgataagacggcgaagctgctgggattggattatcccggcgggccgatgctgtcgaaaatggcgtcccagggcaccgaaggccgctttgtcttcccgcggccgatgaccgaccgtccggggctggacttcagcttctccggcctgaagaccttcgccgccaacaccattcgcagcaacggcgacgatgagcaaacccgcgccgacatcgcccgggcgtttgaggatgcggtcgtcgatacgctgatgattaaatgtcgccgcgcgctggagcaaaccggctttaagcgtctggtgatggcgggaggcgtgagcgccaaccgtaccctgcgggcgaagctggcggagatgatgcaaaaacgcggcggcgaggtgttctacgctcgccctgagttctgtactgacaacggcgcgatgatcgcctacgccggcatggtgcgtctgcaaaccggcgccaaagccgagctcggcgtgacggttcgcccgcgctggccgctggccgagctgcctgccgcctaa

SEQ ID NO: 42065 - protein, 337 aa, Klebsiella pneumoniae subsp. pneumoniae MGH 78578
MRVLGIETSCDETGIAIYDDQQGLLANQLYSQVKLHADYGGVVPELASRDHVRKTVPLIQAALKEAGLTAKDIDAVAYTAGPGLVGALLVGATVGRALAFAWNVPAIPVHHMEGHLLAPMLEDNPPAFPFVALLVSGGHTQLISVTGIGQYELLGESIDDAAGEAFDKTAKLLGLDYPGGPMLSKMASQGTEGRFVFPRPMTDRPGLDFSFSGLKTFAANTIRSNGDDEQTRADIARAFEDAVVDTLMIKCRRALEQTGFKRLVMAGGVSANRTLRAKLAEMMQKRGGEVFYARPEFCTDNGAMIAYAGMVRLQTGAKAELGVTVRPRWPLAELPAA

SEQ ID NO: 42066 - DNA, 1143 bp, Oryza sativa (japonica cultivar-group)
  CDS (1)..(1143)
atgacgtcatcgccggcggcgaggcgccggccgccgggtccgctggcgctggggctggagtcgtcggcgaacaagatcggcatcggcgtcgtctccctctcgggggagatcctctccaacccgcgtcacacctacgtcaccccgccggggcacggcttcctgccgcgggagacggcgcaccaccacctcgcccacctcctcccgctcctccgcgcggcgctgggcgaggccggggtgacccccgccgacctcgcctgcgtgtgctacaccaaggggcccgggatgggcgcgccgctccaggtcgccgccgccgcggcgcgcgcgctctcgctgctctgggggaagccgctcgtcggcgtgaaccactgcgtcgcgcacgtcgagatgggccgcgcggtcaccggcgccgtcgaccccgtcgtgctctacgtctccggcgggaacacgcaggtcatcgcgtacagcgaagggaggtacaggatcttcggcgagaccatcgacatcgcggtggggaactgcctcgatcgctttgccagggtgcttgagctgtccaatgatcctagccctgggtataacatcgagcagcttgcgaagaagggagagaagttcattgatctcccttatgttgtaaagggtatggacgtgtcatttagtggcatactgagcttcattgaagctacagcaattgagaagcttaaaaataatgagtgcacgcctgcagatctatgctactcattgcaggaaactctctttgctatgcttgttgaaatcactgagcgtgccatggcacattgtgattcgaaggatgttcttattgttggtggtgttgggtgcaatgaacgtttgcaagagatgatgaggataatgtgttcagaaagagggggtaggctgttcgcaaccgatgatcgatactgtattgacaacggggcaatgattgcatacactggtttactggcatacgcacatggcatgaccactcccctagaggagtccacttttactcaaagattccgaacggacgaagttcatgcaatctggagggagaaggagatgccagtgttaactaacatccgtgcccatgcaatggctgaagtatccaaagatgaagcttccgttccgactccaattgctgtagattcatga

SEQ ID NO: 42067 - protein, 380 aa, Oryza sativa (japonica cultivar-group)
MTSSPAARRRPPGPLALGLESSANKIGIGVVSLSGEILSNPRHTYVTPPGHGFLPRETAHHHLAHLLPLLRAALGEAGVTPADLACVCYTKGPGMGAPLQVAAAAARALSLLWGKPLVGVNHCVAHVEMGRAVTGAVDPVVLYVSGGNTQVIAYSEGRYRIFGETIDIAVGNCLDRFARVLELSNDPSPGYNIEQLAKKGEKFIDLPYVVKGMDVSFSGILSFIEATAIEKLKNNECTPADLCYSLQETLFAMLVEITERAMAHCDSKDVLIVGGVGCNERLQEMMRIMCSERGGRLFATDDRYCIDNGAMIAYTGLLAYAHGMTTPLEESTFTQRFRTDEVHAIWREKEMPVLTNIRAHAMAEVSKDEASVPTPIAVDS

SEQ ID NO: 42068 - DNA, 1089 bp, Mesorhizobium loti MAFF303099
  CDS (1)..(1089): transl_table=11
ttgatccgcgttctgggcattgagacgagttgcgacgagaccgccgccagcgtcgtggcgctggagggcgatgccgcgccgaaaatcctgtccaacatcgtgctttctcagatcgaggaacatgccgccttcggcggtgtcgtgcccgagatcgccgcccgcgcccatgtcgaggcgctggacggcatcgtcgaggcggcgctggcggattcgggcacaacccttgccgatatcgatgcgatcgccgccaccgctggccccggcctggtcggcgggctgatcgtcgggctgatgacggccaaggcgatcgccgccgcggcaggcaagccgctgatcgccgtcaaccaccttgaaggccatgccttgacggcgcggctgaccgacgggctcgaatttccctatttgctgctgctggtctccggcggccacacgcagatcctggcggtgcgcggcgtcggcgactatcagcgctgggccaccaccatcgacgacgcgctcggcgaagccttcgacaagaccgccaagatgctcggcctgccctatcccggcggaccgaatgtcgagaaggcagcacagacgggcaatgcctcacgctttaccttccctcgcccgatgaaaggctcggcgcagcccgacttctccttctccggtttgaagaccgccgtgcgccaggcggcgaccgcgatcgagccgctgggcgaccaggacgtcgccgacatctgcgcctcgttccaggcggcggtcgccgatgcgctggccgaccgcgtttcgcgcgcgctggcgcgattcagccagacatttcccggcacgaaaaacccggctttggtcgttgccggcggcgtcgccgccaaccataccatcaaggcaacgctggaacggctctgcgccgaggccggtttcatcttcgtcgcgccgccgctcaaactgtgcaccgacaatgccgcgatgatcgcctgggccggcatcgaacggctgcgggaaggcatggcgcaggagaacggcttcgatttcgtgccgcgctcgcgctggccgctggacagcatctcggcgccgatggtcggttccggccggcgcggagccaaggcatga

SEQ ID NO: 42069 - protein, 362 aa, Mesorhizobium loti MAFF303099
MIRVLGIETSCDETAASVVALEGDAAPKILSNIVLSQIEEHAAFGGVVPEIAARAHVEALDGIVEAALADSGTTLADIDAIAATAGPGLVGGLIVGLMTAKAIAAAAGKPLIAVNHLEGHALTARLTDGLEFPYLLLLVSGGHTQILAVRGVGDYQRWATTIDDALGEAFDKTAKMLGLPYPGGPNVEKAAQTGNASRFTFPRPMKGSAQPDFSFSGLKTAVRQAATAIEPLGDQDVADICASFQAAVADALADRVSRALARFSQTFPGTKNPALVVAGGVAANHTIKATLERLCAEAGFIFVAPPLKLCTDNAAMIAWAGIERLREGMAQENGFDFVPRSRWPLDSISAPMVGSGRRGAKA

SEQ ID NO: 42070 - DNA, 1062 bp, Arabidopsis thaliana
  CDS (1)..(1062)
atgaagaagaagatgatagccattggtttcgaaggatcagctaacaagattggagttggaattgtgactttagacggtactatcttagcaaatcctcggcatacgtatataacaccacctggtcatggttttcttcctagagagactgcacatcaccatcttgaccatgttcttcctttagtcaaatcagctttagagacttctcaagttactcctgaagaaatcgactgtatttgttatacgaaaggtcccgggatgggagcgccgttgcaggtttcagccattgttgttagagtattgtcacagctttggaaaaagccaattgttgctgtgaatcattgtgtggctcacattgagatggggagagtagttactggagctgatgatcctgttgtgttgtatgtgagtggtggtaacactcaggtgattgcttatagtgaaggtaggtaccggatttttggtgagactattgatattgctgttggtaattgtttggatcggtttgctagagtcttgaagctttctaatgatccaagccctggttataacattgaacagcttgctaagaaaggagaaaactttattgatcttccgtatgctgttaaaggtatggatgtatcgttcagcggaatcttgagttatatcgaaactactgcagaggagaagctcaagaataacgagtgtacaccagcagacttgtgttattcccttcaagagacggtgtttgcgatgttggttgagatcacagaaagagcgatggcgcattgtgacaagaaagacgttttgatagttggcggtgttgggtgtaacgagcgtttgcaggaaatgatgaggactatgtgctcagaacgtgatggtaagctgtttgcaacagatgaccgttactgcatcgataatggagctatgatcgcttacacaggtctactcgcgtttgttaatggtattgaaacaccgatcgaagactctacctttacacaacgatttcgcacagacgaggttcatgcggtgtggcgagagaaagaagctgtactacttggggataagaaagttgcagcgaattga

SEQ ID NO: 42071 - protein, 353 aa, Arabidopsis thaliana
MKKKMIAIGFEGSANKIGVGIVTLDGTILANPRHTYITPPGHGFLPRETAHHHLDHVLPLVKSALETSQVTPEEIDCICYTKGPGMGAPLQVSAIVVRVLSQLWKKPIVAVNHCVAHIEMGRVVTGADDPVVLYVSGGNTQVIAYSEGRYRIFGETIDIAVGNCLDRFARVLKLSNDPSPGYNIEQLAKKGENFIDLPYAVKGMDVSFSGILSYIETTAEEKLKNNECTPADLCYSLQETVFAMLVEITERAMAHCDKKDVLIVGGVGCNERLQEMMRTMCSERDGKLFATDDRYCIDNGAMIAYTGLLAFVNGIETPIEDSTFTQRFRTDEVHAVWREKEAVLLGDKKVAAN

SEQ ID NO: 42072 - DNA, 984 bp, Thermotoga maritima MSB8
  CDS (1)..(984): transl_table=11
atgagagttcttggaatagaaacgtcctgcgatgaaacggcggtcgctgttctggacgatggtaaaaacgttgttgtgaatttcacagtttctcagatagaggtccaccagaagtttggaggggtggtgcctgaagtggcggccaggcaccacctcaaaaatttacccattcttttgaagaaagcttttgaaaaagtcccaccggagacagtggatgtcgttgcggccacctatggacctggcctaatcggtgccctcctcgttggtctgtccgcagcaaaaggactcgccatttcgcttgaaaaacccttcgttggagtgaatcacgtagaggctcatgtgcaggcggtttttttggcaaaccctgatctgaaaccacccctcgttgttttgatggtttcaggtgggcacacacagctgatgaaagtggatgaggactattccatggaagtgctgggtgaaacgctcgatgattcggcgggggaggcattcgataaggtggctcgcctcctcggactcggatatcctggaggtcctgtgatcgacagagtggcaaagaaaggagatcctgaaaagtacagcttccctcgtccgatgctggatgatgacagttacaacttcagctttgcgggtttgaagacttctgtcctctatttcctccagagggaaaaaggctacaaggtagaagacgttgcggcttctttccagaaggcggtcgttgatattctcgttgaaaaaaccttccgactggcgagaaatcttggaatcagaaaaatagcgttcgtcggaggtgttgccgcgaattctatgttgagagaagaggtacggaaaagggcggaaagatggaattacgaggttttctttccaccgttggaactctgcacggacaacgctctgatggtcgcaaaggcgggctacgaaaaagcgaaaagggggatgttctcccccttgagtttgaacgccgatcccaacttgaatgtttag

SEQ ID NO: 42073 - protein, 327 aa, Thermotoga maritima MSB8
MRVLGIETSCDETAVAVLDDGKNVVVNFTVSQIEVHQKFGGVVPEVAARHHLKNLPILLKKAFEKVPPETVDVVAATYGPGLIGALLVGLSAAKGLAISLEKPFVGVNHVEAHVQAVFLANPDLKPPLVVLMVSGGHTQLMKVDEDYSMEVLGETLDDSAGEAFDKVARLLGLGYPGGPVIDRVAKKGDPEKYSFPRPMLDDDSYNFSFAGLKTSVLYFLQREKGYKVEDVAASFQKAVVDILVEKTFRLARNLGIRKIAFVGGVAANSMLREEVRKRAERWNYEVFFPPLELCTDNALMVAKAGYEKAKRGMFSPLSLNADPNLNV

SEQ ID NO: 42074 - DNA, 1032 bp, Pasteurella multocida subsp. multocida str. Pm70
  CDS (1)..(1032): transl_table=11
atgcgcgtgttaggcattgaaacctcctgtgatgaaacaggggtcgcgatttatgatgaagaaaaaggtttagtggcaaaccagttatacacacaaattgctttacatgctgattacggcggggtcgtgcccgaattagcatcgcgcgatcatattcgaaaaaccgctcctttgatccaagcggcgttagcacaagctaatttaacgcccgacgagatcgatgggatcgcgtatacctctggtccaggcttagtcggtgcattattagtgggatccactattgcacgctctttagcttatgcttggaatgtgccagctattggtgtacaccatatggaagggcatttgctagcaccaatgttggaagataatccaccgacattcccttttgttgcgttattagtctcagggggacacacgcaattagtccgtgtcgatggcgtaggacgttatcagttactgggtgaatcaattgatgatgcggcaggcgaagcctttgataaaacagcgaaattattaggcttagattatccgggtggtgccgcgttggcgcgtttggcggaaaaaggtgatcctaaacgttttaagtttccacgtccgatgacggatcgtccaggtttggattttagtttctccggtttaaaaacctttgctgccaatacactgcagcaagcgataaaagaagaaggggaattaaccgaacaaaccaaagcagatattgcctatgctttccaacaagctgtggttgaaactttagtgattaaatgccgccgtgcgttaaaagaaacgggatttaaccgcctcgtgattgcggggggcgtaagtgcaaataagcaacttcgtcaggatttagcacaattaatgcagcagttaaaaggggaagtattttatccacaaccacaattttgtaccgataatggagccatgattgcctatactggttttttacgtttaaaacaaggggagtcacaaccgcttgcgattcaggtaaagccgcgttgggcgatgactgagctttctgcgattgattaa

SEQ ID NO: 42075 - protein, 343 aa, Pasteurella multocida subsp. multocida str. Pm70
MRVLGIETSCDETGVAIYDEEKGLVANQLYTQIALHADYGGVVPELASRDHIRKTAPLIQAALAQANLTPDEIDGIAYTSGPGLVGALLVGSTIARSLAYAWNVPAIGVHHMEGHLLAPMLEDNPPTFPFVALLVSGGHTQLVRVDGVGRYQLLGESIDDAAGEAFDKTAKLLGLDYPGGAALARLAEKGDPKRFKFPRPMTDRPGLDFSFSGLKTFAANTLQQAIKEEGELTEQTKADIAYAFQQAVVETLVIKCRRALKETGFNRLVIAGGVSANKQLRQDLAQLMQQLKGEVFYPQPQFCTDNGAMIAYTGFLRLKQGESQPLAIQVKPRWAMTELSAID

SEQ ID NO: 42076 - DNA, 1041 bp, Lactococcus lactis subsp. lactis Il1403
  CDS (1)..(1041): transl_table=11
atgaaagataattatatattagcctttgaaacttcatgtgatgaaacttcagtggcaattttaaagaatggaaatgaattattatgtaatatcattgccagtcaaatcaatagtcataaacgctttggtggagttgtgccagaaattgccagccgtcatcacgtcgaacaaattactgtttgtattgaagcagcacttgaagaagcagaaatttcggctgaccaactgacggccgttgcggtgaccgaaggtccaggcttaaatggcgctttgttagttggaatcatggcagcaaaaacttttgcatgggcaaatcatcttcctttgattccagttaatcacatggccggtcatttgatggctgcaagtttagtggataccattgaatatccagctatggcccttttggtttcaggtggacattctgaacttgtttacgtagaaaaagaaggaagctataaaaaagttggtgaaactcgtgacgatgctgccggtgaagcttatgataaagttggtcgagtgatgggcctgacttatccgagtggaaaagtcattgatgaattagcacacaaaggagctgatacttacaatttcccacgagcaatgatgaacacacatgaagtagaatttagcttctcaggcttaaaatcagcctttattaatctcgttcataacgaaaatcaaaaaggaaatgacgtgattgctgatgatttagaaaatttagctgcttcctttcaagctgcggtcgtcgatgtccttatggccaaaaccaaattagccatggaaaaatacccagtaaaaacgctaataattggcggtggagtatcagcaaatcaaggcttacgcgaacgtttgtcagcagaaattactgacgaaaagttaattattcctcctttaagactctgtggtgacaatgctggaatgattgcagcagcagcatatatcgaatggaaaaaaggtttagaaaatgttcaagcaggattagatttaaatgcaaaacctagtctcgtttttgaagacatagaagaaggagaagtttaa

SEQ ID NO: 42077 - protein, 346 aa, Lactococcus lactis subsp. lactis Il1403
MKDNYILAFETSCDETSVAILKNGNELLCNIIASQINSHKRFGGVVPEIASRHHVEQITVCIEAALEEAEISADQLTAVAVTEGPGLNGALLVGIMAAKTFAWANHLPLIPVNHMAGHLMAASLVDTIEYPAMALLVSGGHSELVYVEKEGSYKKVGETRDDAAGEAYDKVGRVMGLTYPSGKVIDELAHKGADTYNFPRAMMNTHEVEFSFSGLKSAFINLVHNENQKGNDVIADDLENLAASFQAAVVDVLMAKTKLAMEKYPVKTLIIGGGVSANQGLRERLSAEITDEKLIIPPLRLCGDNAGMIAAAAYIEWKKGLENVQAGLDLNAKPSLVFEDIEEGEV

SEQ ID NO: 42078 - DNA, 1065 bp, Neisseria meningitidis MC58
  CDS (1)..(1065): transl_table=11
atgttggtattaggaatcgagtcttcttgcgacgaaacaggtgttgcgctttacgatacggaacgtggattgcgggcgcactgcctgcacactcaaatggcaatgcacgccgaatacggcggggttgtgccggaattggcaagccgcgaccatatccgccgccttgttccgttgacggaaggctgtctggcgcaggcaggcgcatcgtatggcgacattgacgcggttgcctttacgcaggggcccggtttgggcggcgcgctgctggcgggttcgagctacgccaacgcgctggctttagcgttggacaagcctgttattcccgtccatcatttggaaggacatctgctgtcgccgctgttggcggaggaaaaacccgactttccttttgtcgcgctgttggtttcgggcgggcatacgcagattatggcggtcaggggcataggcgactacgcgcttttgggcgagagcgtcgatgatgcggcgggcgaggcattcgacaaaacggcgaaactgctgggcttgctgtatccgggcggtgcgaaactgtcggaacttgcggaatcgggcaggttcgaagcgtttgtttttccgcgcccgatgattcattccgacgatttgcagatgagtttttcaggtttgaaaaccgccgtattgaccgccgtcgagaaagtgcgcgcggaaaacggggcggatgacattcctgagcagacacgcaacgacatctgccgtgcgtttcaagatgcggtagtcgatgtgttggcggcgaaagtgaaaaaagccctgttgcagacagggttcagaaccgtagtggtcgccggcggggtcggtgcaaaccgcaagctccgtgaaactttcggcaacatgacggtgcaaatcccgacccccaaaggcaagccgaaacatccgtccgaaaaagtcagcgtgtttttcccgccgacggcatactgcacggacaacggtgccatgattgcctttgccggtgcgatgcacctgggcaagggcagggaggtcggtgcgttcaatgtccgtccgcgctggccgctgtcggaaatcgtcagatga

SEQ ID NO: 42079 - protein, 354 aa, Neisseria meningitidis MC58
MLVLGIESSCDETGVALYDTERGLRAHCLHTQMAMHAEYGGVVPELASRDHIRRLVPLTEGCLAQAGASYGDIDAVAFTQGPGLGGALLAGSSYANALALALDKPVIPVHHLEGHLLSPLLAEEKPDFPFVALLVSGGHTQIMAVRGIGDYALLGESVDDAAGEAFDKTAKLLGLLYPGGAKLSELAESGRFEAFVFPRPMIHSDDLQMSFSGLKTAVLTAVEKVRAENGADDIPEQTRNDICRAFQDAVVDVLAAKVKKALLQTGFRTVVVAGGVGANRKLRETFGNMTVQIPTPKGKPKHPSEKVSVFFPPTAYCTDNGAMIAFAGAMHLGKGREVGAFNVRPRWPLSEIVR

SEQ ID NO: 42080 - DNA, 1008 bp, Campylobacter jejuni subsp. jejuni NCTC 11168
  CDS (1)..(1008): transl_table=11
atgaaaaatcttatcctagctatagaaagttcttgtgatgatagttctatagctatcattgataaaaacaccttagaatgtaaatttcataaaaaaatttcccaagaattagatcatagtatctatgggggagtggtacctgaacttgctgcaagacttcatagcgaggctttaccaaagatgcttaagcaatgcaaagagcattttaaaaatctttgtgccatagctgtgacaaatgaacctggacttagtgtttctttgctcagtggaatttctatggcaaaaaccttagcaagtgcgctaaatttacccttaatccctataaatcatcttaaaggtcatatttatagtctttttttggaagaaaaaatttctttagatatgggaattttgcttgttagtggtgggcataccatggtgctttatcttaaagatgatgcaagcttagagcttttagcaagtacaaatgatgatagctttggagaaagttttgataaagtggctaaaatgatgaatttaggttaccctggtggggtcatcatagaaaatttagcaaaaaatgccaaacttaaaaatatctcttttaacacacctttaaagcattctaaagaactcgctttcagtttttcagggcttaaaaatgcagtgcgtttggaaattttaaaacatgaaaatttaaatgaagacacaaaagcagaaatagcctatgcctttgaaaatacagcttgtgatcatatcatggataaattagaaaaaatttttaatctttataaatttaaaaattttggcgttgtaggtggagctagtgcaaatcttaacttgcgttcgcgtttgcaaaatttatgtcaaaaatataatgcaaatttaaaactagctcctttaaaattctgctctgataatgctttgatgatagcaagagccgcagttgatgcttatgaaaaaaaggaatttgtaagtgtagaagaagatattttaagccctaaaaataaaaatttttcaaggatatag

SEQ ID NO: 42081 - protein, 335 aa, Campylobacter jejuni subsp. jejuni NCTC 11168
MKNLILAIESSCDDSSIAIIDKNTLECKFHKKISQELDHSIYGGVVPELAARLHSEALPKMLKQCKEHFKNLCAIAVTNEPGLSVSLLSGISMAKTLASALNLPLIPINHLKGHIYSLFLEEKISLDMGILLVSGGHTMVLYLKDDASLELLASTNDDSFGESFDKVAKMMNLGYPGGVIIENLAKNAKLKNISFNTPLKHSKELAFSFSGLKNAVRLEILKHENLNEDTKAEIAYAFENTACDHIMDKLEKIFNLYKFKNFGVVGGASANLNLRSRLQNLCQKYNANLKLAPLKFCSDNALMIARAAVDAYEKKEFVSVEEDILSPKNKNFSRI

SEQ ID NO: 42082 - DNA, 1014 bp, Escherichia coli O157:H7 EDL933
  CDS (1)..(1014): transl_table=11
atgcgtgtactgggtattgaaacttcctgcgatgaaaccggcatcgccatttacgacgatgaaaaaggtttgttagccaaccaattgtatagtcaggtgaaattgcacgctgactacgggggcgttgtgcctgaactggcctcccgcgatcatgtgcgtaaaaccgtaccgttgatccaggcggcgctaaaggagtctggtttaacggcaaaagacattgatgctgtggcctataccgcaggccctggattagtcggcgcactgctggttggcgcgaccgtggggcgttctctggcgtttgcctggaacgttccggcgatccctgtacaccatatggaagggcatctgttagcgccgatgctggaagataacccgccggaatttccgtttgttgcgctgctggtttccggcggtcatacgcagttaatcagcgtgactggcattggtcagtacgagctgctcggcgagtctatcgatgatgccgccggtgaagcgtttgataaaaccgcgaagctgctggggctggattatcctggcggaccgttactgtcgaaaatggcggcgcagggtactgccgggcgctttgttttcccgcgtccgatgaccgaccgtccggggctggatttcagcttctccggcctgaaaaccttcgcggcaaataccattcgtgacaacggcaccgacgaccagacgcgtgctgacatcgcccgcgcctttgaagatgcggtggtcgatacgttgatgattaagtgtaagcgtgcgctggatctgacgggctttaagcgactggtcatggcgggcggcgtgagtgctaaccgcacgttacgggcgaagctggctgaaatgatgaaaaaacgccgcggcgaagtgttctacgcgcgtccggaattttgtactgataacggcgcgatgatcgcctatgccggaatggtgcggtttaaagcaggcgcgacggcggatctcggcgttagcgtgcgtccgcgctggccgctggcggagttaccggctgcgtaa

SEQ ID NO: 42083 - protein, 337 aa, Escherichia coli O157:H7 EDL933
MRVLGIETSCDETGIAIYDDEKGLLANQLYSQVKLHADYGGVVPELASRDHVRKTVPLIQAALKESGLTAKDIDAVAYTAGPGLVGALLVGATVGRSLAFAWNVPAIPVHHMEGHLLAPMLEDNPPEFPFVALLVSGGHTQLISVTGIGQYELLGESIDDAAGEAFDKTAKLLGLDYPGGPLLSKMAAQGTAGRFVFPRPMTDRPGLDFSFSGLKTFAANTIRDNGTDDQTRADIARAFEDAVVDTLMIKCKRALDLTGFKRLVMAGGVSANRTLRAKLAEMMKKRRGEVFYARPEFCTDNGAMIAYAGMVRFKAGATADLGVSVRPRWPLAELPAA

SEQ ID NO: 42084 - DNA, 1023 bp, Clostridium acetobutylicum ATCC 824
  CDS (1)..(1023): transl_table=11
atgtgtaaagacattaagatacttgcaatagaaagtagttgtgatgaaactgccgcggctgttgttgtcaatggcagaaaggtattatctaatataatatcatcgcaaatagatatacataaaaagttcggaggagtcgttccagagatagcatcaagaaagcatatcgaaaatatatcattggtggttcaggatgctataaaagaagctggtgtagagcttaaagatattgatgctgttggagttacatatggaccgggacttgtaggagcgcttcttgtaggacttcaatatgccaaaggacttgcgtactcaataaacaaacctcttataggagttaatcatatagaaggacatataagtgcaaattttatacaatacccagatttaaagcctccatttgcatgtcttgtagtatctggaggacatacttttatagtatatatgaaagattacggtgagtttgaagttttaggtcagacgagagatgatgctgcaggagaagcttttgataagattgcaagagctataggtcttggttatccaggtggacctaagattcaggaaatggctaaaagaggagatgaaagtgcacttcaatttccaagagctaagtttcatgataattctttggatttctcttttagcggagttaaatctgcagtactcaactatttaaatactatgaagatgcaagaaaaagaaataaatagagcagatgttgcagcatcatttcaaaaaaatgttgttgatttcctggttgataatactattaaggcttgtaaaataaagaagatagatagaatagcagttgcaggtggtgtggcctcaaacagcttcttaagggagacaatggtaagtcgaggaagagagaatgggatagatgtattgtttccagcaccaatactatgcactgataatgcagcaatgattggaagtgcagcgtattttgagtttaaaaaaggaaatattgcacctcttgatttaaatgctatacctaatttgaaactaggggaaagataa

SEQ ID NO: 42085 - protein, 340 aa, Clostridium acetobutylicum ATCC 824
MCKDIKILAIESSCDETAAAVVVNGRKVLSNIISSQIDIHKKFGGVVPEIASRKHIENISLVVQDAIKEAGVELKDIDAVGVTYGPGLVGALLVGLQYAKGLAYSINKPLIGVNHIEGHISANFIQYPDLKPPFACLVVSGGHTFIVYMKDYGEFEVLGQTRDDAAGEAFDKIARAIGLGYPGGPKIQEMAKRGDESALQFPRAKFHDNSLDFSFSGVKSAVLNYLNTMKMQEKEINRADVAASFQKNVVDFLVDNTIKACKIKKIDRIAVAGGVASNSFLRETMVSRGRENGIDVLFPAPILCTDNAAMIGSAAYFEFKKGNIAPLDLNAIPNLKLGER

SEQ ID NO: 42086 - DNA, 1101 bp, Agrobacterium tumefaciens str. C58
  CDS (1)..(1101): transl_table=11
ttgatgcccccctttcttcgtattctcggcatagagacaagctgtgacgaaaccgctgcatccattgtggttcggcatgcggacgggcgtggcgagatcgtctccgatgtcgttttgtcgcagcttgaggaacacagtgcctatggcggtgtggtgccggaaattgctgcgcgcgcccatgtcgaggcgctggacacgctggtggaagaagcgctggatcaggcgggcgtcaagcttgccgatgtcgacgccattgcagccacctccggccctgggctcatcggtgggctactggtggggctgatgaccggcaaggccatcgccaaggcggccggcaaaccgctctacgccatcaatcatctggaaggccacgcgctgacggcgcgactgaccgatggtctgtcttttccctatctgatgttgctcgtctccggcggtcacacccaactggtgctggtgcgcggggtgggggaatacgagcgctggggcaccaccatcgacgacgcgctcggcgaggccttcgacaagaccgccaaacttctcgggctgccctatcccggtgggcctgccgtcgagaacgcggcggcgaagggtgacccggaccgttttccgctcccgcgcccgatggttggggaagcacggctcgatttttccttctcgggcttgaagacagcggtgcggcaggctgcgaccgccatcgcgccgctttcggagcaggatattgccgatatctgcgcctccttccagaaggcggtgtcgcgcaccctgaaagaccgtatcggccgtggccttgcgcgtttcaaagtagaatttccgcatatcaatggagaaccggctcttgtggtggccggcggcgtagccgccaaccaggaaatccgccagaccctgcaggcactttgcgatacacacggcttccgcttcgtcgcgccgccgcaccggctttgcaccgataatgctgcgatgatcgcctgggcgggtctggagcgcatggcggaaggcaggcaagccgatgcgcttgaggtcgcgccgcgctctcgctggccgcttgacggtagcgcggagacattgattggtttcggtaaaaggggagccaaggcctga

SEQ ID NO: 42087 - protein, 366 aa, Agrobacterium tumefaciens str. C58
MMPPFLRILGIETSCDETAASIVVRHADGRGEIVSDVVLSQLEEHSAYGGVVPEIAARAHVEALDTLVEEALDQAGVKLADVDAIAATSGPGLIGGLLVGLMTGKAIAKAAGKPLYAINHLEGHALTARLTDGLSFPYLMLLVSGGHTQLVLVRGVGEYERWGTTIDDALGEAFDKTAKLLGLPYPGGPAVENAAAKGDPDRFPLPRPMVGEARLDFSFSGLKTAVRQAATAIAPLSEQDIADICASFQKAVSRTLKDRIGRGLARFKVEFPHINGEPALVVAGGVAANQEIRQTLQALCDTHGFRFVAPPHRLCTDNAAMIAWAGLERMAEGRQADALEVAPRSRWPLDGSAETLIGFGKRGAKA

SEQ ID NO: 42088 - DNA, 1035 bp, Rickettsia conorii str. Malish 7
  CDS (1)..(1035): transl_table=11
atgataaaaattttaggtatagaatcaagctgtgatgatacagctgtttctataatcaccgaaaatcgagaaatcttatctaatataatcatttcacaaaatacagaacatgcagtttttggaggggtagtacctgaaattgctgcacgttctcacttatcgcatctagataaagcattaaaaaatgttttaaaagaaagcaacactaaattaacggacattagtacaattgctgcaacttccggtccaggtttaatcggcggtgttatagttggctcaatgtttgcaagatcactaagcagtgctttaaaaaaaccctttattgcaattaatcatttagaaggtcatgctttaaccgcaagactaaccgataatattccttatccttatttactcttgttagcttcaggcggacattgccaatttgtagcagttttaggtctcggaaaatataaaatactaggatctactatagatgatgccgtaggcgaagcctttgacaaggtagccaaaatgctaaacttagcttttcccggaggacctgaaattgagaaaagagcaaaacttggcgatcctcataaatataaatttccaaaacctataattaacagcggtaattgcaatatgtccttttcaggacttaaaactgccgtgcgtactttaataatgactttaaaggaaattaatgacactgtaatcaatgatatagcggcaagttttcaatttactataggagaaattctaagtagtaaggtacaagatgctattagagcatatgaacaaataacaaataattttgataagaagaatatagttattgccggcggtgtcgctgctaataaatatttacaaaaaatattaagtagctgtgctaaaacatatggttatcggcttatttatccacctatccacttatgcaccgataatgctgcaatgattgcatatgcaggacttgagcgttacaataataagttatttactcctttgaatttctgtccaaaagctaggtggagtttagaggatattagtaattaa

SEQ ID NO: 42089 - protein, 344 aa, Rickettsia conorii str. Malish 7
MIKILGIESSCDDTAVSIITENREILSNIIISQNTEHAVFGGVVPEIAARSHLSHLDKALKNVLKESNTKLTDISTIAATSGPGLIGGVIVGSMFARSLSSALKKPFIAINHLEGHALTARLTDNIPYPYLLLLASGGHCQFVAVLGLGKYKILGSTIDDAVGEAFDKVAKMLNLAFPGGPEIEKRAKLGDPHKYKFPKPIINSGNCNMSFSGLKTAVRTLIMTLKEINDTVINDIAASFQFTIGEILSSKVQDAIRAYEQITNNFDKKNIVIAGGVAANKYLQKILSSCAKTYGYRLIYPPIHLCTDNAAMIAYAGLERYNNKLFTPLNFCPKARWSLEDISN

SEQ ID NO: 42090 - DNA, 1104 bp, Caulobacter crescentus CB15
  CDS (1)..(1104): transl_table=11
atgacatcccctaagcaatccgaccttctcatcctcggccttgagactagctgcgatgaaaccgcggcctcggtcgtgcgccgcgctgcggacgggacggtgacggtgctgtcgtcggtgatcggcacccagttcgagaagcacgccccgtttggcggcgtcgtgcccgagatcgccgcccgggcccacgtcgagtcgatcgacgccatcgccgccgaggctgttcgcgcggcgggcgtcgggttcggggacctggacggggtcgccgccacggcggggccgggccttgtgggcggggtcatggtggggctggcgttcggcaaggccgtagccttggcgcggggcgcgccgctggtggccgtcaaccacctggagggtcacgccgtctcggcccgcctgggggccgacatcgcctatccgttcctgctgctgctggtgtccggcgggcattgtcagctgctggaggtgtcgggcgtcggggcctgcaagcgcctgggcaccacgatcgacgacgccgccggcgaggccttcgacaagatcgccaagagtctgggcctgccctatcccggcggcccggcgctggagaagctggccgtgggcggcgatccgacccgctacgccctgccccgcgccctgctgggccgcaaggattgcgacttctcgttctcgggcctgaagaccgccgcggcgcggatcgccgagaccctgaccaccgacgacgcgcgccgcgacctggccgccggcgtccaggccgccatcgcccgccagctgtcggagcgggtcgatcgggcgatgaagctttacaaggacagccatgacccggaggacctgcgcttcgtggtcgccggcggcgtagcggccaatggcgcggtgcgggcggccctgctggccgactgcgagaagaacggcttttcgttcgccgcgccgcccctggcctattgcaccgacaacgccgccatgatcgccctcgccggagccgagcggctagcgctcgggatcttcgatgacctcgacgccatcgcccgtccgcgctggccgctggacgaggccgcggcgctggccaatcccgccaacgcctacggacgcaagggagccaaggcatga

SEQ ID NO: 42091 - protein, 367 aa, Caulobacter crescentus CB15
MTSPKQSDLLILGLETSCDETAASVVRRAADGTVTVLSSVIGTQFEKHAPFGGVVPEIAARAHVESIDAIAAEAVRAAGVGFGDLDGVAATAGPGLVGGVMVGLAFGKAVALARGAPLVAVNHLEGHAVSARLGADIAYPFLLLLVSGGHCQLLEVSGVGACKRLGTTIDDAAGEAFDKIAKSLGLPYPGGPALEKLAVGGDPTRYALPRALLGRKDCDFSFSGLKTAAARIAETLTTDDARRDLAAGVQAAIARQLSERVDRAMKLYKDSHDPEDLRFVVAGGVAANGAVRAALLADCEKNGFSFAAPPLAYCTDNAAMIALAGAERLALGIFDDLDAIARPRWPLDEAAALANPANAYGRKGAKA

SEQ ID NO: 42092 - DNA, 1014 bp, Salmonella enterica subsp. enterica serovar Typhi str. CT18
  CDS (1)..(1014): transl_table=11
atgcgtgtactgggtattgaaacatcttgcgatgaaaccggcatcgctatttacgacgacaaaaaaggtctgttagccaaccaattgtatagtcaggtgaaattacatgctgattacggcggcgtagtgcctgaactggcttcccgcgatcatgtgcgtaaaaccgtgccgctgattcaggcggcattaaaagaagccgctctgacggcgagcgatatcgacgcggtggcctataccgcaggcccgggcttggtcggcgcgctgctggtcggcgcaaccgtcgggcgttcgctggcatttgcctggaatgtgccagccattcctgtacaccatatggaaggtcatctgctggcgccaatgctggaagataaccctccggatttcccgtttgtggcgctgctggtctccggcggacatacgcagctcattagcgtgaccggaatcggtcagtacgaactgctgggagagtcgattgacgatgccgccggtgaagcgtttgataaaaccgccaaattgttggggctggattatcctggcggcccgatgctgtcgaaaatggcgtcgcaggggacggcggggcgttttgtctttccgcgcccgatgaccgatcgcccggggctggattttagtttttccggtctgaaaacctttgccgctaacaccattcgtagtaatggcgacgacgaacaaactcgcgctgatatcgcgcgcgcttttgaagatgcggtcgtggatacgctgatgatcaagtgcaagcgcgcgctggaaagcaccggttttaagcgtcttgtcatggcgggcggcgtcagcgctaaccgcacgctgcgtgcgaagcttgccgaaatgatgcaaaaacgccgcggcgaagtgttctatgcgcgcccggaattttgtaccgacaacggggcgatgatcgcctatgccggaatggtgcggtttaaggcgggcgttacggcggatcttggcgtaacggtacgtccgcgctggccgctggccgagctgccggcggcgtaa

SEQ ID NO: 42093 - protein, 337 aa, Salmonella enterica subsp. enterica serovar Typhi str. CT18
MRVLGIETSCDETGIAIYDDKKGLLANQLYSQVKLHADYGGVVPELASRDHVRKTVPLIQAALKEAALTASDIDAVAYTAGPGLVGALLVGATVGRSLAFAWNVPAIPVHHMEGHLLAPMLEDNPPDFPFVALLVSGGHTQLISVTGIGQYELLGESIDDAAGEAFDKTAKLLGLDYPGGPMLSKMASQGTAGRFVFPRPMTDRPGLDFSFSGLKTFAANTIRSNGDDEQTRADIARAFEDAVVDTLMIKCKRALESTGFKRLVMAGGVSANRTLRAKLAEMMQKRRGEVFYARPEFCTDNGAMIAYAGMVRFKAGVTADLGVTVRPRWPLAELPAA

SEQ ID NO: 42094 - DNA, 1035 bp, Listeria monocytogenes EGD-e
  CDS (1)..(1035): transl_table=11
gtgggtggacttatgaaaaaaaatacattaattcttgggatagaatctagctgcgatgaaacagctgcttctgttgtaaaaaatggcaatgaaattatatcgagtgtcgtggcttcgcaaattgagagccataaacgatttggcggggtagttcccgaaatcgcctcgagacaccacgtggagcaaattacacttgtgattgaagaggccttaaaacaagcgaatgtgacaatggatgatttagacggggtagctgtgacagaagggccaggtctagttggagctctacttatcggagtgaatgcggctaaaacgctagcttttatgcacaatttacctttagtcggtgtacaccatattgcaggccatatttatgcaaatcgttttgaaactgaatttaaatttccgctactctcattagttgtcagcggcggtcatacggaactagttttaatgaaagcggacaatgagtttgaaattatcggggagacaagggacgatgcagctggtgaagcttatgataaagtagcgcgcacacttggtctcgcttatccgggcggcgtgcaaattgataaacttgccaaagacggcgaagacacttttcattttccaagggcgatgatggatgagggttcgtttgattttagttttagtggattgaagtcttcctttattaacacgcttcataatttaagacagcgtggtgaggagccgaatccaaacgatatggcggcgagttttcaagcaagcgttgtggatgttttagtaagtaaaacgattcgcgcagctaaacaatatgatgtgaaacaactgcttcttgctggaggcgtggcggcgaatcaaggtttacgagaacgacttattcaagaagtaaaactagaacttccggagaccgaattgattattccgccgttagccttatgcggagacaatgccgcaatgattgctgctgcagggacagtgagtttcttacaaggaaaacgtagtggttttgatatgaatgcgaatccgggattattgctggaagatatataa

SEQ ID NO: 42095 - protein, 344 aa, Listeria monocytogenes EGD-e
MGGLMKKNTLILGIESSCDETAASVVKNGNEIISSVVASQIESHKRFGGVVPEIASRHHVEQITLVIEEALKQANVTMDDLDGVAVTEGPGLVGALLIGVNAAKTLAFMHNLPLVGVHHIAGHIYANRFETEFKFPLLSLVVSGGHTELVLMKADNEFEIIGETRDDAAGEAYDKVARTLGLAYPGGVQIDKLAKDGEDTFHFPRAMMDEGSFDFSFSGLKSSFINTLHNLRQRGEEPNPNDMAASFQASVVDVLVSKTIRAAKQYDVKQLLLAGGVAANQGLRERLIQEVKLELPETELIIPPLALCGDNAAMIAAAGTVSFLQGKRSGFDMNANPGLLLEDI

SEQ ID NO: 42096 - DNA, 1098 bp, Agrobacterium tumefaciens str. C58
  CDS (1)..(1098): transl_table=11
atgcccccctttcttcgtattctcggcatagagacaagctgtgacgaaaccgctgcatccattgtggttcggcatgcggacgggcgtggcgagatcgtctccgatgtcgttttgtcgcagcttgaggaacacagtgcctatggcggtgtggtgccggaaattgctgcgcgcgcccatgtcgaggcgctggacacgctggtggaagaagcgctggatcaggcgggcgtcaagcttgccgatgtcgacgccattgcagccacctccggccctgggctcatcggtgggctactggtggggctgatgaccggcaaggccatcgccaaggcggccggcaaaccgctctacgccatcaatcatctggaaggccacgcgctgacggcgcgactgaccgatggtctgtcttttccctatctgatgttgctcgtctccggcggtcacacccaactggtgctggtgcgcggggtgggggaatacgagcgctggggcaccaccatcgacgacgcgctcggcgaggccttcgacaagaccgccaaacttctcgggctgccctatcccggtgggcctgccgtcgagaacgcggcggcgaagggtgacccggaccgttttccgctcccgcgcccgatggttggggaagcacggctcgatttttccttctcgggcttgaagacagcggtgcggcaggctgcgaccgccatcgcgccgctttcggagcaggatattgccgatatctgcgcctccttccagaaggcggtgtcgcgcaccctgaaagaccgtatcggccgtggccttgcgcgtttcaaagtagaatttccgcatatcaatggagaaccggctcttgtggtggccggcggcgtagccgccaaccaggaaatccgccagaccctgcaggcactttgcgatacacacggcttccgcttcgtcgcgccgccgcaccggctttgcaccgataatgctgcgatgatcgcctgggcgggtctggagcgcatggcggaaggcaggcaagccgatgcgcttgaggtcgcgccgcgctctcgctggccgcttgacggtagcgcggagacattgattggtttcggtaaaaggggagccaaggcctga

SEQ ID NO: 42097 - protein, 365 aa, Agrobacterium tumefaciens str. C58
MPPFLRILGIETSCDETAASIVVRHADGRGEIVSDVVLSQLEEHSAYGGVVPEIAARAHVEALDTLVEEALDQAGVKLADVDAIAATSGPGLIGGLLVGLMTGKAIAKAAGKPLYAINHLEGHALTARLTDGLSFPYLMLLVSGGHTQLVLVRGVGEYERWGTTIDDALGEAFDKTAKLLGLPYPGGPAVENAAAKGDPDRFPLPRPMVGEARLDFSFSGLKTAVRQAATAIAPLSEQDIADICASFQKAVSRTLKDRIGRGLARFKVEFPHINGEPALVVAGGVAANQEIRQTLQALCDTHGFRFVAPPHRLCTDNAAMIAWAGLERMAEGRQADALEVAPRSRWPLDGSAETLIGFGKRGAKA

SEQ ID NO: 42098 - DNA, 1080 bp, Brucella melitensis 16M
  CDS (1)..(1080): transl_table=11
atgcgcgttcttggaatagaaacaagttgcgacgaaacagccgccgcaatcgtcgagcgtgacgatatgggcgaagggcggattttgtccaatgtggttctgagccagattgccgagcacgagccctatggcggcgtggtgccggagatcgccgcccgcgcccatgtcgaggcattggacaggctggtggaccgtgccctgaacgacgcgggcctgaaactgtacgaggtggatgcagtggccgctacggctggccccggcctcatcggcgggctgatcgtcgggctgatgacggcaaaggcgctcgccatggctgcacaaaagcccttctatgccgtcaaccatctggaaggccacgcgctgacggcgcggctgaccgacggcctgccatttccctatctgctgcttctcgtttccggtggccacacgcagatggtgcttgtgcgcggcatcggcgattatgagcgcctcggcaccaccatcgacgatgcgctgggcgaagccttcgacaagaccgcaaagcttctcggcctgccttatcccggtggcccggctgtcgagcgcatggcgctacagggcgaccagaagcgttttgccctgccgcgcccgctgaaaggcgaagcacggctggatttttccttctccggccttaaaaccgccgtccgccagaccgcaaccgaattggtgcctctcaccgatcaggacgtcaccgatatatgcgcctcgtttcaggctgctgtcgccgatacgctttccgaccgtgtgggccgctcgctggagcgtttcaagacggaattcccggattgcgccacgccctccctggtggttgcaggcggggttgcagccaacaagaccctgcgtgccgcactggaaaacctctgcacccggcatggctttgcctttatcgctccgccgcttaatctttgcaccgacaatgcagcgatgatcgcatgggcgggggctgagcgcgccgcgacccaagcgcctgattcgcttgacatcgccccgcgctcgcgctggccgctcgacgaaaaatccgcgccggtcttcggcacgggacggcggggagcaaaggcatga

SEQ ID NO: 42099 - protein, 359 aa, Brucella melitensis 16M
MRVLGIETSCDETAAAIVERDDMGEGRILSNVVLSQIAEHEPYGGVVPEIAARAHVEALDRLVDRALNDAGLKLYEVDAVAATAGPGLIGGLIVGLMTAKALAMAAQKPFYAVNHLEGHALTARLTDGLPFPYLLLLVSGGHTQMVLVRGIGDYERLGTTIDDALGEAFDKTAKLLGLPYPGGPAVERMALQGDQKRFALPRPLKGEARLDFSFSGLKTAVRQTATELVPLTDQDVTDICASFQAAVADTLSDRVGRSLERFKTEFPDCATPSLVVAGGVAANKTLRAALENLCTRHGFAFIAPPLNLCTDNAAMIAWAGAERAATQAPDSLDIAPRSRWPLDEKSAPVFGTGRRGAKA

SEQ ID NO: 42100 - DNA, 1032 bp, Pyrobaculum aerophilum str. IM2
  CDS (1)..(1032): transl_table=11
gtgttagtcctaggcgtagagtccactgcccacacctttagcctcggacttgtattagacgggaaaatcttgggacagttggggaagacatacctccccccaagcggcgagggcattcacccccgggaagccgccgatcaccactccaaggtcgctccggttatcttccggcagttgctaaacgcgcatggcatcacggcatcagatatcgacgtaattgcatatgcggcagggcccgggctgggaccggcgttgagaataggcgcggtgttcgccagggctttggctataaaactgggggttcccctcgtccctgtccaccacggcatagcgcatatagaagtggcgagatacacaacggcgtcgtgcgatcccctagtcctcctaatctccggcggccacacgcttattgcgggtttttcagaaggtcggtatagaattttcggcgagactttagatgtggccattggaaacgctatagatatgtttgcaagagaggtgggccttggatttccgggggtacccgccgtggagaagtgcgcggaatctgcggataggctagtcccgttccccatgactataattggccaggacttatcctatgcgggcttgaccacatacgccttgaaactgtggaaaagcggcacgccgctacctgtagtgtgtaagtctctcgtagaggccgcctattatatgttagctgaagtgaccgagagggcgctcgcctttactaaaaaacgggagctcgtagtggcaggcggcgtggctaggagtaagaggctgagggggatattggaacatgtggggagggagtacggcgttgctgttaaaattgtgcctgatgaatacgccggtgacaacggcgcaatgatcgcgttgacgggctactacgcatacaggcgtgggatacgcacaacgcctgaagaaagctttgttaaacagaggtggcggctggactctgtggacatcccctggttctacgacttgtgcgaggaggtagtgttaaatacctcaacaaagcgtaggccatga

SEQ ID NO: 42101 - protein, 343 aa, Pyrobaculum aerophilum str. IM2
MLVLGVESTAHTFSLGLVLDGKILGQLGKTYLPPSGEGIHPREAADHHSKVAPVIFRQLLNAHGITASDIDVIAYAAGPGLGPALRIGAVFARALAIKLGVPLVPVHHGIAHIEVARYTTASCDPLVLLISGGHTLIAGFSEGRYRIFGETLDVAIGNAIDMFAREVGLGFPGVPAVEKCAESADRLVPFPMTIIGQDLSYAGLTTYALKLWKSGTPLPVVCKSLVEAAYYMLAEVTERALAFTKKRELVVAGGVARSKRLRGILEHVGREYGVAVKIVPDEYAGDNGAMIALTGYYAYRRGIRTTPEESFVKQRWRLDSVDIPWFYDLCEEVVLNTSTKRRP

SEQ ID NO: 42102 - DNA, 1443 bp, Arabidopsis thaliana
  CDS (1)..(1443)
atggttcgtctgtttcttacactttctccggcgatttcccgattcaatctttatccaggaatctctattctagcgagaaataataattctctcagattacaaaaacaccataagcttaaaaccaaaaccccgactttctcgttaatctctccttcatcttcacccaattttcaaaggacacgtttttattctaccgaaacaagaatttcctccttaccctatagcgaaaacccgaattttgatgataatttggttgttctgggtattgaaacgagctgcgacgacactgccgcagctgttgtgagaggtaatggtgaaattctcagtcaagtcatttcttctcaggcagaattgcttgtccaatatggaggcgtcgctcctaaacaggctgaagaagcacactcccgagttatcgataaggttgtgcaagacgcgcttgataaagccaatttgaccgagaaggatctctctgctgttgctgttaccattggacctggtttgagcctctgtctacgtgttggtgtgcgcaaggctagaagagttgctggtaacttcagtctcccaatcgttggggtgcatcacatggaggctcatgctctcgttgctagattagtggaacaagaattaagcttccctttcatggcattgcttatatcaggagggcacaatcttctagttcttgcgcataagcttggtcagtacacacaacttgggactacagtagatgatgctataggtgaggcatttgacaagacagctaaatggctcggcctcgatatgcacaggagtggtggaccagctgttgaagaacttgctctggagggtgatgcaaagtctgttaagtttaatgttccaatgaaatatcataaagattgcaacttttcttatgctggtttgaagacacaagtgaggctagccattgaagccaaagaaattgatgctaaatgtcccgtctcttctgcaacaaacgaagacagaagaaaccgtgctgatattgccgcttctttccagcgagtagctgtcttgcatctggaagaaaaatgtgagcgagcaatagactgggcattagaactagagccttctattaaacatatggtaatctctggtggtgttgcttcaaacaagtatgtacgactccgacttaataacattgtcgaaaacaaaaacctgaaacttgtttgccctcctcctagcctctgcacagacaatggagtaatggtggcttggactggtctcgagcattttcgtgtaggaagatatgatccacctccacctgcaactgaacctgaggattatgtgtatgatcttcgaccgaggtggcctcttggcgaggagtatgcgaaaggaagaagcgaagctcgttctatgagaactgcacggatccatccgtcacttacttcaatcattagagcagattctcttcaacaacaaacacaaacgtag

SEQ ID NO: 42103 - protein, 480 aa, Arabidopsis thaliana
MVRLFLTLSPAISRFNLYPGISILARNNNSLRLQKHHKLKTKTPTFSLISPSSSPNFQRTRFYSTETRISSLPYSENPNFDDNLVVLGIETSCDDTAAAVVRGNGEILSQVISSQAELLVQYGGVAPKQAEEAHSRVIDKVVQDALDKANLTEKDLSAVAVTIGPGLSLCLRVGVRKARRVAGNFSLPIVGVHHMEAHALVARLVEQELSFPFMALLISGGHNLLVLAHKLGQYTQLGTTVDDAIGEAFDKTAKWLGLDMHRSGGPAVEELALEGDAKSVKFNVPMKYHKDCNFSYAGLKTQVRLAIEAKEIDAKCPVSSATNEDRRNRADIAASFQRVAVLHLEEKCERAIDWALELEPSIKHMVISGGVASNKYVRLRLNNIVENKNLKLVCPPPSLCTDNGVMVAWTGLEHFRVGRYDPPPPATEPEDYVYDLRPRWPLGEEYAKGRSEARSMRTARIHPSLTSIIRADSLQQQTQT

SEQ ID NO: 42104 - DNA, 1035 bp, Corynebacterium glutamicum ATCC 13032
  CDS (1)..(1035): transl_table=11
atgatcgttttgggaattgaaagctcctgcgatgaaacaggcgtaggcgtagtcaaacttgacggcgaaggaaacctagagatcctcgccgactcagtggcctcctccatgcaagaacatgcccgctttggtggcgtcgtgccagaaatcgcctcccgggcgcacctggaatctatggtccccgtgatgcgtgaagcgttgaggcaggcgggcgtcgacaggccagatgctgtggctgcaaccgtgggccctggtttggcgggcgcgctgctcgttggagccagcgctgcgaaggcgtatgccgctgcgtggggagttccgttttacgcggtcaaccacctgggcggacacgtcgccgtggccaatctggaaggtgaaactcttccacacgcggtggctttgctggtttccggcggacacactcaattgttggaagtcgacgcggtgggattacccatgaaggaattgggatccaccctcgacgatgccgctggcgaagcctatgacaaagtctcaaggctgttgggattgggctacccaggcggccccatcattgataaattggcgcgccggggtaatccagaggccattgctttcccccgcggattgatgaaaaagtcggattctcggcatgatttcagcttttccggtttgaaaacctccgttgcccgctacgtggaagctgcggaaagaaacggtgaagttatttccgtggaggacgtctgcgcatcattccaagaagcggtgtgtgatgtgttgacgtttaaggccgtgcgtgcgtgccgcgatgtcggtgcgaaggtgctgctgttgggtggaggagtggctgccaactctcgtctgcgggagcttgctcaagaacgttgcgataaagccgacatcgaactccgggttcctcgtttcaatttgtgcaccgataatggtgtcatgattgcagcgttggcggctcaaagaatccacgaaggtgcccaagaatcaccaatttcggtcggaactgatccttctttgtccgttgagaccccacaggtgttttaa

SEQ ID NO: 42105 - protein, 344 aa, Corynebacterium glutamicum ATCC 13032
MIVLGIESSCDETGVGVVKLDGEGNLEILADSVASSMQEHARFGGVVPEIASRAHLESMVPVMREALRQAGVDRPDAVAATVGPGLAGALLVGASAAKAYAAAWGVPFYAVNHLGGHVAVANLEGETLPHAVALLVSGGHTQLLEVDAVGLPMKELGSTLDDAAGEAYDKVSRLLGLGYPGGPIIDKLARRGNPEAIAFPRGLMKKSDSRHDFSFSGLKTSVARYVEAAERNGEVISVEDVCASFQEAVCDVLTFKAVRACRDVGAKVLLLGGGVAANSRLRELAQERCDKADIELRVPRFNLCTDNGVMIAALAAQRIHEGAQESPISVGTDPSLSVETPQVF

SEQ ID NO: 42106 - DNA, 1230 bp, Drosophila melanogaster
  CDS (1)..(1230)
atgcatgcacttcgtaattttgccggcaatggaatagcaaatgtatttggctgtgggatcaggcgccggctcagctatgtcctgggcatcgagacctcctgcgacgacacgggcatcgccatcgtggacaccacgggccgagtgattgccaatgtgctggagtcgcaacaggagttccacacccgctatggaggcattattccgcccagggcccaggaccttcaccgcgcccgcatcgagtccgcctaccagcgctgcatggaggcggcgcaattgaagccggaccaactgacggccatcgcggtgaccacgcgtcccggactgccgctgagtttgctggtgggcgtgcgctttgcacggcacctggcccgtcgcctgcagaagcccctgctgcccgttcaccacatggaggcgcacgcgctgcaggcccgcatggaacatccggagcagatcggctaccccttcctctgcttgctggccagcggcggccactgtcagttggtggtggctaacggccccggtcgccttacgcttcttggccaaacactggatgatgcgcccggcgaggcctttgacaagatcggtcggcgactacgcctgcacattctgccggagtaccgcttgtggaacggaggacgggccattgagcatgccgcccagctggccagcgatccgctggcctacgagtttccgctgccacttgcccagcagcggaactgcaacttcagcttcgccggcatcaagaacaactccttccgggccatccgagcgcgcgagcgggcagagcggacacctccggacggagtcatcagcaactacggcgacttctgcgccggcctgctgcgctctgtcagccggcacctgatgcaccgcacgcagcgggcaattgagtactgcctcctgccgcacaggcagctcttcggtgacaccccgcccacactggtcatgtccggcggtgtggccaacaacgatgccatatacgccaacatcgaacatctggccgcgcagtatggctgcaggagcttccgtccatcgaagcggtactgctccgacaacggcgtcatgatcgcctggcacggcgttgagcaactgctgcaggataaagaggccagcacgcgctacgactacgacagcattgatatccagggcagcgcgggattcgccgagtcgcacgaggaagctgtcgctgcggcggccataaaatgcaagtggatacagccactggtttga

SEQ ID NO: 42107 - protein, 409 aa, Drosophila melanogaster
MHALRNFAGNGIANVFGCGIRRRLSYVLGIETSCDDTGIAIVDTTGRVIANVLESQQEFHTRYGGIIPPRAQDLHRARIESAYQRCMEAAQLKPDQLTAIAVTTRPGLPLSLLVGVRFARHLARRLQKPLLPVHHMEAHALQARMEHPEQIGYPFLCLLASGGHCQLVVANGPGRLTLLGQTLDDAPGEAFDKIGRRLRLHILPEYRLWNGGRAIEHAAQLASDPLAYEFPLPLAQQRNCNFSFAGIKNNSFRAIRARERAERTPPDGVISNYGDFCAGLLRSVSRHLMHRTQRAIEYCLLPHRQLFGDTPPTLVMSGGVANNDAIYANIEHLAAQYGCRSFRPSKRYCSDNGVMIAWHGVEQLLQDKEASTRYDYDSIDIQGSAGFAESHEEAVAAAAIKCKWIQPLV

SEQ ID NO: 42108 - DNA, 1056 bp, Thermoanaerobacter tengcongensis MB4
  CDS (1)..(1056): transl_table=11
gtggaaatacgatttgtagtggtggtggaaatggcgaaagacattgtaattttaggaatagagacttcctgcgatgaaacggctgcgggggttgtgaaaaacggaaaagaagtgctttcaaatgtcatatactctcaaataaatgtgcacaaaaagtacggcggtgtggtgcctgaaattgcatcaagaaagcacattgaagcgatttcatttgtggtagaagaagcgctcaatgaggcgaagctaagtcttgatgaagtggatgcaatagccgctacatacgggccagggcttgtaggccctcttttagttggtttatcttacggtaaagctttagcctatgctaaagggaaacctttcatcggagttaatcacattgacgggcacattgcggcaaattatataggtggtaatttaacgccgccttttgtttgtcttgtagcatctggtggacacagccatatagtttatgtgaaggactatggggaatatgaggtaatggggaaaactttggatgatgcagctggagaagcttttgataaggtggctagggcgttgggattgggatatcccggaggtccggctattgaaaaagctgcaaagcttgggaatatggaggcgatcgagtttccaaagtcttttatggaagaaggaaattttgatttcagttttagcggggtaaagactgctgttttgaattacctcaacaggcagaagcaaaagggagaagaagtaaatatttatgacgttgccgccagcttccagagaaatatagtggaggttttggtgaaaaaattggtggaggcagcgaggtttaaaaatgtcagcaaagtttccatagcaggaggtgttgcttctaacggcttcttaaggcaaaaattagaagaggatgcgaaaaagtttgggctttctgtctattatcctgaaaaaatttattgcacagacaacggtgcaatgatagctgcagctgcctattacgattttgtaaaaggaaaattttcagggatggatttaaatgccattccatatctcaaaattggggaaagtgattgttag

SEQ ID NO: 42109 - protein, 351 aa, Thermoanaerobacter tengcongensis MB4
MEIRFVVVVEMAKDIVILGIETSCDETAAGVVKNGKEVLSNVIYSQINVHKKYGGVVPEIASRKHIEAISFVVEEALNEAKLSLDEVDAIAATYGPGLVGPLLVGLSYGKALAYAKGKPFIGVNHIDGHIAANYIGGNLTPPFVCLVASGGHSHIVYVKDYGEYEVMGKTLDDAAGEAFDKVARALGLGYPGGPAIEKAAKLGNMEAIEFPKSFMEEGNFDFSFSGVKTAVLNYLNRQKQKGEEVNIYDVAASFQRNIVEVLVKKLVEAARFKNVSKVSIAGGVASNGFLRQKLEEDAKKFGLSVYYPEKIYCTDNGAMIAAAAYYDFVKGKFSGMDLNAIPYLKIGESDC

SEQ ID NO: 42110 - DNA, 1065 bp, Xanthomonas campestris pv. campestris str. ATCC 33913
  CDS (1)..(1065): transl_table=11
atgaaagtgcttgggatcgaatcatcctgcgatgagaccggggtggcggtgtacgacaccgcgctgtccggcgtgccggcgctgcgcgcccatgcggtctatagccagatcgcgctgcatgccgaatacggcggcgtggtgccggagctggccagccgcgaccatgtgcgcaagctgctgccgctgatccgtcagaccctggacgaggccgggttgcgcatcgatgagctggacggggtggcctataccgccggtccgggcctggtcggtgccttgctagtaggtgcgggggtagcgcgcgcgctggcctgggcactggaggtgccggcgatcggcgtgcaccacatggaaggccacctgctggccccgttgatggaagacgacccgccgcagccgccgttcgtggcactgctggtgtctggcggccacacccagctggtctcggtgaaggcgctgggcgcgtatgaagtgttgggcgaaacgctggacgacgccgccggcgaagccttcgacaagactgccaagatgatggggctgccgtatccgggcggcccgcagctggcggcgttggccgaaaccggcacgccggggcgctacaagttcgcgcggccgatgaccgaccgccccgggctggacttcagtttcagcgggctcaagacccaggtgctgctggcctggcgcggcagcgaccaatccgacaccacccgcgccgacatcgcgcgcgggttcgaggacgcagtggtggagacgctggcgatcaagtgcttgcgcgcgctggacaccgccgactgcaacaccctggtggtggccggcggcgtgggcgccaacaagcgcctgcgggcccgcctgcaggaggccgcgcaacgccgcggcggccgggtctgcttcccgcgcccggccctgtgcaccgacaacggcgccatgattgccttcgccggcgcgctgcgcctggaagccggcgagcacgccgatgccgcggtgcaggtgacgccgcgttgggatatggcgagcttgccgccgctggcggcggcgcgggagtcgggaatcgggaatcgggaatcgtaa

SEQ ID NO: 42111 - protein, 354 aa, Xanthomonas campestris pv. campestris str. ATCC 33913
MKVLGIESSCDETGVAVYDTALSGVPALRAHAVYSQIALHAEYGGVVPELASRDHVRKLLPLIRQTLDEAGLRIDELDGVAYTAGPGLVGALLVGAGVARALAWALEVPAIGVHHMEGHLLAPLMEDDPPQPPFVALLVSGGHTQLVSVKALGAYEVLGETLDDAAGEAFDKTAKMMGLPYPGGPQLAALAETGTPGRYKFARPMTDRPGLDFSFSGLKTQVLLAWRGSDQSDTTRADIARGFEDAVVETLAIKCLRALDTADCNTLVVAGGVGANKRLRARLQEAAQRRGGRVCFPRPALCTDNGAMIAFAGALRLEAGEHADAAVQVTPRWDMASLPPLAAARESGIGNRES

SEQ ID NO: 42112 - DNA, 1044 bp, Drosophila melanogaster
  CDS (1)..(1044)
atggtttgcgctttgggtattgaaggcagtgccaataaaattggcattggcataattcgagatggtaaagtactggcgaacgtacgtagaacgtacattaccccaccaggagaaggtttcctgcccaaggaaacggccaaacatcacagggaagccatcctgggcttggtggaatccagtctaaaggaagcccaattgaaatcctctgatctagatgttatttgttacacaaaaggcccaggaatggctcctcctttgctggttggcgccattgtggctcgcactttgtcgctcttgtggaatatcccgctgctgggcgtaaatcactgcattggacacatcgagatgggtcgcctgatcaccggtgcccagaatcctacagttctctatgtgagcggtggaaacacacaggttattgcctactccaataagcgatatcgcatctttggcgaaactatagacattgcagtgggcaattgcctggatcgattcgcccgcatcattaagctgtccaacgatcctagtccgggctacaacatcgagcagctggccaagtcgagcaatcgttatattaaactgccctatgtggttaagggcatggatgtcagcttctcggggattttatcctacatcgaggacctggcagagccgggcaagaggcaaaataagagaaaaaagccacaggaagaagaggtcaataattacagccaagccgatctttgctattcgctgcaggagaccatcttcgccatgttggtggagatcacagagcgcgccatggcacactgcggctcaaatgaggtccttatagttggaggtgtgggttgcaatgagcgactccaggagatgatgcgtattatgtgcgaggaacgcggaggcaaactctttgccactgatgaacgttactgcatagacaacggactaatgattgcccatgctggtgcagaaatgttccgctctggcactaggatgccctttgaggaatcttatgtgactcagcgatttcgaacggacgaagtgctggtcagctggcgggatgactaa

SEQ ID NO: 42113 - protein, 347 aa, Drosophila melanogaster
MVCALGIEGSANKIGIGIIRDGKVLANVRRTYITPPGEGFLPKETAKHHREAILGLVESSLKEAQLKSSDLDVICYTKGPGMAPPLLVGAIVARTLSLLWNIPLLGVNHCIGHIEMGRLITGAQNPTVLYVSGGNTQVIAYSNKRYRIFGETIDIAVGNCLDRFARIIKLSNDPSPGYNIEQLAKSSNRYIKLPYVVKGMDVSFSGILSYIEDLAEPGKRQNKRKKPQEEEVNNYSQADLCYSLQETIFAMLVEITERAMAHCGSNEVLIVGGVGCNERLQEMMRIMCEERGGKLFATDERYCIDNGLMIAHAGAEMFRSGTRMPFEESYVTQRFRTDEVLVSWRDD

SEQ ID NO: 42114 - DNA, 1062 bp, Chlorobium tepidum TLS
  CDS (1)..(1062): transl_table=11
atgaatattttagggatagaaaccagttgcgacgaaacctcggcggctgtcctcagcgatggatcggtccggtcgaacattgtcagttctcagcgatgccataccgatttcggcggtgtggtgccggagctggcttcacgggagcatgagcgactgatcgtctcgatcgtggatgccgccataaccgaagcaaatatagcaaaaaatgacctcgatgtcatagccgctaccgccgggccggggctgatcggcgcggtgatggtggggctttgctttgccgagggcctggcctgggcgcttggcaagcccttcgtgccggtcaaccatgtcgaggcgcacatcttttcacccttcatcagcgacgaacctggccaccgcgagccgaagggcgacttcgtttcgctgaccgtctccggaggccacacattgctgtcggtcgtgcggcaggatctgggctacgaggtaatcggacgcaccatcgacgacgcggcgggcgaggcgttcgacaagaccggcaagatgcttggcctcggttatccggcggggccggtgatcgaccggcttgcccgcgagggcgattcggatttccaccgttttccccgagccctgaccgcaagttcgcagacaagcaagagttaccggggcaacttcgacttcagcttctctggcctcaaaacctccgtgcgcacctggctcgaagctcacgactcggagtatgtccaaaagcatcaggctgaccttgcagcctcaatccagtcagcgattgttgaggtgctggtcgaaaagagcgtcgccgccgcgctcttgcataaagtcaatgccatttcggtggcgggcggcgtgagcgccaactccggcctccgctcggcgatgcaggcggcctgcgaccggcacggcatcgaactcttcattcccgcgctcgcctactcgaccgacaatgcagcaatgatcgccaccatggcgcagttgatgattgcgcgaggcaagtaccggatcgaggataattcctatggcgtagcgccttttgcccgcttcgaggcagccagaaaaggggcgcgttga

SEQ ID NO: 42115 - protein, 353 aa, Chlorobium tepidum TLS
MNILGIETSCDETSAAVLSDGSVRSNIVSSQRCHTDFGGVVPELASREHERLIVSIVDAAITEANIAKNDLDVIAATAGPGLIGAVMVGLCFAEGLAWALGKPFVPVNHVEAHIFSPFISDEPGHREPKGDFVSLTVSGGHTLLSVVRQDLGYEVIGRTIDDAAGEAFDKTGKMLGLGYPAGPVIDRLAREGDSDFHRFPRALTASSQTSKSYRGNFDFSFSGLKTSVRTWLEAHDSEYVQKHQADLAASIQSAIVEVLVEKSVAAALLHKVNAISVAGGVSANSGLRSAMQAACDRHGIELFIPALAYSTDNAAMIATMAQLMIARGKYRIEDNSYGVAPFARFEAARKGAR

SEQ ID NO: 42116 - DNA, 1029 bp, Yersinia pestis KIM
  CDS (1)..(1029): transl_table=11
atgatgggaaatgtaatgcgagtattgggtatagaaacgtcctgcgatgaaaccggaattgcagtctatgacgataaagccggtctgttagctaaccaattgtacagtcaggtaaaattacacgctgactacggtggtgtcgtacctgaactggcctcccgtgatcacgtgcgtaagaccgtacccctgattcaggcggcgttgaaagaagccaatttgagcgccaaagatatcgatgcggtggcttatacagcaggccctggtttggtgggggcgttgttagtgggggcgaccattggtcgggcattagctttcgcatggggagtccctgcggtaccggttcatcatatggaaggccatttgttggcaccaatgctggaagaaaatgcaccagagttcccgtttgttgcgctgctggtatccggcggccatacccaattgattagtgtgaccggtattggtgaatatttgctgttgggcgaatctgttgatgatgcggcaggcgaggcctttgataagacagcaaaactactagggctggattaccccggtgggccaatgttgtcgcgtatggctcaacaaggtactgtggggcgttttacctttccgcgcccaatgactgatcgccctgggctggattttagtttttccggcctgaaaacgttcgcggcgaatactattcgtgctaatggtgatgatgaccaaacccgtgccgatatcgcccgagcattcgaagatgcggtggttgatacgttggcgatcaagtctaaacgtgcattagatcagacgggttttaaacgcttagtcattgccgggggcgtgagcgctaaccagacactgcgattaaaactggccgatatgatgcaaaaacgaggcggtgaagtattctatgcccgacccgaattttgcactgacaatggcgcgatgattgcctatgccgggatggtcaggttgcgaagtaacctgaacagtgagttgagtgtgtcggtgcggccgcggtggccgttatctgagttaccaaaagtctga

SEQ ID NO: 42117 - protein, 342 aa, Yersinia pestis KIM
MMGNVMRVLGIETSCDETGIAVYDDKAGLLANQLYSQVKLHADYGGVVPELASRDHVRKTVPLIQAALKEANLSAKDIDAVAYTAGPGLVGALLVGATIGRALAFAWGVPAVPVHHMEGHLLAPMLEENAPEFPFVALLVSGGHTQLISVTGIGEYLLLGESVDDAAGEAFDKTAKLLGLDYPGGPMLSRMAQQGTVGRFTFPRPMTDRPGLDFSFSGLKTFAANTIRANGDDDQTRADIARAFEDAVVDTLAIKSKRALDQTGFKRLVIAGGVSANQTLRLKLADMMQKRGGEVFYARPEFCTDNGAMIAYAGMVRLRSNLNSELSVSVRPRWPLSELPKV

SEQ ID NO: 42118 - DNA, 1062 bp, Thermosynechococcus elongatus BP-1
  CDS (1)..(1062): transl_table=11
atggtaagaattctggccattgaaaccagttgcgatgaaacggcggctgccgtagtgcgcgatcgcgccattgaaagtaatgtgattgcctcgcaagtgtgcgcccatcaaccctttggcggtgtggtgccggaggttgcctcccgtgcccacttagaaaacattaatggggtcatcaccgcagccatcagtgaggccggttgcgattggtctgccattgatgccattgccgtcacctgtgcccccggcttggtagggtcgctgctcattggggttacggccgcaaaaacccttgcccttgtgcaccaaaagcccctcttgggcattcaccaccttgaaggccacctctatgcctcctacttagcggagccaacccttgaaccaccgtttctctgccttttggtctctggtgggcataccagtctcattggcgtttatggctgtggcgagtaccagctttttgggcaaacgcgggatgatgcagcaggtgaagcctacgataaggtcgcacggctaatgggcttggggtatccagggggaccactgctcgatcgctgggcgcagcaggggaatccagaggcttttgatctaccagagggaaatatccgcctcccagatggcaaggtgcatccctacgatgccagttttagtggactgaaaaccgcagtggcacggctggtggcggagctacgtcaaacccatcctgagttgccggtggctgacctcgcggccagttttcagaaggctgtggcacaggccctgaccaagcgggcgatcgcggcagcggtggatcatggcttcaaaaccctagccattgggggaggagtagcggcaaattctggcctgcgacaacacctcactgcggctgctgaacccttgggactacggttaatttttccgcccctgcggctgtgtaccgataatgcggccatgattggctgtgccgcggccgatcacttccagcggggcgatcgctcccccttggacttaactgcgcgttcacgcctcagcttgttggagatttctgccctctatggacccacgcccctggcagtaagttaa

SEQ ID NO: 42119 - protein, 353 aa, Thermosynechococcus elongatus BP-1
MVRILAIETSCDETAAAVVRDRAIESNVIASQVCAHQPFGGVVPEVASRAHLENINGVITAAISEAGCDWSAIDAIAVTCAPGLVGSLLIGVTAAKTLALVHQKPLLGIHHLEGHLYASYLAEPTLEPPFLCLLVSGGHTSLIGVYGCGEYQLFGQTRDDAAGEAYDKVARLMGLGYPGGPLLDRWAQQGNPEAFDLPEGNIRLPDGKVHPYDASFSGLKTAVARLVAELRQTHPELPVADLAASFQKAVAQALTKRAIAAAVDHGFKTLAIGGGVAANSGLRQHLTAAAEPLGLRLIFPPLRLCTDNAAMIGCAAADHFQRGDRSPLDLTARSRLSLLEISALYGPTPLAVS

SEQ ID NO: 42120 - DNA, 1017 bp, Shewanella oneidensis MR-1
  CDS (1)..(1017): transl_table=11
atgcgggttctaggtattgagacatcctgtgacgagacaggtattgccgtttatgacgataagctggggttactttcccatgctttatatagtcaggttaagttacatgcagattatggtggtgtggtgcctgaactcgcctcccgcgaccatgtgcgcaaaattgtccccttgatccgccaagcgttgaaaaacgccaatactgatattgctgacatcgatggtatcgcttacaccaaaggcccaggattaattggggctttattagtgggcgcttgtgttggtcgctcgcttgcctttgcatggaacaaacctgccatcggcgtgcaccatatggaagggcatttgcttgcgcctatgctggaagaggatgcaccagagtttccttttgttgcactgttagtgtcaggcggtcattccatgttggtcaaggttgatggcattggcctttatgcagtcttaggtgaatcagttgatgatgctgccggtgaagcctttgataaaacggccaagttaatggggcttgattatccaggtggaccacgtttagccaaacttgcggcaaaaggtgaacctgcaggttatcaatttccgcgcccaatgaccgacagaccagggcttgatttcagcttctcaggccttaaaactttcaccgctaataccattgcggctgaacctgatgatgaacaaacccgtgccaatatcgccagagcttttgaagaagcggtagttgatactttagcgataaaatgtcgccgcgcgttaaaacaaacgggctataaccgtttagtgattgctgggggggtgagtgctaatacccgcttacgggaaaccttggctgagatgatgacctccattggtggccgggtttattatcctcgcggcgagttttgtactgacaatggcgccatgattgcctttgccggattgcaacgcttaaaagcagggcagcaggaagacttagcagtaaaaggtcaaccaagatggccgcttgataccttaccgcccttggcttga

SEQ ID NO: 42121 - protein, 338 aa, Shewanella oneidensis MR-1
MRVLGIETSCDETGIAVYDDKLGLLSHALYSQVKLHADYGGVVPELASRDHVRKIVPLIRQALKNANTDIADIDGIAYTKGPGLIGALLVGACVGRSLAFAWNKPAIGVHHMEGHLLAPMLEEDAPEFPFVALLVSGGHSMLVKVDGIGLYAVLGESVDDAAGEAFDKTAKLMGLDYPGGPRLAKLAAKGEPAGYQFPRPMTDRPGLDFSFSGLKTFTANTIAAEPDDEQTRANIARAFEEAVVDTLAIKCRRALKQTGYNRLVIAGGVSANTRLRETLAEMMTSIGGRVYYPRGEFCTDNGAMIAFAGLQRLKAGQQEDLAVKGQPRWPLDTLPPLA

SEQ ID NO: 42122 - DNA, 1011 bp, Streptococcus mutans UA159
  CDS (1)..(1011): transl_table=11
atgatagatagatacattttagccatcgaatcatcctgtgatgaaaccagtgtggccattttaaaaaatgaagatcaacttttaagcaatattattgccagtcaggtagaaagtcataagcgttttggtggtgtggtaccagaagttgccagtcgtcaccatgttgaagtcattacgctttgtattcaggatgctttgcaggaagctggaattactgcaggtgatttatctgctgttgcggtaacttatggtccgggtcttgttggagcccttttggtaggaatggcagcagctaaagcttttgcttgggctaatcatttgcccttaattccagttaatcatatggcaggtcatttaatggcagcacaaagcattgccgatttgcagtatccgcttttagcgctcttggtgtcagggggacatacagaacttgtctatgtagcggctcccggtgattatcgtattgttggggagactcgagacgatgctgttggtgaggcttatgacaaagtcgggcgcgtcatgggccttacttatcctgcaggcaaagaaattgatcaactagctcatcaagggcaagatatctatgattttccgcgcgctatgattaaagaagacaatttggaattttccttttcaggtcttaaatcagcttttattaatcttcatcataatgcccgacaaaaaggagagcaactccgcttagaagatttatgcgcttctttccaagcagctgttttggatatcttgatggtgaaaacaaaaaaggctttggcagcttatcctgtaaaaactttggttattgctggaggtgtggcagctaaccaaggtcttcgtgaacgcctaaaagaagacataaaagatattaatgttgtcattccaccactacgtctttgtggtgataatgctggaatgattgcttatgctgcggccgttgaatatgaaaagggccattttgcagaactcgatctaaatgctaaacccagtttggcttttgaaggattagaataa

SEQ ID NO: 42123 - protein, 336 aa, Streptococcus mutans UA159
MIDRYILAIESSCDETSVAILKNEDQLLSNIIASQVESHKRFGGVVPEVASRHHVEVITLCIQDALQEAGITAGDLSAVAVTYGPGLVGALLVGMAAAKAFAWANHLPLIPVNHMAGHLMAAQSIADLQYPLLALLVSGGHTELVYVAAPGDYRIVGETRDDAVGEAYDKVGRVMGLTYPAGKEIDQLAHQGQDIYDFPRAMIKEDNLEFSFSGLKSAFINLHHNARQKGEQLRLEDLCASFQAAVLDILMVKTKKALAAYPVKTLVIAGGVAANQGLRERLKEDIKDINVVIPPLRLCGDNAGMIAYAAAVEYEKGHFAELDLNAKPSLAFEGLE

SEQ ID NO: 42124 - DNA, 1026 bp, Pseudomonas putida KT2440
  CDS (1)..(1026): transl_table=11
atgctagtactgggattggaaacatcctgcgacgaaaccggcgtcgcattatacgacagtgaacgcggtttgttggccgacgcactgttcagccagatcgacctgcaccgcgtcttcggcggcgtggtgcccgagcttgcctcgcgtgatcacgtcaagcgcatgctgccgctcatccgccaggtgctggacgaggcaggttgcgttgccaccgaaatcgacgccatcgcctacaccgcaggccccggcctggtcggcgccttgctggtgggcgcttcctgcgcccaggcgctggcctttgcctgggacatcccggcgatcggtgtgcaccacatggagggtcacctgctggcacccatgctggaagaaaacccgccagagtttccgttcgtcgctttgttggtttccggtggacatacccagctggttcgggtcgatggcatcggtcagtacgaactgttgggcgaaagcctggacgatgctgccggtgaagcgttcgacaagaccgccaagctgatcggcctcaattatcctggtggtccggaaatcgcgcgtctggccgagcaaggtgtgcctgggcgcttcgtgttcccgcggccaatgaccgatcggccaggcctggaattcagcttcagtggcctcaagaccttcgccctgaacacctggcagcaatgcaagaatgctggcgacgacagtgagcaaacccgttgcgacctgtccctggcattccagcaggcggtggtggagactttgaccatcaagtgcaagcgggcgctcaagcagaccggcctcaagcggctggtcatcgcgggtggcgtgagtgccaacaaggccctgcgcgcgtccctggaggacatgctcggtagcatcaagggcaacgtgtactacgcgcgtccgcaattctgtaccgacaatggtgcgatgatcgcctacgccggttgccagcgcctgctggccgggcagcagcaagacctggcgatcagcgtgcaggcacgctggccgatggaacagttgccgccgctgtaa

SEQ ID NO: 42125 - protein, 341 aa, Pseudomonas putida KT2440
MLVLGLETSCDETGVALYDSERGLLADALFSQIDLHRVFGGVVPELASRDHVKRMLPLIRQVLDEAGCVATEIDAIAYTAGPGLVGALLVGASCAQALAFAWDIPAIGVHHMEGHLLAPMLEENPPEFPFVALLVSGGHTQLVRVDGIGQYELLGESLDDAAGEAFDKTAKLIGLNYPGGPEIARLAEQGVPGRFVFPRPMTDRPGLEFSFSGLKTFALNTWQQCKNAGDDSEQTRCDLSLAFQQAVVETLTIKCKRALKQTGLKRLVIAGGVSANKALRASLEDMLGSIKGNVYYARPQFCTDNGAMIAYAGCQRLLAGQQQDLAISVQARWPMEQLPPL

SEQ ID NO: 42126 - DNA, 966 bp, Mycoplasma penetrans HF-2
  CDS (1)..(966): transl_table=4
atgtacaatcaaaatacttttaaggtaataaaggagttaaaaaatatgtatattttatcaattgaaacaagctgtgatgatactagtgttgcaatattagaagacaacaaagttttaagttgcattattaaaaatgatagtaagcaattaaatccatttggtggtatagttccagaaattgtagcaagataccacgaagaaaatatcattaaagcattagatttagcattacaagaatctaatataagtttgaatcaaattgataaagttgcttatactaatcaaccaggtttacctggatcactatttgttggtgaaatttttgctaaaaccatggcatatgcactagatgtagaatgtgttccaatcaatcatattcatggacacattctaagtccctttattaatagtgttcctaaatatccttttatgtctttaatagcttcaggaaaaactacaagtatttttttagttaaaagtgctaatgaaataatagagttaacaaaaacaagagatgatgcaattggagaaatttttgataaagttggaaaagcattaggatatgactatccagccggtcctaaattagataagtattttgatatttcaaaagcaactatcacaccatctttccctcctgttaaaaatgatttttcattttcaggaatcaaaaacaaatttttaagtatcattaatagttcaaaaatgaaaaatgaagaaatagacacaattacaattggttcttcttttttaaagtattcaattgatttaataataaaaaaacttaaatattacaaagatgaatatagtgtagactgtgtgtgtattggtgggggagttgcaaacaataactatttcaaacaagaaataaaaaaacttttttcagacagttttgttcctgaaagtaaatactcaacagataatgctgcaatgattggttttgcatattatgaaaaaaataagtaa

SEQ ID NO: 42127 - protein, 321 aa, Mycoplasma penetrans HF-2
MYNQNTFKVIKELKNMYILSIETSCDDTSVAILEDNKVLSCIIKNDSKQLNPFGGIVPEIVARYHEENIIKALDLALQESNISLNQIDKVAYTNQPGLPGSLFVGEIFAKTMAYALDVECVPINHIHGHILSPFINSVPKYPFMSLIASGKTTSIFLVKSANEIIELTKTRDDAIGEIFDKVGKALGYDYPAGPKLDKYFDISKATITPSFPPVKNDFSFSGIKNKFLSIINSSKMKNEEIDTITIGSSFLKYSIDLIIKKLKYYKDEYSVDCVCIGGGVANNNYFKQEIKKLFSDSFVPESKYSTDNAAMIGFAYYEKNK

SEQ ID NO: 42128 - DNA, 1047 bp, Lactobacillus plantarum WCFS1
  CDS (1)..(1047): transl_table=11
atgggaaccgtggaaaaacaaaacttgattttagcgtttgagtccagttgtgacgagactagtgtggcagtgatcaaagatggccatgagattttatccaacgtgattgcaacgcagattaatagtcacaaacggtttggtggcgtggttcctgaagttgccagccgtcatcatattgaacaaattacaatttgtattgaagccgcacttcaagaggcacacgtgacgtatgctgaccttgatgctgttgccgtgacgtatggccccggtctagtgggggcactgttagtcggtgttaatgcagctaagacagtggcatacgcgcaccaattaccgctgattccagttaaccatatggctgggcacatttatgctgctcggttcgttaagccgttcgaatttccgctaatggcactattagtttctggcggtcatactgaattggtctacatgcaagcagatgggcaatttgagattataggtgaaacacgtgacgatgcggctggtgaagcctatgataaaatcggtcgggtattgggtgttccatatccggcaggtaaagtcattgacgagatggcacatgcaggccacgacactttcaaatttccgcgagcaatgattgatgaagataattacgattttagttttagtgggctgaagagtgcgttcatcaatacggtccatcacgcagatcaaattggcgcgactctggataagaacgatttagcggctagctttcaggctagcgtggttgatgtcctgatgagtaaaacgttacgagtccttaaacaatatccagttaagcaattggtcttagccggtggcgttgcagctaaccaggggctacgtgaacggttacaacaagatttaccagccgctttccctgacaccgaactaatcttagcgcctctaaagttatgcggtgataatggtgccatgattggtgctgcgggctatgttcaatatcagcatcaccaattcggcgacgcgacgctgaatgccgatccaagcttagaatttgattggatgccaggtatgttgaagtaa

SEQ ID NO: 42129 - protein, 348 aa, Lactobacillus plantarum WCFS1
MGTVEKQNLILAFESSCDETSVAVIKDGHEILSNVIATQINSHKRFGGVVPEVASRHHIEQITICIEAALQEAHVTYADLDAVAVTYGPGLVGALLVGVNAAKTVAYAHQLPLIPVNHMAGHIYAARFVKPFEFPLMALLVSGGHTELVYMQADGQFEIIGETRDDAAGEAYDKIGRVLGVPYPAGKVIDEMAHAGHDTFKFPRAMIDEDNYDFSFSGLKSAFINTVHHADQIGATLDKNDLAASFQASVVDVLMSKTLRVLKQYPVKQLVLAGGVAANQGLRERLQQDLPAAFPDTELILAPLKLCGDNGAMIGAAGYVQYQHHQFGDATLNADPSLEFDWMPGMLK

SEQ ID NO: 42130 - DNA, 1026 bp, Pseudomonas syringae pv. tomato str. DC3000
  CDS (1)..(1026): transl_table=11
atgctagtactgggattagaaacctcctgcgacgaaaccggcgtcgcgttgtacgacagcgaacgcggtttgctggcggacgctttattcagtcagatcgacctgcaccgcgcttatggcggtgtggtgccggagctggcttcgcgtgatcacgtcaagcgcatgctgcccctgatccgccagacactggccgaggccgactgcgtcgcgaccgacatcgacgccatcgcctacaccgcagggccgggccttgtgggcgcgttgctggtcggcgcgtcgtgcgcgcaggcgctggcgtttgcctgggatattccggcgctgggtgttcaccacatggaaggccatctgctggccccgatgctggaagaaaacccgccgcagtttccgttcgtcgctttgttggtgtccggcgggcacacgcagctggtgcgcgtcgatggcatcggtcagtacgagctgctgggcgagacgctggatgatgccgcaggcgaggcgttcgacaagaccgccaagatgatgggcatgcagtatccgggcggcccggagatctcgaaagcggccttgcagggcgtgccggggcgttttgtcttccctcggccgatgaccgatcgccccgggttggcgttcagtttcagcggcctgaaaacctcggcgctcaacacctggcagcagtgccagagtgccggggacgacagtgagcaaacccgctgcgacatcgctctggccttccagcaggcggtagtggagactttgaccatcaagtgcaagcgcgcgctcaagcagaccgggctcaagagtctggtcatcgcaggcggcgtcagcgccaacaaggcgttgcgggtatcgctggaaagcatgctcggtgagttgcgcgggcacgtttactacgcgcggccggaattctgtactgacaacggcgcgatgatcgcctttgccggctgccagcgtctgcaggccgggcagaaagaagatttgagcatcagcgtgcaggcgcgctggcccatggagcagttgtcggggctctag

SEQ ID NO: 42131 - protein, 341 aa, Pseudomonas syringae pv. tomato str. DC3000
MLVLGLETSCDETGVALYDSERGLLADALFSQIDLHRAYGGVVPELASRDHVKRMLPLIRQTLAEADCVATDIDAIAYTAGPGLVGALLVGASCAQALAFAWDIPALGVHHMEGHLLAPMLEENPPQFPFVALLVSGGHTQLVRVDGIGQYELLGETLDDAAGEAFDKTAKMMGMQYPGGPEISKAALQGVPGRFVFPRPMTDRPGLAFSFSGLKTSALNTWQQCQSAGDDSEQTRCDIALAFQQAVVETLTIKCKRALKQTGLKSLVIAGGVSANKALRVSLESMLGELRGHVYYARPEFCTDNGAMIAFAGCQRLQAGQKEDLSISVQARWPMEQLSGL

SEQ ID NO: 42132 - DNA, 1017 bp, Vibrio parahaemolyticus RIMD 2210633
  CDS (1)..(1017): transl_table=11
atgcgcattattggtatcgaaacctcttgtgacgagacaggaatcgcgatttacgacgatgaaaaaggcctgttggcgcacaagctttacagccaagtaaaacttcacgcggattacggcggcgtggtgccagagttggcttcacgtgaccatgtaaagaaaaccattcctcttattaaagaggcactaaaagaagcaaacttaacatcccaagacatcgacggcgtggcttacacggccggtcctggtttggttggtgctttgctagtgggtgcaaccatcggtcgcagtattgcttacgcatggggtgttcctgctgttcctgttcatcatatggaaggtcatttacttgcgccaatgctagaagacaacccaccaccattcccatttgtggcggtgttggtttctggcggtcactcgatgatggtggaagtaaaaggcattggtgaatacaagattctaggcgaatccattgatgatgcagccggtgaagcatttgataagacggctaagctgatggggttagattacccaggcggtcctctgttatccaagctagcagagaaaggtactccgggtcgctttaagttcccacgaccaatgaccaatgtgccgggtttggatatgagtttctctggtttgaaaaccttcacggcaaacacgattgcagcgaatggcgatgacgagcagactcgtgctgatattgcgtacgcttttgaagaagccgtgtgtgcaacgttggcaattaaatgtaagcgtgcattagagcaaaccggtatgaagcgcatcgttattgctggtggtgtaagtgcgaaccgccgcttgcgtgcagagcttgagaagcttgcgaagaaaatcggtggtgaagtgtattacccacgtaccgagttctgtactgacaacggtgcaatgattgcgtatgcgggtatgcaacgtttgaagaacggtgaagtcgcagatatgtcggtggaagcgcgtccgcgctggccaattgaccagctaacgccaatcgcgtaa

SEQ ID NO: 42133 - protein, 338 aa, Vibrio parahaemolyticus RIMD 2210633
MRIIGIETSCDETGIAIYDDEKGLLAHKLYSQVKLHADYGGVVPELASRDHVKKTIPLIKEALKEANLTSQDIDGVAYTAGPGLVGALLVGATIGRSIAYAWGVPAVPVHHMEGHLLAPMLEDNPPPFPFVAVLVSGGHSMMVEVKGIGEYKILGESIDDAAGEAFDKTAKLMGLDYPGGPLLSKLAEKGTPGRFKFPRPMTNVPGLDMSFSGLKTFTANTIAANGDDEQTRADIAYAFEEAVCATLAIKCKRALEQTGMKRIVIAGGVSANRRLRAELEKLAKKIGGEVYYPRTEFCTDNGAMIAYAGMQRLKNGEVADMSVEARPRWPIDQLTPIA

SEQ ID NO: 42134 - DNA, 1020 bp, Bacteroides thetaiotaomicron VPI-5482
  CDS (1)..(1020): transl_table=11
atgagtgcaataatattaggaattgaatcctcctgtgatgatacgtcggcagccgtaatcaaggatggttatctgctgtcaaatgtggtatcaagtcaagccgtacatgaagcatacggcggagtagtacccgaattagcttcacgggcacatcaacaaaatatcgttcctgtggtacacgaagcactgaaacgggcaggggttaccaaagaagaactgagcgcggtagctttcacacgtggaccgggattgatgggatctttacttgtaggcgtctctttcgccaaaggattcgcacgttcactcggtattcctttgatagatgttaatcatctgacagggcatgtcttagctcattttattaaagcagaaggagaagaaaatatccaaccgaaattcccgttcctttgcctgttggtatccggaggaaactcacagattatattggtaaaagcctataatgatatggaaattctcggtcagacgattgatgacgctgccggagaagcaatcgataaatgttctaaagtgatgggtctcggatatccgggcggaccgatcattgacaaactggcacgtcaaggcaatccgaaagcgtatactttcagcaaaccgcatattccggggctggactacagtttcagcggactgaaaacttctttcctatactccttgcgtgactggatgaaagacgatcccgatttcatcgagcatcataaagtggatttggccgcctctctggaagcaactgttgtagacattctgatggacaaactgcggaaagctgccaaagaatataaaataaaagaagtagccgtagccggaggagtctctgccaataacggattgcgtaactctttccgagaacacgctgaaaagtatggctggaatatttttattcctaaattcagctatacgaccgacaatgcagccatgattgccattaccggatacttcaagtatctggataaagacttctgctccattgatcttccggcttattcccgtgtcacattataa

SEQ ID NO: 42135 - protein, 339 aa, Bacteroides thetaiotaomicron VPI-5482
MSAIILGIESSCDDTSAAVIKDGYLLSNVVSSQAVHEAYGGVVPELASRAHQQNIVPVVHEALKRAGVTKEELSAVAFTRGPGLMGSLLVGVSFAKGFARSLGIPLIDVNHLTGHVLAHFIKAEGEENIQPKFPFLCLLVSGGNSQIILVKAYNDMEILGQTIDDAAGEAIDKCSKVMGLGYPGGPIIDKLARQGNPKAYTFSKPHIPGLDYSFSGLKTSFLYSLRDWMKDDPDFIEHHKVDLAASLEATVVDILMDKLRKAAKEYKIKEVAVAGGVSANNGLRNSFREHAEKYGWNIFIPKFSYTTDNAAMIAITGYFKYLDKDFCSIDLPAYSRVTL

SEQ ID NO: 42136 - DNA, 1020 bp, Coxiella burnetii RSA 493
  CDS (1)..(1020): transl_table=11
atgaaatgtgtccttggtgttgaaacttcctgtgatgaaactgctgttgcgctgtatgatggtgagcgaggattattagcgcaccgtgtttatagtcaaatagccatccacgctgagtatggcggtgtggttcctgagcttgcttcgcgcgatcacattagaaaaattttgcctctaattaaagccgctttggatgacgctgccttgtccaaagaaaacattgacggaattgcttacacaaaaggccctggtttaatcggggcgttgatggtaggggcgtcggtggcaaaaagcttagcgtatgcctggcgggtgccggtcgtgggtgtgcaccatatggaagcgcatttaatggcgctgcaattagaagaaagccgacctgcgtatccgtttattgccttattggtttcggggggccacacgatgttggttcacgtcgagcagccaggccgctataaaatcttgggagaaagcgttgatgatgctgcgggagaagcgtttgataaaacagctaaattattagggctgccctatcccggtggtcccgcgctggctcgcttagcagagcaaggcgaacctaaacgttttatttttccacggccaatggtgaatcaaccacatcttaattttagttttagcggcttaaagacacacgcggttaattgttttaaacaatacggtggtgaggaacaaacccgagcggatattgcttgcgcgtttgagaacgcggtcgtcgatactttaattattaaatgtttacgagccttggaaaaaacaggaattaatactttggttttagtcggtggcgtcgcggcaaacaagaaattgcgtgaacgattgggacaagttgccgtaaagcgagccgcacaaatttattacccccgtcaagaattttgtacggataacggcgcgatggtcgcttatacaggctggctgcggttaaacgctggcgaaaaagaagataaaataattcgcgttaaaccaagatggtcgatggctgaattaaatataataaactag

SEQ ID NO: 42137 - protein, 339 aa, Coxiella burnetii RSA 493
MKCVLGVETSCDETAVALYDGERGLLAHRVYSQIAIHAEYGGVVPELASRDHIRKILPLIKAALDDAALSKENIDGIAYTKGPGLIGALMVGASVAKSLAYAWRVPVVGVHHMEAHLMALQLEESRPAYPFIALLVSGGHTMLVHVEQPGRYKILGESVDDAAGEAFDKTAKLLGLPYPGGPALARLAEQGEPKRFIFPRPMVNQPHLNFSFSGLKTHAVNCFKQYGGEEQTRADIACAFENAVVDTLIIKCLRALEKTGINTLVLVGGVAANKKLRERLGQVAVKRAAQIYYPRQEFCTDNGAMVAYTGWLRLNAGEKEDKIIRVKPRWSMAELNIIN

SEQ ID NO: 42138 - DNA, 1125 bp, Streptomyces avermitilis MA-4680
  CDS (1)..(1125): transl_table=11
atggctgactcacgcgacgagccgctcgtcctgggcatcgagacgtcctgcgacgagaccggcgtcggcattgtccgcggcaccaccctgctcgcggacgccatcgcgtccagcgtcgacgagcacgcccgcttcggcggtgtggtgcccgaggtcgcctcccgtgcgcacctcgaggcgatggtgccgaccatccagcgcgccctgaaggaggcgggcgtctcggcgaaggacctggacggcatcgccgtgaccgccggtcccggcctggccggcgcgctgctcgtcggggtctcggcggcgaaggcgtacgcctacgcgctcggcaagcccctctacggcgtcaaccacctcgcctcccacatctgcgtcgaccagctggagcacgggccgctgccggagccgaccatggcgctgctggtgtccggcgggcattcctcgctgctgctctccacggacatcacctccgatgtgcggccgatgggcgcgaccatcgacgacgcggcgggcgaggccttcgacaagatcgcgcgcgtgctgaacctgggcttcccgggcggtccggtcatcgaccggtacgcgcgcgagggcgacccgaaggcgatcgcgttcccgcgcggtctcaccgggccgcgcgaccccgcgtacgacttctccttctccggtctgaagaccgccgtggcccgctggatcgaggccaagcgggccgccggtgaggaggtgccggtgcgtgacgtctccgcgtccttccaggaggcggtggtggacgtgctgacccgcaaggccgtacgcgcctgcaaggacgagggcgtcgaccacctcatgatcggcggcggcgtcgcggccaactcgcggctgcgcgcgctcgcccaggagcggtgcgaggccgccgggatccggctgcgggtgccccgcccgaagctgtgcacggacaacggggcgatggtcgcggcgctgggcgcggagatggtggcgcgggggcgtgccgcctccgactgggacctgtccgcggactcgtcgctgccggtgacggacccgcacgtgcccgggcgcgcgcacacgcatgcgcacacgcacggccacgatcacgtgcacgaggtcagcaaggagaacctgtactcgtga

SEQ ID NO: 42139 - protein, 374 aa, Streptomyces avermitilis MA-4680
MADSRDEPLVLGIETSCDETGVGIVRGTTLLADAIASSVDEHARFGGVVPEVASRAHLEAMVPTIQRALKEAGVSAKDLDGIAVTAGPGLAGALLVGVSAAKAYAYALGKPLYGVNHLASHICVDQLEHGPLPEPTMALLVSGGHSSLLLSTDITSDVRPMGATIDDAAGEAFDKIARVLNLGFPGGPVIDRYAREGDPKAIAFPRGLTGPRDPAYDFSFSGLKTAVARWIEAKRAAGEEVPVRDVSASFQEAVVDVLTRKAVRACKDEGVDHLMIGGGVAANSRLRALAQERCEAAGIRLRVPRPKLCTDNGAMVAALGAEMVARGRAASDWDLSADSSLPVTDPHVPGRAHTHAHTHGHDHVHEVSKENLYS

SEQ ID NO: 42140 - DNA, 1014 bp, Nitrosomonas europaea ATCC 19718
  CDS (1)..(1014): transl_table=11
atgcttgtattaggtattgaaacttcatgtgacgagacaggtgtagcactttatgatacctgccagggattactcggccataccctatattctcaggtcgacatgcatcgcgaatatggcggtgtcgtgccggaacttgcttcacgcgaccatatccgccgcatcctgcctctcatcagacaattattcagacaatcggatacttcgctggaatctgttgatgccatcgcctgtacccagggtccggggcttgcaggagcgttgctgaccggggcaagtttcagcagtgctctggcttttgcgcgcaatatacccgtcttgaacatccaccatcttgaaggtcatctgctctccccacttttatccgatccggcacctgattttccgttcgtggcactattggtatccggagggcacacacaactgatgcgggtagacggaatcgggcagtatcggttattgggagaaaccgtggatgatgcagccggagaagcgtttgacaaaactgcaaaattacttgacctcgactaccccggtggaaagttgcttgcagaactggccacacaaggccgggcagaacaattcaggctcccgcgccccatgctgaacagcaatgatctgaatttcagtttcagcggattaaaaacagctgcggctctgctgatcggcaagcatgagatgaacagtcagacacgcgccgatatcgcatttgcctttgaagacgcagttaccgatgtgctggtaaaaaaatcagtaactgctctgaatatcactggattgcagcaactggtcgtagcaggcggtgtaggcgcaaacagccgattgcgtcagaagctattacaccatctgtccggaaccgatatcaccgttttcttcccagcgctggagttttgtaccgataacggcgcaatgattgcgctggccggtgcattacgtttacagcagctcgatgagcgcctcagagcgggcggcagctttaccgtcaaagcccgctggaatctggaagatttataa

SEQ ID NO: 42141 - protein, 337 aa, Nitrosomonas europaea ATCC 19718
MLVLGIETSCDETGVALYDTCQGLLGHTLYSQVDMHREYGGVVPELASRDHIRRILPLIRQLFRQSDTSLESVDAIACTQGPGLAGALLTGASFSSALAFARNIPVLNIHHLEGHLLSPLLSDPAPDFPFVALLVSGGHTQLMRVDGIGQYRLLGETVDDAAGEAFDKTAKLLDLDYPGGKLLAELATQGRAEQFRLPRPMLNSNDLNFSFSGLKTAAALLIGKHEMNSQTRADIAFAFEDAVTDVLVKKSVTALNITGLQQLVVAGGVGANSRLRQKLLHHLSGTDITVFFPALEFCTDNGAMIALAGALRLQQLDERLRAGGSFTVKARWNLEDL

SEQ ID NO: 42142 - DNA, 1077 bp, Helicobacter hepaticus ATCC 51449
  CDS (1)..(1077): transl_table=11
atgatcttaagcatagaatcaagctgcgatgatagctcacttgccctaatgagcattaatgatgcttcgcttctttatcatatcaaactttctcaagatgaagaacatagcacttatggtgggattgtgccagaaattgcttcaagacttcacgctcaaagacttccagagattctaaaaaagctcaaagcatttctcaataacgatttatctcctattaaagcagtcgcggtaaccacgcgtccgggactaagtgtaacactcattgaaggtttgatgatggcaaaggcactttgtcttggtttgcaagtgccgcttatttgtgttaatcaccttaagggacatatttattcgcttttgattcataaagccacttcagatatgcaagccattctccctaaaaacacctctctaccccaacctcttggcattttgcttgtatctggcgggcatacacagattctccatatgcgcgattttaatgccataagccttatcgctcaaagccttgatgatagctttggggaaagctttgataaagtagctaaatatttgggattaggttatccgggtggtcctgttatagaatcttatgctacaacttttatgcgcgactttccacatattgcgcctcatagttttcctgtgccacttttgcataatcaaaaactacaatttagcttttcgggtttaaaaaatgccgtaagacttgccattcaagctctaccccaacctcttagcctcaaagatagaggaagtatctgtgcaggattccaacaaagcgcgtgtgaacatatcgtgcgcaaagtaagattatattttcaaagcgcgcaggcacaagatttagaacattttgctattgtaggaggagcaagcgcaaatacatacctacgcaccaccctaaatgagctttgtgaggagtataataaacagcttcatctcgctgaccttgctttttgtgctgataatgcagcaatgattggcgtgtgtgccatagagcattataaaaggggagattttacacccatagatgaagcgcaaatctcgcctaaaagtttgctaaatgattttttataa

SEQ ID NO: 42143 - protein, 358 aa, Helicobacter hepaticus ATCC 51449
MILSIESSCDDSSLALMSINDASLLYHIKLSQDEEHSTYGGIVPEIASRLHAQRLPEILKKLKAFLNNDLSPIKAVAVTTRPGLSVTLIEGLMMAKALCLGLQVPLICVNHLKGHIYSLLIHKATSDMQAILPKNTSLPQPLGILLVSGGHTQILHMRDFNAISLIAQSLDDSFGESFDKVAKYLGLGYPGGPVIESYATTFMRDFPHIAPHSFPVPLLHNQKLQFSFSGLKNAVRLAIQALPQPLSLKDRGSICAGFQQSACEHIVRKVRLYFQSAQAQDLEHFAIVGGASANTYLRTTLNELCEEYNKQLHLADLAFCADNAAMIGVCAIEHYKRGDFTPIDEAQISPKSLLNDFL

SEQ ID NO: 42144 - DNA, 1077 bp, Rhodopirellula baltica SH 1
  CDS (1)..(1077): transl_table=11
atgacgccgacggccgcttctgaattgctgctgtcgattgaatccacttgtgatgaaactgccgcggcggtcattcgccgcgacggcacggtccttggccaatgcatcgccacccaagaaacacttcacgagcagttcggcggtgtggtccccgagatcgccgcgcgagcccacctggaacgcatccttccggtgatcgacacggcactgacgcaagcgaaagttcgtggcgaagacctcaccgcgatcgccgtagccgatcgtccgggcttggctggttcattgctggtcggtgtcgttgccgccaaaacgctcgccttggcatggaacaaaccactgatctcgctcaatcatttgcacgctcacttgtatgcgtgtcaattgattgaaggggccccggcgaacatctatccggcgattggcctgatcgtatccggcggtcacaccagcctgtatgtttgtcgcaccgcgatcgacctggagtatctcggcggaacaatcgacgatgccgctggcgaagcattcgacaaagtggcagcgatgttgtccctaccctttcccggcggaatcgaagtcgcaaagctcgcctcgcaaggaaacgacaaggcatactctttccctcgctcgatgattcacgatccaggcgatgatttttccttcagcggtttgaagacggcggttcggtacgccatcgtcggcccgggccgccaagactttgcgtcgctggacatttccgaccaagtcaaacgggacgtctgcgcctcgtttgaggccgctgttgtcgatgtcttggtatccaaatgccgtcgagcgatcaagcggcacagaaatcgcaacaacgatcctcagaactcaatcaatcggctgatcgtcggaggcggcgtggcagccaaccagcgtttgcgacgtgacctgcaagccgccgccgacaaagacggcttcgagctttggatcgctccaccgcacctatgcactgacaatgctgtcatgggtgcgatcgcctggaagaagttcgaagccgaacaattcgcatcgcttgatctggacatcacccccggactgcaacgaggcttctga

SEQ ID NO: 42145 - protein, 358 aa, Rhodopirellula baltica SH 1
MTPTAASELLLSIESTCDETAAAVIRRDGTVLGQCIATQETLHEQFGGVVPEIAARAHLERILPVIDTALTQAKVRGEDLTAIAVADRPGLAGSLLVGVVAAKTLALAWNKPLISLNHLHAHLYACQLIEGAPANIYPAIGLIVSGGHTSLYVCRTAIDLEYLGGTIDDAAGEAFDKVAAMLSLPFPGGIEVAKLASQGNDKAYSFPRSMIHDPGDDFSFSGLKTAVRYAIVGPGRQDFASLDISDQVKRDVCASFEAAVVDVLVSKCRRAIKRHRNRNNDPQNSINRLIVGGGVAANQRLRRDLQAAADKDGFELWIAPPHLCTDNAVMGAIAWKKFEAEQFASLDLDITPGLQRGF

SEQ ID NO: 42146 - DNA, 1047 bp, Haemophilus ducreyi 35000HP
  CDS (1)..(1047): transl_table=11
atgcgaattttaggaattgaaacttcatgtgatgaaactggtgttgctatttatgatgagcaacgaggtctaattgcaaatcaactttatagccaaattgagatgcacgctgattatggtggtgtggttcccgagttagcttcacgagatcatatccgtaaaacattacctttgattcaagcggcattaaaagaagcaaatttaaccgcttctgagattgatggcattgcttatacggctggaccagggctagttggagccttgcttgttggtgccactattgcacgtgcattagcttatgcttggaatgttcccgcattagctgtacatcatatggaagggcatttaatggcacctatgctagaagaaaatcctcctgaatttccctttattgcgctgttgatttcaggtgggcatacacaattaattaaagtagcgggtgtaggtgaatatgaaattttaggcgaatcaatagatgatgctgcgggagaagcttttgataaaacgggtaaattgcttggtttggattaccctgctggtgttgctttatcgcaattagcggaaaaaggtacgccgaatcgttttgtttttcctcggccaatgacggatagaccaggtttagactttagtttctctggtttgaaaacctttgcagcaaatacgattaatgctcagttagatgaaaatggtcagttaaatgaacaaacgcgttgtgatattgcacacgcatttcagcaagctgttgtggatacgattattattaaatgtaagcgagcattacagcaaacaggctatagccgtttagttatggcgggcggtgtaagtgctaataaacagttacgtgcagaattagctactatgatgcaagcattaaaaggtcaagtctattatcctcgtcctcaattttgtacagataatggggcaatgattgcctataccggttttattcgcttgaaaaagggggaaaaaacggatttaagtgtaagtgtaaagcctcgttggccaatgacaactttattaaaattatcagcgcaccataaagtttaa

SEQ ID NO: 42147 - protein, 348 aa, Haemophilus ducreyi 35000HP
MRILGIETSCDETGVAIYDEQRGLIANQLYSQIEMHADYGGVVPELASRDHIRKTLPLIQAALKEANLTASEIDGIAYTAGPGLVGALLVGATIARALAYAWNVPALAVHHMEGHLMAPMLEENPPEFPFIALLISGGHTQLIKVAGVGEYEILGESIDDAAGEAFDKTGKLLGLDYPAGVALSQLAEKGTPNRFVFPRPMTDRPGLDFSFSGLKTFAANTINAQLDENGQLNEQTRCDIAHAFQQAVVDTIIIKCKRALQQTGYSRLVMAGGVSANKQLRAELATMMQALKGQVYYPRPQFCTDNGAMIAYTGFIRLKKGEKTDLSVSVKPRWPMTTLLKLSAHHKV

SEQ ID NO: 42148 - DNA, 1062 bp, Candidatus Blochmannia floridanus
  CDS (1)..(1062): transl_table=11
atgcgtgtcttaggaattgaaacttcttgtgatgaaactggcatagcggtgtatgatgaatatagaggtttattagtacataaagtgtatagtcaaggtgtattacattcgcgttatggaggagtagtaccagagttagcagcgagagatcacattcgtaaggttattccattaattgtaggatcactgaagcaagcgcgtttaatatcgagtgatatagatgcggtagcatatactgctggtcctggattaataggtgcattgttggtgggagcttctgttgcgtgttcattagcttatgcttggaatgtgcctgttattggtgtacatcatatggaagctcatttgttgactccgatgctgaataaaaaacttattatttctaatagtactagtttttctgattttattgatgtaattgattttccttttattgctttgttagtatctggaggtcatactcaacttgttatggtaaaaaatataggtgagtataagatattaggagaatctgttgatgatgctgtaggagaggtatttgataaaattgctgtgtttttaggtttaggatatccaggaggagcattattatctgaaatggcgcaagtcggtataaaaggacgttatatttttccaaaacctatgattaacaaaccaggttttaattttagtttttctggattaaagactgctgttattcgtgctattatgtcaagctctaatgatcagcaaactcgagcagatattgcatgtggatttgaacgagccgttgttgaaacgttgtctgtgaaatgttacaaagcgttaaaacagatgaaagtaaaatatttagtgatatcaggtggagttagtgctaatacaatgttaagatcaaagttgttaaagatgatgtattcaatttcaggtaagttattatgtccagaattagagttttgtacagataatggagcaatggtagcatatactggtttaattagattgaaagcaggtttgtcaaatcgagatttatcgattacggtaaaaccacgttggtcattagaatctttacctagtattttttga

SEQ ID NO: 42149 - protein, 353 aa, Candidatus Blochmannia floridanus
MRVLGIETSCDETGIAVYDEYRGLLVHKVYSQGVLHSRYGGVVPELAARDHIRKVIPLIVGSLKQARLISSDIDAVAYTAGPGLIGALLVGASVACSLAYAWNVPVIGVHHMEAHLLTPMLNKKLIISNSTSFSDFIDVIDFPFIALLVSGGHTQLVMVKNIGEYKILGESVDDAVGEVFDKIAVFLGLGYPGGALLSEMAQVGIKGRYIFPKPMINKPGFNFSFSGLKTAVIRAIMSSSNDQQTRADIACGFERAVVETLSVKCYKALKQMKVKYLVISGGVSANTMLRSKLLKMMYSISGKLLCPELEFCTDNGAMVAYTGLIRLKAGLSNRDLSITVKPRWSLESLPSIF

SEQ ID NO: 42150 - DNA, 1041 bp, Bordetella bronchiseptica RB50
  CDS (1)..(1041): transl_table=11
atgatcattctcggctttgaaagctcgtgcgacgaaaccggcgtggccgccgtctgcaccgagcgcggcctgcttgcgcacgccctgcatacccagatcgccatgcaccaggaatatggtggcgtggtgcccgaactcgcctcgcgcgaccatatccggcgcgtggtgcccctgacccgccaggtgctggccgaggccggcctgacgctggccgacgtgggcgcggtggcctacaccgccgggccgggcctggccggcgccttgctggtgggcgccagcgtggcccaggcgctggcctggtcgcgcgcgctgccggccatcggcatccatcacctggaaggacatctgctgtcgccgctgctggccgagccgcgtcccgagtttccgttcgtggccttgctggtctcgggcgggcatacccagctgatgcgggtcgacggcgtgggccgctacgaactgctgggcgagacgctggacgacgccgccggcgaggccttcgacaaatcggccaaactgatgggcctgggctatccgggcggccccgcgctggcgcgcctggccgagcagggcgacgccagccgctacgacctgccgcgccccatgctgcacagcggcgacctggatttcagcttcagcggattgaagaccgcggtcctgacccgtgtgaaagcggccacgcgcgatggcggcgaactgggcgaacaggaccgcgccgacctggcggcggcaacgcaggccgccatcgtcgaggtgctggcggccaaggcgatccgcgccttgaagcagacgggcctgcgccgcctggtggtggccggcggggtgggcgccaacgcgctgctgcgcgcgcatctggcgcgcgcgctcaagcccttgcgggccgaagcctattttccgccgctgtcgctgtgcaccgacaatggcgccatgatcgcgttcgcggcggccgagcgggtcaaggccggactggccgacctgcgcgagggcgaccacgccttcacggtgcggccgcgctgggacctggcggatatccaggccgggtag

SEQ ID NO: 42151 - protein, 346 aa, Bordetella bronchiseptica RB50
MIILGFESSCDETGVAAVCTERGLLAHALHTQIAMHQEYGGVVPELASRDHIRRVVPLTRQVLAEAGLTLADVGAVAYTAGPGLAGALLVGASVAQALAWSRALPAIGIHHLEGHLLSPLLAEPRPEFPFVALLVSGGHTQLMRVDGVGRYELLGETLDDAAGEAFDKSAKLMGLGYPGGPALARLAEQGDASRYDLPRPMLHSGDLDFSFSGLKTAVLTRVKAATRDGGELGEQDRADLAAATQAAIVEVLAAKAIRALKQTGLRRLVVAGGVGANALLRAHLARALKPLRAEAYFPPLSLCTDNGAMIAFAAAERVKAGLADLREGDHAFTVRPRWDLADIQAG

SEQ ID NO: 42152 - DNA, 1026 bp, Chromobacterium violaceum ATCC 12472
  CDS (1)..(1026): transl_table=11
atgctggtacttggcattgaatcctcctgcgacgaaaccggcgtcgcgctgtacgacaccgaacgcggcctgctggcccatcagctgcatactcaaatggcgatgcacgccgagtacggcggcgtggtgcccgagctggccagccgcgaccacatccgccgcgccatcccgctgaccgaagcctgcctctccgaggcgggcaagaaactcgccgatctggacgccatcgcctacacccagggccctggcctgggcggcgcgctgatggtgggcgccagcatggccaatgcgctggccttcggcctgaatattcccgtcatcccggtacaccacctggaaggccatctgctgtcgccgctgctggccgatcccaagccggaattccccttcctggcgctgctggtttccggcggacacacccagttgatggcggtgcgcggcgtcggcgactacgaaatcctcggcgagaccgtggacgacgccgccggcgaggccttcgacaaaaccgccaagctgctgggcctgccctaccctggcggcccgctgctgtccaggctggcggaatccggcagcccggaccgcttcacgctgccgcggcccatgctgcactcaggcaatctggacatgagcttctccggcctgaagacggcggtgctgacgctggtgcgccagcaggagtccgcgcagggcgagctggacgaacagacgcggatggatatctgccgcgccttccaggaagccatcgtagaggtgctggtgaaaaagtccctcgccgcgatgaggcaggccggcatgaagcggctggtggtggccggcggcgtcggcgccaacaagcagctgcgcgccgcgctcaacgacgccgccgcgcgcaagcgtttcgacgtgttctacccgcccttggcgctgtgcaccgacaacggcgcgatgatcgccttcgccggcgccatgcgcctgaaattcgcggagccggccggcggcttcaccatcaagccgcgctgggatttgtccagcctgccggcagtataa

SEQ ID NO: 42153 - protein, 341 aa, Chromobacterium violaceum ATCC 12472
MLVLGIESSCDETGVALYDTERGLLAHQLHTQMAMHAEYGGVVPELASRDHIRRAIPLTEACLSEAGKKLADLDAIAYTQGPGLGGALMVGASMANALAFGLNIPVIPVHHLEGHLLSPLLADPKPEFPFLALLVSGGHTQLMAVRGVGDYEILGETVDDAAGEAFDKTAKLLGLPYPGGPLLSRLAESGSPDRFTLPRPMLHSGNLDMSFSGLKTAVLTLVRQQESAQGELDEQTRMDICRAFQEAIVEVLVKKSLAAMRQAGMKRLVVAGGVGANKQLRAALNDAAARKRFDVFYPPLALCTDNGAMIAFAGAMRLKFAEPAGGFTIKPRWDLSSLPAV

SEQ ID NO: 42154 - DNA, 996 bp, Wolinella succinogenes DSM 1740
  CDS (1)..(996): transl_table=11
ttgattttaagcattgaaagcagttgcgatgatagctctatcgcgatcacacgcctagaggatagggcgattctatttcacaagaaaatctctcaagattccgctcatagtcctcatggcggggtggttccagaacttgcgagccgccttcatgccgtggcgctccctaaaatattagaggagtgcgcccccttcttccctcgcctcaaggctatcgccgtgaccaatgagccgggtcttagcgtcactcttttagagggcgtgatgatggccaaagcccttgcgcttgccctccatctcccccttatcgcagtcaaccacctcaaaggccacctctactcgctctttttagagcaagaatcacgattccctttggatgtgctgctcgtctcagggggacacaccatggtgcttcatgcacgctcttttggcgagattgagatcatcgggcagagtatggatgatagctttggcgaaagttttgataaagtcgccaaaatgctctctctaggctatcccggaggcccgatcgtggaatcttacgccaaagagggggacgcttcgcgattccctttgccccttcctcttgcgggtaaaaaagaggtcgcctttagcttctctggactcaaaaacgctgtgcgtctagtcatacaatccctgcaaaatcctccaaatgaacaagaaaaacgcgatatatgcgcctcttttcaagccactgcaatcgcccatctaatccaaaaatgccgcctctatctcgccacctccaatgccccttatttggctatcgtggggggagcgagcgcgaatctggctctccgagaggagatggaacggcttggtgagcattttggcaaaaaactccttctcgcccctttggcctactgctccgataatgccgcgatgattggacgcgccgcccttgaatcctacgccctaggagccttcacttcccccctagagctcaccgtgcgccctcgcaccccaagcctttgttaa

SEQ ID NO: 42155 - protein, 331 aa, Wolinella succinogenes DSM 1740
MILSIESSCDDSSIAITRLEDRAILFHKKISQDSAHSPHGGVVPELASRLHAVALPKILEECAPFFPRLKAIAVTNEPGLSVTLLEGVMMAKALALALHLPLIAVNHLKGHLYSLFLEQESRFPLDVLLVSGGHTMVLHARSFGEIEIIGQSMDDSFGESFDKVAKMLSLGYPGGPIVESYAKEGDASRFPLPLPLAGKKEVAFSFSGLKNAVRLVIQSLQNPPNEQEKRDICASFQATAIAHLIQKCRLYLATSNAPYLAIVGGASANLALREEMERLGEHFGKKLLLAPLAYCSDNAAMIGRAALESYALGAFTSPLELTVRPRTPSLC

SEQ ID NO: 42156 - DNA, 1029 bp, Gloeobacter violaceus PCC 7421
  CDS (1)..(1029): transl_table=11
gtgacaaccatctttgccatcgagaccagttgtgacgaaagcgccgccgccatcgtgcgcggtcggaccgtcgtcgcgtcgatcatcgcttcgcaaatcgacgtgcaccgcctgaccggcggtgttgtgccggaggtcgcctcgcgcgagcacctgcaggcgttgggcggggtgatcgcggcgtgttttgccgagggcggcctggggtgggccgacatcgacgctgtcgcctttacctgtgctcccggcctggtcggctcgttgctgatgggatcgatggcagccaagaccctggctctcgttcacgccaggccgctggtcggcatccaccacctcgaaggtcacatctactcggcttttttgagcgacccggccctggagccgccctttttgtgtctgctcgtctcggggggacacaccagcttggtggctgtcgaggatcatggccgctaccgcatcctggggcgcacccgcgacgacgccgtgggcgaagcctacgacaaggtggcgcgggtactgggacttggttacccgggcggtcctgcgatcgacaaattggcgcagcggggagacccgcgcgcctttgcgctgccgggggggcgggtcgaatcgcccttcgacaccagcttcagcggcctgaagaccgccgtgctgcgcctggccgaaaaacaccggctccagcgtctgcccatcgaccgggcggatctggccgcgagcttccagcgcaccgtggtagagaccctggccgagcgggtggagttggccctggcccacaccggctatgacacggtggtggtggcggggggcgtctccgccaaccgcggcttgcgcgaacgcctcgggcaagccggaccctaccgggccgttttcccgccgatgcacttttgtaccgacaacgcggcgatgatcgcctgcgccggggtggcccgcttcgagagggggttccgttcatctctcgatctgccggtgcaatcgcgcttgtcgctcgaagcgtgtgacagcctttaccagtgcctgccggtcccttga

SEQ ID NO: 42157 - protein, 342 aa, Gloeobacter violaceus PCC 7421
MTTIFAIETSCDESAAAIVRGRTVVASIIASQIDVHRLTGGVVPEVASREHLQALGGVIAACFAEGGLGWADIDAVAFTCAPGLVGSLLMGSMAAKTLALVHARPLVGIHHLEGHIYSAFLSDPALEPPFLCLLVSGGHTSLVAVEDHGRYRILGRTRDDAVGEAYDKVARVLGLGYPGGPAIDKLAQRGDPRAFALPGGRVESPFDTSFSGLKTAVLRLAEKHRLQRLPIDRADLAASFQRTVVETLAERVELALAHTGYDTVVVAGGVSANRGLRERLGQAGPYRAVFPPMHFCTDNAAMIACAGVARFERGFRSSLDLPVQSRLSLEACDSLYQCLPVP

SEQ ID NO: 42158 - DNA, 1014 bp, Photorhabdus luminescens subsp. laumondii TTO1
  CDS (1)..(1014): transl_table=11
atgcgagttttaggtatagaaacgtcctgcgatgaaaccggaatcgcaatttatgacgacgaagccggtttattggcaaatcaattatacagtcagattaaactgcatgctgattacggtggtgtcgtgcctgaattggcttcacgtgaccatatccgcaaaacagtgcccttaattcaagctgctttgaaagaagcaggattaacctgtaaagatattgatgcggtggcttatacagcaggtcctggtctggttggtgcattgttggtgggggcgacgattggccgttctctggcgtttgcttgggatgttcctgcgattcctgttcatcatatggaagggcatttactcgctccaatgctggaagataacagtcctgagttcccgtttgtagctttgctggtgtctggtggtcatacacagcttattagtgtgacgggtatcggtaaatatgagctacttggtgaatcaatagatgatgccgctggtgaagcgtttgataaaacagctaagttactgggattggattatccaggagggccggtactctccagaatggctcagaaaggagaagttgggcgttttgtatttcctcgcccgatgacagatcgtcctgggttggatttcagtttttcaggattgaaaacttttgcgtctaatactattcataacaacagcgatgatgagcagaccagagcggatattgcccgcgcttttgaagacgcagtggttgatacattagcgattaaatgtaagagagcgcttgagcagaccgggttcaagcgactagtgatggctggtggtgtcagcgccaaccgggcattgcggattaaaatggaagaggtcatggcaaaattgggtggcgaagtattttatgcgcgccctgaattctgtacagataacggtgccatgattgcgcttgccggcatgatccgcctaaaaggagaggtgaatgactcacttggcgtgatagtcaaagcccgctggccattgtcggaattacctccattataa

SEQ ID NO: 42159 - protein, 337 aa, Photorhabdus luminescens subsp. laumondii TTO1
MRVLGIETSCDETGIAIYDDEAGLLANQLYSQIKLHADYGGVVPELASRDHIRKTVPLIQAALKEAGLTCKDIDAVAYTAGPGLVGALLVGATIGRSLAFAWDVPAIPVHHMEGHLLAPMLEDNSPEFPFVALLVSGGHTQLISVTGIGKYELLGESIDDAAGEAFDKTAKLLGLDYPGGPVLSRMAQKGEVGRFVFPRPMTDRPGLDFSFSGLKTFASNTIHNNSDDEQTRADIARAFEDAVVDTLAIKCKRALEQTGFKRLVMAGGVSANRALRIKMEEVMAKLGGEVFYARPEFCTDNGAMIALAGMIRLKGEVNDSLGVIVKARWPLSELPPL

SEQ ID NO: 42160 - DNA, 1053 bp, Corynebacterium diphtheriae NCTC 13129
  CDS (1)..(1053): transl_table=11
atgattgttcttggtattgagtcgtcgtgtgatgagacgggtgtggggattattgatttggccgatgacggcacgatgacgattgtgggggatgcggtggcgtcgtcgatggagcagcatgcgcgttttggtggtgtggttccggagattgcgtcgcgtgctcatttggagtcgatgattccggtgatgaaggaggcattggcgcaggcgggggtggagcgtcctgatgcggtggctgcgacggtgggccctgggttggctggtgcgttgttggtgggggcgtcggctgctaaggcgtatgcggctgcgtggggtgttccgttttatggtgtgaatcatttgggtggccatgtggcggtggcgaatttggagggggaggagttgccgcattcgattgcgttgttggtgtcgggtgggcatacgcagattcttgaggttcaggcggtggggaagccgatgcgggagttggggtcgacgcttgacgacgccgccggcgaggcttatgacaaggtggcacggctgcttgggttgggttacccaggcgggccggttgtggataagcttgctgctcgcggtaatcgtaaggcgattcgtttcccgcgtggcctttcgcgtgccgacgatctgcgtggtgagcaccgctatgatttttcgttttcgggtgtgaaaacgtcggtggctcgttacgtggagtctgcggagcgcgagggccgtgtgatttctgtggaggatgtgtgtgcgtcgttccaggaggctgtggtggatgtgttgacgtcgaaggccatcatggcgtgtaaagatacgggtgcttcggtgctgttgcttggtggcggtgtggcggcgaattcgcgattgcgggagttggcggcggcgcgatgccaaagtgcgagcatcgagttgcgggtgccgagctttaagttatgcacggataatggcgtgatgattgctgcggtggcgtctcagttgattcatgagggtgcgcagccttcgggcttgtcggtgggaacggatacttctttggaagtggaaatcccgttggtgcattcgctgtag

SEQ ID NO: 42161 - protein, 350 aa, Corynebacterium diphtheriae NCTC 13129
MIVLGIESSCDETGVGIIDLADDGTMTIVGDAVASSMEQHARFGGVVPEIASRAHLESMIPVMKEALAQAGVERPDAVAATVGPGLAGALLVGASAAKAYAAAWGVPFYGVNHLGGHVAVANLEGEELPHSIALLVSGGHTQILEVQAVGKPMRELGSTLDDAAGEAYDKVARLLGLGYPGGPVVDKLAARGNRKAIRFPRGLSRADDLRGEHRYDFSFSGVKTSVARYVESAEREGRVISVEDVCASFQEAVVDVLTSKAIMACKDTGASVLLLGGGVAANSRLRELAAARCQSASIELRVPSFKLCTDNGVMIAAVASQLIHEGAQPSGLSVGTDTSLEVEIPLVHSL

SEQ ID NO: 42162 - DNA, 1170 bp, Rhodopseudomonas palustris CGA009
  CDS (1)..(1170): transl_table=11
atgattgcattccaagaccccgcaatgctacgcgaggcaaggagaacgccggttcgggcgcaaacgcaagggctcaatttgactagtgaacaagccttgctggtgctggggatcgagaccacctgcgatgaaaccgcagccgccgtggtcgagcggcgcgctgacggcagcgggcgcctcctctccaatatcgtgcgttcccagaccgatgaacacgccccctttggtggcgttgtcccggagatcgccgcgcgcgcccatgtcgatgtgctcgacggcatcatcgcggcggcgatgaacgaagccggcgtggcgttcgccagtctgtccggggttgcggcagccgccgggccagggctgatcggtggcgtgatcgtcggactgaccaccgccaaggcgattgcgctggtgcacggcactccgctgatcgcggtcaatcacctcgaagcccacgcgctgacgccccggctgaccgactcggtcgaatttccctactgtctgttcctcgcgtccggcggccacacccagatcgtcgcggtgctcggcgtcggcaattacgtccggctcggcaccacggtcgacgacgcgatcggcgaggcattcgacaagatcgccaagatgctcggcctgccctaccctggcggccctcaggtcgagcgcgccgcagaagccggcgatcccaaccgcttcgcatttccccgcccgatgctcgggcgccaggatgctaatttctctctgtccgggctgaagactgcggtccgcaacgaggccggtaaactgacgccgctcgatccgcaggacatcaacgatctgtgcgcgggctttcaggccgcggtgctggaatcggtggccgaccggctcggcgccgggctgcggctgttcaaggaacggttcgggccgccgaaggcgctggtcgcggccggcggcgcggctgccaatcaggcgatccgccggatgctgcgcgaagtcgccgccaaggtgcagaccacgctgatcgtgccgccgccggcgctgtgcaccgacaacggcgcgatgatcgcctgggccggagccgagcggctggcgctcggcctcaccgacacgatggataccgcgccgcgcgcgcgttggctgctcgacgccaacgccaccgcaccggcgaaatttgccaacacgcgtgccgggttctaa

SEQ ID NO: 42163 - protein, 389 aa, Rhodopseudomonas palustris CGA009
MIAFQDPAMLREARRTPVRAQTQGLNLTSEQALLVLGIETTCDETAAAVVERRADGSGRLLSNIVRSQTDEHAPFGGVVPEIAARAHVDVLDGIIAAAMNEAGVAFASLSGVAAAAGPGLIGGVIVGLTTAKAIALVHGTPLIAVNHLEAHALTPRLTDSVEFPYCLFLASGGHTQIVAVLGVGNYVRLGTTVDDAIGEAFDKIAKMLGLPYPGGPQVERAAEAGDPNRFAFPRPMLGRQDANFSLSGLKTAVRNEAGKLTPLDPQDINDLCAGFQAAVLESVADRLGAGLRLFKERFGPPKALVAAGGAAANQAIRRMLREVAAKVQTTLIVPPPALCTDNGAMIAWAGAERLALGLTDTMDTAPRARWLLDANATAPAKFANTRAGF

SEQ ID NO: 42164 - DNA, 1038 bp, Bdellovibrio bacteriovorus HD100
  CDS (1)..(1038): transl_table=11
gtgattgaaagagttctcgccattgaaaccagctgtgatgacacctctgtcgcgatcgttgatcgtaccggctgggttcactctgtggtggcggcctctcaggatctggatcacgaaatctatggcggcatcgtccctgaaattgccgcccgcaaccattccatcgctttaattccattaatcgaagaagcctttaagaaagccaacatgaattggtctgacgtgcagggtattgccgtcaccaatcgtccgggtttgatcggcgctttgattgtggggctggtgactgcgaagtccttgtctcaggcaaaacatttgcctttcttgggtgtgaaccacctggaagggcatttgctggcgccgtttttgcgcgatgataaatatgctccaccggaagattttggttacccatatgtgggtttggcgatcagcggggggcacacaagtttgtatcaaattaaaggactgggcgattatcgtatcttgggtgctaccaaggatgatgcggccggggagtgtttcgataaatttgcaaagatggcaggcctggggttcccgggtggagtgcgcgtcgatcaaatggccaaggcggggaatccgcaggctttcgaattcccccgcagcatgatccatgatgacactttcgacatgagcttctcgggattaaaatcttccggccagcgcatgcttgaacaactgggaccagaacttgtgcaggagcgtctgccggatctgtgcgcctcgttccaggaagccatcgtggatgtcctgatcgcgaagctggatcgggcggcgaaagtcttccgctccaagcgtgtgattctgaccggcggggtcagcgcgaattcgcgtcttcgtcagcgggctcaggaatgggccgacaaaaaaggttatactttggtgatcccacctctgcgttactgtactgataacgccgcgatgatcggttacgtcggtgctttgcgcatggctcgcggtgaagtgtcggctttggatctgggaccgtcccctcaagctcttgcatcggattttaaatga

SEQ ID NO: 42165 - protein, 345 aa, Bdellovibrio bacteriovorus HD100
MIERVLAIETSCDDTSVAIVDRTGWVHSVVAASQDLDHEIYGGIVPEIAARNHSIALIPLIEEAFKKANMNWSDVQGIAVTNRPGLIGALIVGLVTAKSLSQAKHLPFLGVNHLEGHLLAPFLRDDKYAPPEDFGYPYVGLAISGGHTSLYQIKGLGDYRILGATKDDAAGECFDKFAKMAGLGFPGGVRVDQMAKAGNPQAFEFPRSMIHDDTFDMSFSGLKSSGQRMLEQLGPELVQERLPDLCASFQEAIVDVLIAKLDRAAKVFRSKRVILTGGVSANSRLRQRAQEWADKKGYTLVIPPLRYCTDNAAMIGYVGALRMARGEVSALDLGPSPQALASDFK

SEQ ID NO: 42166 - DNA, 1647 bp, Methanococcus maripaludis S2
  CDS (1)..(1647): transl_table=11
atggataattctaaagacgacttaatatgtattggatttgagggaactgctgaaaaatcaggtgttggaataattacctcaaagggcgaagttttgtttaacaaaacaataatttatactccgcctgtacagggaatacaccctagagaagccgcagatcaccacgcagaaacttttgtgaaacttttaaaagaagcattaaacgaagttccgcttgaaaaaattgatcttgtttcattttcactcggtcctggactcggtccaagtttgagggttactgcaacaactgcaagagcactttctctttcaataaataaacccataatcggggtaaatcactgtatcggccacgtggaaattggaaaattaacaactgatgcagtggacccgcttacattatatgtaagtggtggaaatactcaagttttggcatacactggaaaaaaataccgggtaattggtgaaactctcgatattgcgataggaaactgtctcgaccagtttgcaaggcactgtaatttaccgcatccgggtggggtatacgttgagaaatttgcaaaagatggaaataagtttataaaactcccatacaccgttaaaggaatggatctttctctttcagggttattaacgtctgcaatgaaaaaatacgattcaaaagaaagaattgaagatgtatgctactcattgcaggaaacttcattttcaatgctaacagaaatcaccgaaagagcgcttgcacatactaataaagccgaagtaatgcttgttgggggagttgctgcaaataatcggttaaaagaaatgcttaaggtaatgtgtgaagagcagaatgttgatttctacgttccagaaaaacagttttgtggcgataacggtgcaatgattgcatggcttgggatattgcagtatttaaatggaaaaagaatggatttgaaggatacaaaaccgatttcaaactacagaagtgacatggtcgaagttaactggattcatgacgaaagcaaaaacttgaatgatggaaatattaaatctcgaaaaattccaaaacatttgattggaaaaggcgctgaagccgatatatcaaaaggaaggtatttagaatttgaatctattacaaaagagcgagttaaaaaaggataccgtattttaaaactggatgaattgataaggacaagaagaacagtaaaagaagcaagatttttggcagcagttaaagaatgtggaattcatgctccaagcatttatgacatcgataaagagaataaaaaaattataatgggctacattcacggaaaaattgcaaaagacgaaattgaagaaggaaatatcgaattttgtaaaagtttaggggaaactattggaaaaatgcatggcagtggaattgtgcacaatgatttaacaacttcaaactttataatttcaaaaaatccatatataatagattttgggcttggaaaatacagcgatttaattgaagacaaagcaattgatttgatagtcttaaaaaaatcgataatgagcatccactatgataaatttgatttggtctggaataaaataatagacggatacaaaacgtatgaactggctgaatcggttttggaatgcataaaagaggttgaaaaacgggcaagatatctttaa

SEQ ID NO: 42167 - protein, 548 aa, Methanococcus maripaludis S2
MDNSKDDLICIGFEGTAEKSGVGIITSKGEVLFNKTIIYTPPVQGIHPREAADHHAETFVKLLKEALNEVPLEKIDLVSFSLGPGLGPSLRVTATTARALSLSINKPIIGVNHCIGHVEIGKLTTDAVDPLTLYVSGGNTQVLAYTGKKYRVIGETLDIAIGNCLDQFARHCNLPHPGGVYVEKFAKDGNKFIKLPYTVKGMDLSLSGLLTSAMKKYDSKERIEDVCYSLQETSFSMLTEITERALAHTNKAEVMLVGGVAANNRLKEMLKVMCEEQNVDFYVPEKQFCGDNGAMIAWLGILQYLNGKRMDLKDTKPISNYRSDMVEVNWIHDESKNLNDGNIKSRKIPKHLIGKGAEADISKGRYLEFESITKERVKKGYRILKLDELIRTRRTVKEARFLAAVKECGIHAPSIYDIDKENKKIIMGYIHGKIAKDEIEEGNIEFCKSLGETIGKMHGSGIVHNDLTTSNFIISKNPYIIDFGLGKYSDLIEDKAIDLIVLKKSIMSIHYDKFDLVWNKIIDGYKTYELAESVLECIKEVEKRARYL

SEQ ID NO: 42168 - DNA, 1203 bp, Strongylocentrotus purpuratus
  CDS (1)..(1203)
atgtttgcaccgaccatctctacctgcaaagcgcccctttcgcatctccttcagagatgcagacgtcccacatcattatccagcctgaccaagcagctttgcagacatcatgagaggcacagtcatagcaggctggtgctggggattgagacgacgtgtgatgatacaggagcagctgtgatggatgagaccgggagggtcctcgctgaaagactccatacacagaagaggatccatgcaaagaatggaggtatcattccgcccctagcccaagcccttcaccgacagttcattgaccccgtggttcaagggaccatcaaggatgctgggattgaaatgaaggacctgtcagcagtagcactaagcaccatgcctggcatgcctctatcgttacgggttggtctggactataccaaggatatgctgctccgccatcctcatctaccacttatacccatccatcatatggaggctcatgcccttacagttagaatggtagagagagtagatttcccatttctggtgcttctggtttctggtggtaactgcatcctggctgtagcgagaggagtaggggatttcaaggtgcttggagtgacgtgggatgatgcccctggcgaggcatttgataaggttgcaagacgactgaagctgcagcaccatcctgactgcctaggtctgtgcggaggccaagcgatagagaagatggctgagaatggtaacttcaggttattaatagagcgaggagtgcctatgagtagacacagggattgtaacttctcctttgctggtctgaagaacatggctaactggctcatacaacatcatgaagtcagacaaggtttgactgcatctgatgaccaccatctagccaccatcagtgacatcgcagcatccttccagcacaaagtcactcagcaccttgttatccggattgctagggccatgctctactgtcagcagactggattgattccagaaggcaaccaaaccctggttgtttctggaggtgttgccagcaacgattacattcgcaaggctctagacttcaccacgagtctattcaagtacaaactcatctgcccaccaccgtacctgtgtacagacaatggagtgatgatagcatgggctggggtagaaagactaagactggatatgggcttcgctgaagatccccagtccctaagatttcaaccaaagtaa

SEQ ID NO: 42169 - protein, 400 aa, Strongylocentrotus purpuratus
MFAPTISTCKAPLSHLLQRCRRPTSLSSLTKQLCRHHERHSHSRLVLGIETTCDDTGAAVMDETGRVLAERLHTQKRIHAKNGGIIPPLAQALHRQFIDPVVQGTIKDAGIEMKDLSAVALSTMPGMPLSLRVGLDYTKDMLLRHPHLPLIPIHHMEAHALTVRMVERVDFPFLVLLVSGGNCILAVARGVGDFKVLGVTWDDAPGEAFDKVARRLKLQHHPDCLGLCGGQAIEKMAENGNFRLLIERGVPMSRHRDCNFSFAGLKNMANWLIQHHEVRQGLTASDDHHLATISDIAASFQHKVTQHLVIRIARAMLYCQQTGLIPEGNQTLVVSGGVASNDYIRKALDFTTSLFKYKLICPPPYLCTDNGVMIAWAGVERLRLDMGFAEDPQSLRFQPK

SEQ ID NO: 42170 - DNA, 1281 bp, Nasonia vitripennis
  CDS (1)..(1281)
atgcatcagttacgaacattactgagaagctccaaactgtttttcgagctgcttcatagaaatccgaactctcattttttgaggagaaaaaacttttctacaaacgatagaccagcagtgatcctaggcatagaaacaagctgtgacgacactggcatcgcaatagttgacagtacgggtaaagtattgggtgaagctcataattcacaaataaccttccatttaccattaggtgggatcaatccaccgaatgctcgtgctttgcacttgcaaaatattcagagcgtctatgaagaatgtctgcgatctgccgatttgaaattgagcgatgtagatgctattgctgtaacagtggaacctggattaccattgtcgctaattgtaggaagagattttgctttgaatttatccagagtagctgacaaacctttgatacccattcatcatatgaaagctcatgctttgacagcgagaatgactcaaaaggtggattttccatttctcgtaatgctcatatcgggtggtcattccttacttgcaatagcagaatcaccggatcagtttaaattacttggtcaaacctttgacgatgcacctggtgaagctcttgataaagtggcacgaagattaaaactgatgaatattttagagtactctgaaatcagtggaggagaagctatcgaattagctgcaagaaaagcagacaatcctgatcaatttaattttcctggaattttaatgagctacagagactgtaattttagcttttctggcttaaaaaatatagccagaaggcatataatggatcaagaagaaacacataacattaagttagatgctataatcccagatgtaaacaacctgtgtgcaggattcttaatttcaatgacaaggcatttatgtcacagagctcagagagcaatggaattcgttttgaaaaaagagttattcccagaagataacagaacttttgttgtatccggtggagtagcttccaataattttattgccaatgctcttaacaaagtttgccaagaaacagaattcagatttgtccgacctccaccaagactctgctccgacaatggcattatgatcgcgtggaatggtgtggaaaaatatctgaccaattctggtgtattaagagataggaatgaaatagacaaagtggacattgcacacagatcacccattggcgaggactggagaaaaatagtgctcgatgaaggtataaaaagaaaatgggttaaattaaaattcaatgaattaatagatagataa

SEQ ID NO: 42171 - protein, 426 aa, Nasonia vitripennis
MHQLRTLLRSSKLFFELLHRNPNSHFLRRKNFSTNDRPAVILGIETSCDDTGIAIVDSTGKVLGEAHNSQITFHLPLGGINPPNARALHLQNIQSVYEECLRSADLKLSDVDAIAVTVEPGLPLSLIVGRDFALNLSRVADKPLIPIHHMKAHALTARMTQKVDFPFLVMLISGGHSLLAIAESPDQFKLLGQTFDDAPGEALDKVARRLKLMNILEYSEISGGEAIELAARKADNPDQFNFPGILMSYRDCNFSFSGLKNIARRHIMDQEETHNIKLDAIIPDVNNLCAGFLISMTRHLCHRAQRAMEFVLKKELFPEDNRTFVVSGGVASNNFIANALNKVCQETEFRFVRPPPRLCSDNGIMIAWNGVEKYLTNSGVLRDRNEIDKVDIAHRSPIGEDWRKIVLDEGIKRKWVKLKFNELIDR

SEQ ID NO: 42172 - DNA, 1008 bp, Nasonia vitripennis
  CDS (1)..(1008)
atgatcgccattggatttgaaggtagtgccaacaagttaggcataggaatcatcaaagatgatgaaatattgtccaatgttcgccacacatacatcacacctcctggtgaagggttccttcccagagaaactgcacagcatcaccgagagcatgtactgccagtattgaaaaaagctctggaagatgcaaagttgacgttaaaagatgttgatgtgatctgttacacaaagggtcctggaatgggtgcgcccttgacagtggctgcattagtagcacgtacggtggcacaactgtacaacaagcctattgtagctgttaatcattgtgtgggccacatagagatgggcagactaataaccaaaagtaataatcccattgcactgtacgtatccggtggaaacacacaaatcatcgcatactctcagcagaggtacaggatattcggtgaaacgattgatattgcggttggaaactgtttggatcgatttgcaaggctattaaatctctcaaacgaccccagccccgggtacaacattgagcaactcgcaaagaaaggtacaaaattcgcaccgctgccatacgtcgtcaaggggatggatgtctccttttccgggatattaagccatgcagaggagcgcatcgaaggctggctcaagtcgaaagagtacacagcggaagatctgtgcttctccttgcaagaaaccgtgttcgccatgctcattgaaataacagagcgagcgatggctcacgtgggctcgagcgaggtgctgatagtcggcggagtgggctgcaacgagcggctgcaggagatgatgggcgtgatgtgtcgggagcgcggagctaccctctacgccacggacgagcgtttctgcatcgacaacggggtcatgatcgccgtcgccgggctgctgcagttcaaagccgagggacggagcaccgcctggaataagaccaactgcgtgcagaggttcaggacggacgacgtgctggtcacctggcgcgactga

SEQ ID NO: 42173 - protein, 335 aa, Nasonia vitripennis
MIAIGFEGSANKLGIGIIKDDEILSNVRHTYITPPGEGFLPRETAQHHREHVLPVLKKALEDAKLTLKDVDVICYTKGPGMGAPLTVAALVARTVAQLYNKPIVAVNHCVGHIEMGRLITKSNNPIALYVSGGNTQIIAYSQQRYRIFGETIDIAVGNCLDRFARLLNLSNDPSPGYNIEQLAKKGTKFAPLPYVVKGMDVSFSGILSHAEERIEGWLKSKEYTAEDLCFSLQETVFAMLIEITERAMAHVGSSEVLIVGGVGCNERLQEMMGVMCRERGATLYATDERFCIDNGVMIAVAGLLQFKAEGRSTAWNKTNCVQRFRTDDVLVTWRD

SEQ ID NO: 42174 - DNA, 1041 bp, Anopheles gambiae str. PEST
  CDS (1)..(1041)
atggtggttgcaatcggattcgaaggtagtgccaacaaaattggtgtcggaatcgtccgggatggtgaagtgttggcgaacgagcgtgaaacgtacatcaccccgcccggtgaaggttttctaccaaaagaaacggcacagcatcaccggtcccgggtgctggacatactgaagcgagcgctggacgtgtcgggcatagcgcccgacgagatcgatgtcgtgtgctacacgaaaggccccggtatggcaccgcccctactagcggtggccatcgtcgctagaacgatagcgcaaatctggaacaaaccgatactgggggtgaaccattgcatcgggcacatcgagatgggccggctgataacgaaagccgttaatcccaccgtactgtacgtgagcggcggcaacacgcaaatcatttcgtacgcctgcaaacggtaccgcatcttcggcgaaacgatcgacattgcgatcggcaactgtttggatcgatttgcacgcatcatccacctttcgaatgacccgagcccgggatacaacatcgagcagatggcgaagaagggcaaaaactatgtcccgctgccgtattcggtcaagggtatggacatgagcttctcgggcatactgtcgttcctggagcagaaggcacgcccgaaaaggaagcagcagaaaatgcaaaccaaggcaacggaggaggaaaaatggaccgatgaggatctgtgcttttcgctgcaggagacgctgttcgcgatgctggtggaaactaccgaacgggccatggcgcataccggctcggccgaggtgctcatagtcggtggcgttggatgcaacgtgcgcctgcaggagatgatgggcataatgtgcgaggagcgcggtgccaagctatttgcgaccgacgaacggttctgtattgacaacggtgtgatgatagcgcacgccggttgggaaatgttccgcagcggatcgcgtatggcgtggaacgatgcgaccattacgcagcgcttccggacggacgaggtggaagtcacgtggcgggatgattga

SEQ ID NO: 42175 - protein, 346 aa, Anopheles gambiae str. PEST
MVVAIGFEGSANKIGVGIVRDGEVLANERETYITPPGEGFLPKETAQHHRSRVLDILKRALDVSGIAPDEIDVVCYTKGPGMAPPLLAVAIVARTIAQIWNKPILGVNHCIGHIEMGRLITKAVNPTVLYVSGGNTQIISYACKRYRIFGETIDIAIGNCLDRFARIIHLSNDPSPGYNIEQMAKKGKNYVPLPYSVKGMDMSFSGILSFLEQKARPKRKQQKMQTKATEEEKWTDEDLCFSLQETLFAMLVETTERAMAHTGSAEVLIVGGVGCNVRLQEMMGIMCEERGAKLFATDERFCIDNGVMIAHAGWEMFRSGSRMAWNDATITQRFRTDEVEVTWRDD

SEQ ID NO: 42176 - DNA, 1065 bp, Magnaporthe grisea 70-15
  CDS (1)..(1065)
atggccatcccatcaaaccctgccaagcgccgccgtatcgccctcggatgcgaaggcagcgcaaacaagttgggcatcggcatcatcgcccacccgcccgaaggtgaggttggcgacccggtggtgctctccaacgtccgggacaccttcgtctctcccccggggacgggcttcctgcccaaggatacggcggcgcaccaccgctccttcttcgtccgggtggcacagcaggccatccgggacgcgggcgtcacggtggccgaggtcgactgcatttgctatacaaaggggccggggatgggggcgcctctgacgagcactgccatcggcgcccgcacgctcgccctgctctgggacaagccgctcgtgggcgtcaaccactgcgtcggccacatcgagatgggccgcgccatcacgggcgccgacaaccccgtcgtgctgtacgtcagcggaggcaacacgcaggtcatcgcgtacgccgagcagcggtaccgcatctttggcgagacgcttgacatcgccgtcggcaactgccttgaccgcttcgcccgcaccttgaaaatcagtaacgacccggcacccggctacaacattgagcagctggccaagcagggctctgtgctcctggaccttccctacgccgtcaagggcatggactgctccttctcgggtatcctgactcgcgccgacgagctggccgcccagatggtagccaagccggaccttttcacccccgccgatctgtgcttcactctgcaggagaccgtctttgccatgctagtcgagatcacggaacgcgccatggcccatgttggtagcacgcaggttctcatcgtcggtggcgtgggatctaacgagaggctgcagcagatgatgggagccatggctaaagaccgcggcggcagcgtctacgccacggatgaacgattctgcatcgacaacggaatcatgatagcacatgccggtctcctcgcttacgagactggtttcaggacaccattagaagaaagcacatgtacgcaaaggttcaggacagacgaggtgcacgtcaaatggagagattag

SEQ ID NO: 42177 - protein, 354 aa, Magnaporthe grisea 70-15
MAIPSNPAKRRRIALGCEGSANKLGIGIIAHPPEGEVGDPVVLSNVRDTFVSPPGTGFLPKDTAAHHRSFFVRVAQQAIRDAGVTVAEVDCICYTKGPGMGAPLTSTAIGARTLALLWDKPLVGVNHCVGHIEMGRAITGADNPVVLYVSGGNTQVIAYAEQRYRIFGETLDIAVGNCLDRFARTLKISNDPAPGYNIEQLAKQGSVLLDLPYAVKGMDCSFSGILTRADELAAQMVAKPDLFTPADLCFTLQETVFAMLVEITERAMAHVGSTQVLIVGGVGSNERLQQMMGAMAKDRGGSVYATDERFCIDNGIMIAHAGLLAYETGFRTPLEESTCTQRFRTDEVHVKWRD

SEQ ID NO: 42178 - DNA, 1008 bp, Apis mellifera
  CDS (1)..(1008)
atgacaattgctattggattcgaaggtagtgcaaataaattaggtattggaattattcaagatcagaatattttatcaaatatacggcatacatatattactccaccaggtgaaggctttttacctcgtgaaactgcacaacatcatagagaatatatacttaatattctacaaaaagcattggatgaggctaaaataatattgaaagatgtagacataatatgttatacaaaaggaccaggaatgggtgcaccattaacagttactgcattagtagcaagaacaattgctcagatatataataaaccaataatagcagtaaatcattgtattggtcatatagaaatgggaagattgataacaggaagtataaatcccactgttctttatgtttctggtggaaatacacagattattgcatattctcaacagaaatattgtatttttggagaaacaatagatattgctgttgggaattgtttagatcgttttgcaagattgttaaaactttcaaatgatcctagtcctggttataatatagaacaattagcaaaaaaaggaaaaaaattagttccattaccttatgtagtaaaaggaatggatgtatcattttctggaattttaagttatatagaagaacatatttcttcttggcttgattcaaaagaatttacttcagaggatttatgtttctctttacaagaaacaatatttgctatgcttatagaaattacagaaagagcgatggcccatataaaatcatccgaagtattaattgttggtggtgtaggatgtaatgaaaaattacaagatatgatgaaaattatgtgcaaggaaaggaatgcaatactttatgctacggatgaacgattttgtatagataatggtgtaatgattgctgttgctggattacatcaatataaaagccaaggaaatactccatggacagaaacaacttgcatacaaaggtatagaacagatgatgtatatgtttcctggagagaataa

SEQ ID NO: 42179 - protein, 335 aa, Apis mellifera
MTIAIGFEGSANKLGIGIIQDQNILSNIRHTYITPPGEGFLPRETAQHHREYILNILQKALDEAKIILKDVDIICYTKGPGMGAPLTVTALVARTIAQIYNKPIIAVNHCIGHIEMGRLITGSINPTVLYVSGGNTQIIAYSQQKYCIFGETIDIAVGNCLDRFARLLKLSNDPSPGYNIEQLAKKGKKLVPLPYVVKGMDVSFSGILSYIEEHISSWLDSKEFTSEDLCFSLQETIFAMLIEITERAMAHIKSSEVLIVGGVGCNEKLQDMMKIMCKERNAILYATDERFCIDNGVMIAVAGLHQYKSQGNTPWTETTCIQRYRTDDVYVSWRE

SEQ ID NO: 42180 - DNA, 1158 bp, Apis mellifera
  CDS (1)..(1158)
atggctacgaaatatgtagtgtatgatatattatcacacatacataaatgtaatttaaagttaataagaaaactgcacaataaacctataattttaggaatagaatctagttgtgatgacacagcttttggaattgttgatagtaatggaaatattttaggcgaatcaattaattctcaatatttaactcatttaaattttggaggaataattcctacatttgcaagatcattgcatgtaaataatatcacaaaaacttgtgaagatgcattgagagctgcaaatctaagaataagagatattgatgcaatagctacaacttttggaaaatatttagcaaaaattggaggaaaaccatttataccaatacatcatatggaagctcatgctttaacagcaagaataaataaaaagattgattttccatatcttgctttattaatttctggaggtcattgtttattagcaattgttgaaaatgtaaataaattttatttacttggtactagtttaagtaatacacctggtgatgtttttaataaggttgcacgaagattaaaattaagaaatattccagaatttagtacattaaatggaggccaagctatagaacttgcagcaagtaaagcttcaaatgttaatcagtttttatttccacttataatgatgcaatttcgaaattgtaattttagtttttctggattattaaatttttttggagatatgataattcctgatgtatataatttttgtgcagcatttcaattagctttaacaacacacatttgtcaaagaactcaaagagcaatggaatttattaataaaatgtctttatttcctgaaaataaacagacattggttatttcaggaggagttgcatgtaataattttctagctaaagcattgaatattgtaagtacagaattaggttatacttttgtgagaactccttctaaattatgtaccgataatggaataatgatagcatggaatggagtagagaaatggatacaaaatatagatgttattagagatataaatgaaattgaaaaaattgaagcagaaaaagtagctacacttggagaaaattggattaaaaaagtagaagaagcaaatttaaaatgtaaatgggtaaaaataaagaaaaaacttttttaa

SEQ ID NO: 42181 - protein, 385 aa, Apis mellifera
MATKYVVYDILSHIHKCNLKLIRKLHNKPIILGIESSCDDTAFGIVDSNGNILGESINSQYLTHLNFGGIIPTFARSLHVNNITKTCEDALRAANLRIRDIDAIATTFGKYLAKIGGKPFIPIHHMEAHALTARINKKIDFPYLALLISGGHCLLAIVENVNKFYLLGTSLSNTPGDVFNKVARRLKLRNIPEFSTLNGGQAIELAASKASNVNQFLFPLIMMQFRNCNFSFSGLLNFFGDMIIPDVYNFCAAFQLALTTHICQRTQRAMEFINKMSLFPENKQTLVISGGVACNNFLAKALNIVSTELGYTFVRTPSKLCTDNGIMIAWNGVEKWIQNIDVIRDINEIEKIEAEKVATLGENWIKKVEEANLKCKWVKIKKKLF

SEQ ID NO: 42182 - DNA, 1188 bp, Candida glabrata CBS 138
  CDS (1)..(1188)
atgatgttgtctacttcgtggagatcaacaggaaacctaactagaagtcttccattaaggatcaaccgattctacaaagtgcttgcgattgaaacctcatgcgatgatacctgtgtgtcaatcctggatagatttgcagaaactcaaccaccaagggtgttggttaatctgaagagcacactaaacagctcagaatatggtggtattatcccaactatggcacatgaacaccatcagatgaaaataggttcactagtacaagaagctttaactgcacacaaatgtacttctcctaaagaaaacccatcaatcgatctgatttgtgttaccagaggaccaggcatgacaggatcactatcggcgggactgacatttgccaaaggtttatccgttggcctgaataagccgctcattggcgttcaccatatgcttgggcatcttcttataccgagaatggcaagcaatggttctgcaccagagtacccttttattagcttactcgtcagtggtggccacagtatgctggttttatcagagagcattgacaaacatgagatactctgcaatacgttagatattgccatcggcgattctcttgataaatgtggccgcgaactgggattcaaaggaaatatgattgcaaaagaaatggatgcctttataaatgaagataaaaatgatgtggatcacaattgcatattagagaaacttccgaatccgttgcatggacctaataacgcccatgtacaagcattttcattttccccatttgtctcagttataaaagacaacatacaaaactacaataatctaactgacgcccagttaaggagtatgtcaattcagatacaaaatgctgtcttcaagcatctgataacgaagatacaatatgtagtgaagaaaaatgctgataaattaaaaaacgtaacaggttttgtttgctctggtggagttagtggcaatccgaccttgagagaaaccttagaaagagaattagcgtcgaggttccaaaacttttactatccaagaaatgatctctgtaccgataattcgattatgataggctgggcaggaatagaaatttatgaaaagttaggactaattagtgattattccataacaccgatacgccaatggccaatgaacgagctcttaacggtttctggttggaagaagagaatattgtag

SEQ ID NO: 42183 - protein, 395 aa, Candida glabrata CBS 138
MMLSTSWRSTGNLTRSLPLRINRFYKVLAIETSCDDTCVSILDRFAETQPPRVLVNLKSTLNSSEYGGIIPTMAHEHHQMKIGSLVQEALTAHKCTSPKENPSIDLICVTRGPGMTGSLSAGLTFAKGLSVGLNKPLIGVHHMLGHLLIPRMASNGSAPEYPFISLLVSGGHSMLVLSESIDKHEILCNTLDIAIGDSLDKCGRELGFKGNMIAKEMDAFINEDKNDVDHNCILEKLPNPLHGPNNAHVQAFSFSPFVSVIKDNIQNYNNLTDAQLRSMSIQIQNAVFKHLITKIQYVVKKNADKLKNVTGFVCSGGVSGNPTLRETLERELASRFQNFYYPRNDLCTDNSIMIGWAGIEIYEKLGLISDYSITPIRQWPMNELLTVSGWKKRIL

SEQ ID NO: 42184 - DNA, 1173 bp, Kluyveromyces lactis NRRL Y-1140
  CDS (1)..(1173)
atgtttaattgttacaagagtctaccgagaagtttggtttttcgaagagcataccgggttttagcgattgaaacgtcatgcgatgatacctgtgtagcgattttggatcgtgggacaaaggataggccagccgacgtgctgtgccatttgaagtccactttagacagcgtagagtatggcggtgttataccgacccgtgcgcatgagcatcatcagaaaaatatagcatcagtggtcaagtctgcactaaagaccacgaaatcacagaataagatcgatttggtatgtgctactaggggtcccgggatgccaggatcgttatctgtgggactagacgttggaaaagccctctctgttgcatgggacaaaccgttcattggtgttcaccatatgttaggccatttgttgataccgagactcgagactgatggtttgaaacctcagtacccgtttataacgttacttgtcagtggtgggcatacaatgttggtactttcaactgatgttgataaacacgagattctatgtgatactatagacatagctattggggattctttggataagactgcaagggagttgggaataaaaggtaacatgattgctaaggaaatggaatccttcataaacgaggaagatatcaatgtggtaagggcaggtattacatcagtaaaacccatgagattgcctacgccactaaagaaccagaatgggaggatgaacatgcaggctttttcattttcaccctttttgacggcagtgagacagcatctctcacaacccatcggcgaatacacggcggaagaaagaagatatatggcttatcaagtacaggaaagcatctttaaccatataataactaaactcaaccttgttctcaagttaaattctaaaaggctctccaatgtcaaacattttgtgtgttcaggtggggtgggcgccaatatgagacttcgtcatcggctagagacagatttgatacgtaattttgattctttccattatccaaaactagagtactgtacggataatgctgtgatgataggatgggctggaattgaactttatgagtcgcttggacttacctcagatttatctgttacacctatcagaaaatggccactaacagacatcttgaatgttcctggatggataatgaaaactcagtattga

SEQ ID NO: 42185 - protein, 390 aa, Kluyveromyces lactis NRRL Y-1140
MFNCYKSLPRSLVFRRAYRVLAIETSCDDTCVAILDRGTKDRPADVLCHLKSTLDSVEYGGVIPTRAHEHHQKNIASVVKSALKTTKSQNKIDLVCATRGPGMPGSLSVGLDVGKALSVAWDKPFIGVHHMLGHLLIPRLETDGLKPQYPFITLLVSGGHTMLVLSTDVDKHEILCDTIDIAIGDSLDKTARELGIKGNMIAKEMESFINEEDINVVRAGITSVKPMRLPTPLKNQNGRMNMQAFSFSPFLTAVRQHLSQPIGEYTAEERRYMAYQVQESIFNHIITKLNLVLKLNSKRLSNVKHFVCSGGVGANMRLRHRLETDLIRNFDSFHYPKLEYCTDNAVMIGWAGIELYESLGLTSDLSVTPIRKWPLTDILNVPGWIMKTQY

SEQ ID NO: 42186 - DNA, 1329 bp, Debaryomyces hansenii CBS767
  CDS (1)..(1329)
atgatacgatcgagcatatcgagaggaattttaccaagaaggattggtggatattatggcggtagatgttacatggttttggcgctcgaatcatcttgcgatgatgcgtgtgtagctcttcttgataaatattcaaaagatcaagcaccaaaggttatagaccaatttaaagagacattgaactcatctgggactggtggaattattcccacagatgcacacgagtttcatcaatttacgattgcaaatttggtagctaaattctgtaagaaacacaatcttaattcaacttcaccaccagatttgatatgttgcacgcgaggtcctggtatggtaggctcgttgagtgctagtttacaatttgcaaagggactttcagtaagttggaataagccattgataggagtccatcatatgttggggcatattttgatagcaaatttaccaaagagtcaacaacccgaaatggaggcacctaaatatccatttttaagtctactttgtagtgggggccataccatgctcgtacttctgaaatctctcactgagcatgagataatcattgatacggtggatattgcggccggtgattctatcgacaagtgtgccagggagttgggtttagtaggaaatatgttgggaaaggaattagaaagctacgtcaaagccattcctgaggacttgaaaaaaaaattcgaaaacacagatacaaagtcaagagataatgagtttaaatttcagctttctctccctctaagaagtcccaagcacctaaaaattcccgaaaagttagaattttcttttgcatcatttttgagtacaattcaaggttacaggacaaaatattttaacggtaaagattttgatgagatgacaaaaatgttcattgcatttaagcttcaagaattggttcttgaccatatggttaacagaataaatatcgcattgattaaacacgggattgatacaataaactacacgaaagcagatggaaaatttaagggtgttcaagactttatttgttcaggaggagttgcatcgaatcaacgattaagaaataaacttcataacaatttaaattacagaagcttgactaaagaatcagaatcgcatattcttaatttccattttcccgatttagcattatgtactgacaatgccattatgataggggttgcaggtattgaaatatttgaaaatctaaaagttaaatccgacttgaatattttgccaattagaaaatggccaatggatgagttattgaaagttgacgggtgggttcaattgaatgatgaagaaattaataaaatacgaaatttagatctataa

SEQ ID NO: 42187 - protein, 442 aa, Debaryomyces hansenii CBS767
MIRSSISRGILPRRIGGYYGGRCYMVLALESSCDDACVALLDKYSKDQAPKVIDQFKETLNSSGTGGIIPTDAHEFHQFTIANLVAKFCKKHNLNSTSPPDLICCTRGPGMVGSLSASLQFAKGLSVSWNKPLIGVHHMLGHILIANLPKSQQPEMEAPKYPFLSLLCSGGHTMLVLLKSLTEHEIIIDTVDIAAGDSIDKCARELGLVGNMLGKELESYVKAIPEDLKKKFENTDTKSRDNEFKFQLSLPLRSPKHLKIPEKLEFSFASFLSTIQGYRTKYFNGKDFDEMTKMFIAFKLQELVLDHMVNRINIALIKHGIDTINYTKADGKFKGVQDFICSGGVASNQRLRNKLHNNLNYRSLTKESESHILNFHFPDLALCTDNAIMIGVAGIEIFENLKVKSDLNILPIRKWPMDELLKVDGWVQLNDEEINKIRNLDL

SEQ ID NO: 42188 - DNA, 1131 bp, Yarrowia lipolytica CLIB122
  CDS (1)..(1131)
atgagagcttatgctgcctcatccaggggcccattgcaacggcgactgctacacacctcacgatccctgacatacaacgtcttggccatcgaaacgtcctgtgacgatacctgcgcagccatcatctcacgtgaccgcgagaagaacacggcagcgctcatagaccatgtcaaaatcactttggactcgtctctacaaggaggaatcaatcccgctctggccaccgctcaccaccatcagagcgtagggcctttaataagagatgtgctaaaaaaacacgccgacacaacaattgacctggtttgtgccaccagaggacctggacttccaggctgcttgtcttcaggtgtcacctttgcaaaaggtctctctttaggcctgggagtcccctatcttggagtccatcatatgttggctcatttactgactcctcgtttgttcgaggccgctgagggttattcgggtcataagaccgagtttccatttttatcccttcttgtctctggaggccataccatgcttgttctcagcaaatctctatatgaccacactgtgttgtgcaatactgcagatgtagcaattggggatgcgctcgacaagtgcgctcggacgttgggattccagggaaacatgctaggcaaggtaatggaccagtattgtcgatctgcagacactccatcatctcaatggagcattcccatgcctgtagacaacaagaacgacattcgatactcgtttgcagcctttcattcttacattggaatgaagaagaaggagacacaggctgaaaccactccagaattggccctggaagtccaaacagccattttcaaccatctcatgaagaaaacgaaagccgctttcaatatctacaagaaggagattgcctctgccaccaccctggtctgctctggaggagttgctgccaaccccagactgagagaagctcttcaggaactgtgtgccaagtacaaactcgaggctgtgttcccagatccctattggtgtactgacaacgctgccatgatcggatgggcaggtattgagctacatgaagacgggtatagaagcgatctggagggcttccagattcccaagtggcctctggccgagtttgagaaagagatctag

SEQ ID NO: 42189 - protein, 376 aa, Yarrowia lipolytica CLIB122
MRAYAASSRGPLQRRLLHTSRSLTYNVLAIETSCDDTCAAIISRDREKNTAALIDHVKITLDSSLQGGINPALATAHHHQSVGPLIRDVLKKHADTTIDLVCATRGPGLPGCLSSGVTFAKGLSLGLGVPYLGVHHMLAHLLTPRLFEAAEGYSGHKTEFPFLSLLVSGGHTMLVLSKSLYDHTVLCNTADVAIGDALDKCARTLGFQGNMLGKVMDQYCRSADTPSSQWSIPMPVDNKNDIRYSFAAFHSYIGMKKKETQAETTPELALEVQTAIFNHLMKKTKAAFNIYKKEIASATTLVCSGGVAANPRLREALQELCAKYKLEAVFPDPYWCTDNAAMIGWAGIELHEDGYRSDLEGFQIPKWPLAEFEKEI

SEQ ID NO: 42190 - DNA, 1494 bp, Aspergillus nidulans FGSC A4
  CDS (1)..(1494)
atgctacatctgcgggctgtatccgcattcacggctggccgcagaaacatctggagaaatgcgcggctgacctcagattcgcgacgccgggggcttctaacgctcgcgatcgaaacatcctgcgacgacacttccgtagcaatagtccacaaaaatgacaaatccggcgctgcaaagattcactttctcgagaatatcaccccggacctcacagcctatcaaggcatccaccctgtgcgcgctctcgaatcgcaccagcagaatgtcgcaaaactagtcaacaaagctctgtcacatctcccttattcatctgcagaatcacaaaatgatcctacaaagattgtttcgctcggcgacggcaaccgccagaagccagactttatatctgtgacccgaggccccgggatgcggtcaaatctgtttgccggactcgatacggcaaagggactggctgttgcatggcaggtgccgtttgtgggtgtccatcatatgcaggcacacctcttaacgccgaggcttgtttccgctcttgctctctcaccgggctcttcgcccaacaataccgaccggcagaacgaaaagggggaactacagccagccttccccttcctctccatcctcgcctcaggcggacataccctcctcgttaactcttcctccctaacagaccaccgcatcctcgccacaacaacagacgttgcgctcggcgaagccctcgacaaagccgcgcgcgagatcctgccttcatccctgctcagcacatccaagaacaccatgtatggcaaactactagaacaatatgcgttccccaacggccgcgccgactatgcagattatgtcgcgcccaagtcccgaggtgacgaaatcgccgtctcaaaggtcgtctcgaagtacggatggagtctcacaacgccgtatgcgcagacgagagagctggcgtttagttttgcgttccttgccacggcagtgaatcatacccttgctaaagctagaaaacgcgccggagaaacaggcttatcagatgaagagcgtgtctttctagcccgcgaggtcatgcgcgtgacgttcgagcacctcgcgtcacggactatcatcgcactggaatcgctgtgccagtgggttccgctcgtcccaaataatcctaatgacaagcggcaaaagccgctcccgagcagtgtccccgtatcaacactcgtcgtttccggcggtgttgcggcgaataagttcctaatgcatgtgctgaggacgtggttggatggacggggctttgggcatgtaggtgttgtggcgccgcctattagtctatgtacagataatgcggcgatggtgggctgggcggggattgagatgtttgaggcagggtggaggagtgcgttcgaggcgagggcattgaggaagtgggggcttgaggagggtgatgagagtgacgggggtgaagatgggggtcaagggatactgggtgttggagggtggcagagggaggggaaggaatga

SEQ ID NO: 42191 - protein, 497 aa, Aspergillus nidulans FGSC A4
MLHLRAVSAFTAGRRNIWRNARLTSDSRRRGLLTLAIETSCDDTSVAIVHKNDKSGAAKIHFLENITPDLTAYQGIHPVRALESHQQNVAKLVNKALSHLPYSSAESQNDPTKIVSLGDGNRQKPDFISVTRGPGMRSNLFAGLDTAKGLAVAWQVPFVGVHHMQAHLLTPRLVSALALSPGSSPNNTDRQNEKGELQPAFPFLSILASGGHTLLVNSSSLTDHRILATTTDVALGEALDKAAREILPSSLLSTSKNTMYGKLLEQYAFPNGRADYADYVAPKSRGDEIAVSKVVSKYGWSLTTPYAQTRELAFSFAFLATAVNHTLAKARKRAGETGLSDEERVFLAREVMRVTFEHLASRTIIALESLCQWVPLVPNNPNDKRQKPLPSSVPVSTLVVSGGVAANKFLMHVLRTWLDGRGFGHVGVVAPPISLCTDNAAMVGWAGIEMFEAGWRSAFEARALRKWGLEEGDESDGGEDGGQGILGVGGWQREGKE

SEQ ID NO: 42192 - DNA, 1353 bp, Candida albicans SC5314
  CDS (1)..(1353): transl_table=12
atgatttcaaatactttcaaaattcgatgtcccctaccgttgaaaagaatatcatcaacaagcatacggacatatcgtgttatggccatagaatcgtcgtgtgatgattcttgtgttgccttactcgaaaaatctcatcccaagactccaccaaaaattatagatcaatttaaacggacactacattctgctgatgtaggtggtatattacccacggcagcatataattatcatatggcaactattgccaacatggttcaagaattttgccataagcatcaaatttcagcattaaacccacctgatttactttgtgttaccagaggtccaggaatggcaggatccctaagtacttcaactgaatttgccaaagggttatctgttgcatgggatgttcccttagttggagtgcatcatatgttgggtcatttgttaactgcaaatttaccaaatctggaacaacccaagttaccacccccaaactatccatttttgagtttgttatgtagtggtggacacactatgcttgtattactgaaatcattaactgaacatgagattattgtaaatgtgggagatatcgccgtgggtgactcattggataaatgtgctcgagaattaggaatgtatggaaacatgttaggtaaagaattggaaaaatatataaattccatacctgaagaaactagaaatcaatatgaaaaattgagtgtgaatactagaattgctaatccatataattttagattaactcttccttattcagcacccaaatatggtattccaggagatgtgaaatttgcattctctcatttcttaagtaacattcaagaatataaagcaatgcattataacaaaaataggggtgaaggtgaaagtgagggcgagggtgagatagatttgacattagatgaagaaactaaacaatttattgcatataaaacacaagaatttatatttgatcatattgttgatagaataaatattgcattcaaaaaacatggcattaaaaatagaaatagtgatggtacttttattggggttaaagattttatttgttctgggggagttgcagcaaataatcgacttcgacagaaattacgggaaaagctagattttcaagagattggtaccgacaatgttaatgtgaattttcatttcccagatttatcactttgtacagataatgcgataatgattggagctgctggcatagaaatatttgaaaaattacgtttaagaacagatcttagttttctacctataagaaaatggccattgaacaaattattagacgttgatgggtgggttaaagtaaaagaagaagaatttaatagaatttgtaaatattaa

SEQ ID NO: 42193 - protein, 450 aa, Candida albicans SC5314
MISNTFKIRCPLPLKRISSTSIRTYRVMAIESSCDDSCVALLEKSHPKTPPKIIDQFKRTLHSADVGGILPTAAYNYHMATIANMVQEFCHKHQISALNPPDLLCVTRGPGMAGSLSTSTEFAKGLSVAWDVPLVGVHHMLGHLLTANLPNSEQPKLPPPNYPFLSLLCSGGHTMLVLSKSLTEHEIIVNVGDIAVGDSLDKCARELGMYGNMLGKELEKYINSIPEETRNQYEKLSVNTRIANPYNFRLTLPYSAPKYGIPGDVKFAFSHFLSNIQEYKAMHYNKNRGEGESEGEGEIDLTLDEETKQFIAYKTQEFIFDHIVDRINIAFKKHGIKNRNSDGTFIGVKDFICSGGVAANNRLRQKLREKLDFQEIGTDNVNVNFHFPDLSLCTDNAIMIGAAGIEIFEKLRLRTDLSFLPIRKWPLNKLLDVDGWVKVKEEEFNRICKY

SEQ ID NO: 42194 - DNA, 1119 bp, Candida albicans SC5314
  CDS (1)..(1119): transl_table=12
atggtcgttgatttggacaagtatcttaaactaggaaaagaccattacttggctcttggattggaagggtcggcaaacaaacttggtgtgggagtaatcaaacacaacaagggcccattatcatcaacaaaccgtgcagaagtattatcaaacatcagagatacttatataaccccaccaggggaagggtttctaccacgagatacagcaagacaccatagaaactgggtggtaagaatcatcaagcaggcattagccacagcaaaaattgcaggaaaagatatagatgtaatttgttttactcaaggtccaggaatgggtgcaccactacagagtgtagtcattgcagcaaggactttggcacagttatggaatatcccaattgtcggtgttaatcattgtgttggtcacattgaaatgggcagagaaatcactggtgcagaaaaccctgtggtgttatacgttagtggagggaacacacaagtcattgcgtactcgaaacaaaggtatcgtatattcggtgaaactcttgacatagcaattggaaattgtttggataggtttgcacgtacattaaaaatccctaacgagccagcacctggttataacatagaacaaatggccaagaaggggaaacatttggttcccttgccatacacagtcaaagggatggatttatccatgtcaggtatattggcagccatagatagcatagccaaagaaatgtttggcaaacaacaaaaaaagctcattgatgaagagtctggcgagcctataaccgcagaggatttatgtttttctttacaggagactttatttagtatgttggtggagattactgaacgagctttagcccatgttgatagtaaccaagttttaattgttggaggtgtagggtccaaccagagattacaagaaatgatgaagctaatgatccaggatcgtaaaaacggacaaatatatgccactgacgaacgtttttgcatcgacaatggtattatgattgcacatgccggtttgttgagctatagaactggtcaaactaaccaattgaacaacaccgtttgtacccaaaggtttagaacagatgaagtgtttgttaaatggagagacgattaa

SEQ ID NO: 42195 - protein, 372 aa, Candida albicans SC5314
MVVDLDKYLKLGKDHYLALGLEGSANKLGVGVIKHNKGPLSSTNRAEVLSNIRDTYITPPGEGFLPRDTARHHRNWVVRIIKQALATAKIAGKDIDVICFTQGPGMGAPLQSVVIAARTLAQLWNIPIVGVNHCVGHIEMGREITGAENPVVLYVSGGNTQVIAYSKQRYRIFGETLDIAIGNCLDRFARTLKIPNEPAPGYNIEQMAKKGKHLVPLPYTVKGMDLSMSGILAAIDSIAKEMFGKQQKKLIDEESGEPITAEDLCFSLQETLFSMLVEITERALAHVDSNQVLIVGGVGSNQRLQEMMKLMIQDRKNGQIYATDERFCIDNGIMIAHAGLLSYRTGQTNQLNNTVCTQRFRTDEVFVKWRDD

SEQ ID NO: 42196 - DNA, 1245 bp, Ustilago maydis 521
  CDS (1)..(1245)
atgtggctacaatacgtcagaagggccggccctctcggtcggctcttgacacggccacctttccgaccatcggcgcccccggatagaagaatcagcacatctcgaaattcctgccctttatcttccctcacaaccgtcaagcagcctcgactgatcctaggcatcgagacgtcatgtgacgactcctgcgcaagcatcgtctcgtccgaccgaaccatcctctcttccatcgtgaccaagcaagaccattcttccaccggcggcatccatccactctcggctgcacttgggcatcactccaacctcgcctcaaccattgctgcagcgatcgaacaggcaagaatcacggcatccgatttgcacgccatcgccgtcacccaaggccctggtatggctagcagtctcggtgttggcctttccgcagccaagacgctgtcagctgtgcttcacataccactaatttacgtacatcacatgcaggcacatgcattgacaccgctgcttaccgaaccggatccgcccaagttgcccttcttggtgctactggtctcgggtgggcataccatgctcgtcttggcgcgcagtgtgactcactttcggatcttggcgacgacgagcgacgattccatcggcgacgcctttgataaagtggcgagggatctgggtatcccatggacttcagcacccggagcagcgctcgaagcgctggcggcaagagcagaggcccatggtgatggtctcgtctttccgacgccgtgcaaaggtcaaccaactttctcctactctggtctcaaggctgcggttcaacgccacattgcatcttgctcacctgatgcaatggccgagtcggccaaatcatcgatagcagctgctttccaacgagcagcttgtgcgcagctcgaggacaagctaagcatggtgttgcgaccctctcatgtcagccaagattcgcgccatcgacctttcgctcgaatcgagttgctcgacggcgtgagcagcgacgacgtcaaaacagtcgtttgtagcggcggtgtagcgagcaatgctttcatccgatctcggttgagagagcatctcgaccgtctaggaaggacagatgtggacctacaattcccaccgctgtcgttatgcaccgacaatgctgcaatgatcgcatgggtcggccatctaatctaccaccagcgaactcgtgattatacacgtcatgcaaggcccaagtggagcttgcaagacattccgcaatag

SEQ ID NO: 42197 - protein, 414 aa, Ustilago maydis 521
MWLQYVRRAGPLGRLLTRPPFRPSAPPDRRISTSRNSCPLSSLTTVKQPRLILGIETSCDDSCASIVSSDRTILSSIVTKQDHSSTGGIHPLSAALGHHSNLASTIAAAIEQARITASDLHAIAVTQGPGMASSLGVGLSAAKTLSAVLHIPLIYVHHMQAHALTPLLTEPDPPKLPFLVLLVSGGHTMLVLARSVTHFRILATTSDDSIGDAFDKVARDLGIPWTSAPGAALEALAARAEAHGDGLVFPTPCKGQPTFSYSGLKAAVQRHIASCSPDAMAESAKSSIAAAFQRAACAQLEDKLSMVLRPSHVSQDSRHRPFARIELLDGVSSDDVKTVVCSGGVASNAFIRSRLREHLDRLGRTDVDLQFPPLSLCTDNAAMIAWVGHLIYHQRTRDYTRHARPKWSLQDIPQ

SEQ ID NO: 42198 - DNA, 1008 bp, Strongylocentrotus purpuratus
  CDS (1)..(1008)
atgcctactgtgattggttttgaaggcagtgccaacaagcttggtatcggcatagtcagagatggagaagtcttatccaatccaagacacacctacatcaccccacctggtgaaggtttccagcctagagacactgccagacaccatcagcagcatatcatgtctatcctgagaagggctttggatgaagctaagctaactccaaaagatatagactgcgtttgctatacaaaaggtccagggatggctgctcctctgctttcggttgcagtggtagcacggacagtggcccagctgtgggatgtacccattataggagtcaatcattgtataggacacattgagatgggtagacaggtgacgggtgctcagaatcctacagtgttatatgtcagtggtggcaacacgcaagtaatagcgtactctcaacagtgctacagaatatttggtgaaactattgacatagctgttgggaactgtctggatagatttgctagaatattaaagctttctaatgatcccagcccagggtacaacattgaacagatggccaagaaaggagagcagtacatcgagctgccttatgtggtgaaaggcatggatgtttctttctctggtctactgtcttttattgaggacgtggctcacaagaagctgaagtctggaaaatgcactccagcggatctctgcttctcattacaggaaacaatctttgcgatgctggttgaaattacagagagagctatggctcattgcggctcatcagaagtacttattgtaggtggtgtcggatgtaatatgaggctacaggagatgatgggtaagatggctgaagagagaggagcctcgttgtgtgctactgatgataggtactgtattgataatggagcgatgatagcccaggctggattagagatgttcaatgctggtatcactactcctctagaagaaacatgggttacccagaggtataggacagatgaagtagaggttgtttggagagattga

SEQ ID NO: 42199 - protein, 335 aa, Strongylocentrotus purpuratus
MPTVIGFEGSANKLGIGIVRDGEVLSNPRHTYITPPGEGFQPRDTARHHQQHIMSILRRALDEAKLTPKDIDCVCYTKGPGMAAPLLSVAVVARTVAQLWDVPIIGVNHCIGHIEMGRQVTGAQNPTVLYVSGGNTQVIAYSQQCYRIFGETIDIAVGNCLDRFARILKLSNDPSPGYNIEQMAKKGEQYIELPYVVKGMDVSFSGLLSFIEDVAHKKLKSGKCTPADLCFSLQETIFAMLVEITERAMAHCGSSEVLIVGGVGCNMRLQEMMGKMAEERGASLCATDDRYCIDNGAMIAQAGLEMFNAGITTPLEETWVTQRYRTDEVEVVWRD

SEQ ID NO: 42200 - DNA, 1008 bp, Tribolium castaneum
  CDS (1)..(1008)
atggttattgcattgggcttggaaggcagtgccaataaactaggcattggggttataaaagacggtgaagtgttatcaaactgtagacgaacttacataaccccaccgggcgaaggctttttacccaaagaaacagccgagcaccaccgaaaaaatgtgataagtgtcctcagagacgcactcaatcaatcgggtgtcaaaccggctgaaatcgatgttatttgctacaccaagggccccggcatgggggcccctttggctagcgttgcagtggttgcccggaccttggcccagctgtgggataaaccgctgctgggcgtcaatcattgcataggccacattgagatggggcgccttattacaaaagccacaaacccgaccgtcctctacgtcagtgggggcaacacgcaagtgatagcgtattccaggcataaataccgaattttcggtgaaactattgatattgctgtgggaaattgtttagaccgctttgcccgtgttttaaaacttccgaatgacccaagcccgggctacaacatcgaacaaatggcaaaaaaggggaaaaagttcattgaattgccatactgtgtgaaagggatggacgttagtttttcgggaattttaacatttatggaagagagagccgacaaatttctcaaacaggggtattcccctgaagatttatgtttctctcttcaagaaactttgtttgcaatgttggtggaaacgactgaacgtgcgttagcacattgtgattctcgggaggttcttattgtggggggcgtgggctgtaatgagagactacaggaaatgatgaagcaaatgtgtgaagagcgaggggcgaagctgtttgcgaccgatgagcgattttgtattgataatggggtgatgatagcacaggctgggtatgaaatgttcaaatcgggcactaggatgaagtgggaggagtgttttattactcagaggtatcgaaccgatgaggtagaagtcacttggcgtgaagattaa

SEQ ID NO: 42201 - protein, 335 aa, Tribolium castaneum
MVIALGLEGSANKLGIGVIKDGEVLSNCRRTYITPPGEGFLPKETAEHHRKNVISVLRDALNQSGVKPAEIDVICYTKGPGMGAPLASVAVVARTLAQLWDKPLLGVNHCIGHIEMGRLITKATNPTVLYVSGGNTQVIAYSRHKYRIFGETIDIAVGNCLDRFARVLKLPNDPSPGYNIEQMAKKGKKFIELPYCVKGMDVSFSGILTFMEERADKFLKQGYSPEDLCFSLQETLFAMLVETTERALAHCDSREVLIVGGVGCNERLQEMMKQMCEERGAKLFATDERFCIDNGVMIAQAGYEMFKSGTRMKWEECFITQRYRTDEVEVTWRED

SEQ ID NO: 42202 - DNA, 1221 bp, Tribolium castaneum
  CDS (1)..(1221)
atgtttgtaaaaactgcaagggacacaatttttaattcgaagttctccactgcaaggagtctcattttgggcattgagacctcttgtgatgacaccggttgtgctgtagttgatactgaaggaaatattctaggagaggctcttcactctcaacatttaatacatttggctaatggcgggataattcctcccatagcccaaaacctacatcgcgaaaatatagaaagtgttgtaaatacggctgtgaaaaactcaaattacagtttcagggatttatcagcagtggctgtaaccgtaaagccaggtttgccgttatcgttaacaatagggatgaaatatggtaaatacttatgccgcctttacaacaagccttttattccgatccatcacatggaagctcacgctttaacagcccgcatgcatgacaagacagtagagttcccatttttggtccttttaataagtggggggcactgtcttttagccgtagcgcaagacgttggccggtttttcttgcttggtagcacccgagacgatgctccaggcgaagcgtttgataaagtcgccagaagaatgaaactaacaaacttatcagaattctctaaactctcaggggggcaagcaattgaattggccgcttcgcgtgcaaaaaacccgctacagtttaaattcacaatcccacttactcaatacagagactgcaagtttagtctagccggcctaaaaacacaagttcggagacacttactagaagaggagaaaaaacataatgtgccccctgatggtttaataccggacgtttttaatttatgtgccggctttcagctggctgtaacccgacatatttgccaaagggtgcaaagggcgatggtttatgccagaaggaaagaaatgattccggaaaatagccaaacattggttgtttcagggggcgccgcctgtaataattttattgcaagggggctacaacttgtttgcgatgaaatggcttataagtttgtgcgccctcccccgaaattgtgtcttgataatggggtcatgattgcatggaatggtgttgagaggtggagagcgaagttaggggttttacatgattatgctagtgtggaaattcagaaatcatgtccgctgggaactagtcttattgatgacgtggtcaaggaaaatattagttgcaggtggacaaagttaacgcaattaaactatgctcaaaatagttaa

SEQ ID NO: 42203 - protein, 406 aa, Tribolium castaneum
MFVKTARDTIFNSKFSTARSLILGIETSCDDTGCAVVDTEGNILGEALHSQHLIHLANGGIIPPIAQNLHRENIESVVNTAVKNSNYSFRDLSAVAVTVKPGLPLSLTIGMKYGKYLCRLYNKPFIPIHHMEAHALTARMHDKTVEFPFLVLLISGGHCLLAVAQDVGRFFLLGSTRDDAPGEAFDKVARRMKLTNLSEFSKLSGGQAIELAASRAKNPLQFKFTIPLTQYRDCKFSLAGLKTQVRRHLLEEEKKHNVPPDGLIPDVFNLCAGFQLAVTRHICQRVQRAMVYARRKEMIPENSQTLVVSGGAACNNFIARGLQLVCDEMAYKFVRPPPKLCLDNGVMIAWNGVERWRAKLGVLHDYASVEIQKSCPLGTSLIDDVVKENISCRWTKLTQLNYAQNS

SEQ ID NO: 42204 - DNA, 1071 bp, Prochlorococcus marinus str. NATL1A
  CDS (1)..(1071): transl_table=11
atgtcaataattttatccctcgaaacaagttgtgacgagtctgcagcggctttggtttctaatgaaaaaggaaaaattgatttgttagctaatgaaatagcttcacaaattgatgaacatgctaattggggtggtgttgttccagaaatcgcttcaagaagacatttagaaaaccttccatttttgattgaagaggtttttgcaaaatcaacattacagataaaagatatagatgcagtagccgcaactgttactccaggattagcaggatcactgttggtcggatcaattacggcaagaactttagctaatttacatcaaataccattcttaggtatccatcacttggagggacatctttcctcaatatatttgtcagaaaaccatcccaaacccccttttttagtcttattggttagtggaggacacactgaattgataaaagtagatgttaaacataagtatcaacgtcttggtagaagtcatgatgatgcagctggagaagcttttgataaggttgcaagacttttgggactttcatatccagggggccctgcaattcaaaaaatagctaaatcgggagacccaaaaaaatttttatttccaaaaggaagagtctctaaacctgaaggtggtttttatccatatgacttttcttttagtggtttaaaaacggctgtatttcgccagatagaaaaaattagatcagaaaataaaaaattaccaatagaagatattgctgcaagttttgaatacatagtggctgaagtcttagtagagaggagctttaaatgtgcccttgaccaaggtttaaattctcttgttttagttggaggagttgctgcaaatgtgagattaagggaaatgatgcttgcaaaagcatctaaaaattcaattgatattactcttgcaccaatggaattttgtactgataatgcggcaatgattggggcggcagctttgttaagattatcgtctgaaggctttaaaagttcaatggaattaggtgtatctgctcgttggccactagaaaaatctgattcactttatgatccgattcctcctttttaa

SEQ ID NO: 42205 - protein, 356 aa, Prochlorococcus marinus str. NATL1A
MSIILSLETSCDESAAALVSNEKGKIDLLANEIASQIDEHANWGGVVPEIASRRHLENLPFLIEEVFAKSTLQIKDIDAVAATVTPGLAGSLLVGSITARTLANLHQIPFLGIHHLEGHLSSIYLSENHPKPPFLVLLVSGGHTELIKVDVKHKYQRLGRSHDDAAGEAFDKVARLLGLSYPGGPAIQKIAKSGDPKKFLFPKGRVSKPEGGFYPYDFSFSGLKTAVFRQIEKIRSENKKLPIEDIAASFEYIVAEVLVERSFKCALDQGLNSLVLVGGVAANVRLREMMLAKASKNSIDITLAPMEFCTDNAAMIGAAALLRLSSEGFKSSMELGVSARWPLEKSDSLYDPIPPF

SEQ ID NO: 42206 - DNA, 1029 bp, Herminiimonas arsenicoxydans
  CDS (1)..(1029): transl_table=11
atgcttgttctcggtattgaatcctcctgtgatgaaacaggtctcgcgctgtatgacacacagcgtggcttgctggcgcacgcgctttattcgcaggtaaaaatgcatgaggaatacggcggtgtggtaccggagctggcctcgcgcgaccacatccgccgtgccatccccttgctggaacaggttttctccgaaagcggcgtggcgcacggtgccatcgacgccatcgcgtatacacaaggccccggtttggctggcgcattgctggtcggcgcctcggttgcgtgcggccttggtctggcattggataagccagtactcggcatccatcatctggaaggccatttgctgtcgcccctgctggccagcgagccaccggaatttcccttcatcgccttgctggtttccggcggccatacccaattgatgcgcgtcgatggtatcgggcaatatacgatgctgggggaaacactggacgatgcagcaggagaggcattcgacaagtctgccaagctgctgggtctcggttatccgggcgggcctgctatttcacgcatggccgagttcggcgatccgaccgcctacaaattgccccgccccatgctgcattcaaaaaatctggatttcagtttttccggattgaaaactgccgtactgacagtcgtcaaaaatcagactacgaatatctgcgaacaagacaaggcaaacatcgcacgcgccttcgtcgatgccatcgttgaagtgctgaccgcgaaatgcgtcaccgcactcaagcataccggcttgaaacgcctggtgattgccggcggtgtcggcgccaaccagcaactgcgcgagtcgctgaatgcggctgcagcgaaaaagcacttcaaggtgttttatccggaactggaattttgcaccgacaacggcgcgatgattgcattcgccggcgcaatgcgcttgcagatcaatcctgatgctgcgaaaaaagactacgccttcaatgtcaagccgcgctggccgctagatagtattcgtgaaatttaa

SEQ ID NO: 42207 - protein, 342 aa, Herminiimonas arsenicoxydans
MLVLGIESSCDETGLALYDTQRGLLAHALYSQVKMHEEYGGVVPELASRDHIRRAIPLLEQVFSESGVAHGAIDAIAYTQGPGLAGALLVGASVACGLGLALDKPVLGIHHLEGHLLSPLLASEPPEFPFIALLVSGGHTQLMRVDGIGQYTMLGETLDDAAGEAFDKSAKLLGLGYPGGPAISRMAEFGDPTAYKLPRPMLHSKNLDFSFSGLKTAVLTVVKNQTTNICEQDKANIARAFVDAIVEVLTAKCVTALKHTGLKRLVIAGGVGANQQLRESLNAAAAKKHFKVFYPELEFCTDNGAMIAFAGAMRLQINPDAAKKDYAFNVKPRWPLDSIREI

SEQ ID NO: 42208 - DNA, 1068 bp, Bradyrhizobium sp. ORS278
  CDS (1)..(1068): transl_table=11
gtgctcggcatcgagaccacctgcgacgagaccgccgcggcggtggtctccagggattcggacggcaaggggcatatcctctcgaatgtggtgcgctcgcagaccgacgagcacgcgatctatggcggcgtggttcccgagatcgcggcgcgtgcccatgtcgagatgctcgatcatctcatcgacgccgcgatgcgcgaagccggcatcgattatgccgcgctgtcgggcgtcgccgcggccgccgggcccggcctgatcggcggcgtcatcgtcggtctgaccaccgccaaggcgatcgcgttggtgcacgacacgccgctgatcgccgtcaaccatctcgaggcgcatgcgctgacgccgcgcctcaccgatgcaatcgactttccctactgcctgttcctggcctccggcggccacacccagatcgtcgcggtggccggcgtcggcgattacgtcaggctcggcaccacggtcgacgacgcgatgggcgaggcgttcgacaaggtcgcgaagatgctcggcctgccctatccgggcggcccgcaagtggagcaggccgcgcgcaacggcgacgccacgcggttcgcgtttccgcgtccgatgcagggccgaagcgacgcgaatttctcgctgtccggattgaagactgccgtgcgcaacgagatcggccgcctggagagcgtcagcgagcaggatgtcgccgatctctgcgccagcttccaggccgcggtgctggagtccaccgccgaccgcctgcgcgtcgggctcgacctgttcgagcagcgcttcggcgcgccgaccgcgctggtcgcggccggcggcgtcgccgccaaccaggcgatccgcggagcgctcgacgatgtcgcgcaagccgccggcacccgcctgatcgtgccgccgcccgcgctgtgcaccgacaacggcgcgatgatcgcctgggccggcgccgagcgccttgcgctcggcctggtcgacggcatggacgcaccgccccgcgcccgctggctgctggacgccaatgcgcaagtgcccggcaagttcgcgaacacgcgcgcggggttttga

SEQ ID NO: 42209 - protein, 355 aa, Bradyrhizobium sp. ORS278
MLGIETTCDETAAAVVSRDSDGKGHILSNVVRSQTDEHAIYGGVVPEIAARAHVEMLDHLIDAAMREAGIDYAALSGVAAAAGPGLIGGVIVGLTTAKAIALVHDTPLIAVNHLEAHALTPRLTDAIDFPYCLFLASGGHTQIVAVAGVGDYVRLGTTVDDAMGEAFDKVAKMLGLPYPGGPQVEQAARNGDATRFAFPRPMQGRSDANFSLSGLKTAVRNEIGRLESVSEQDVADLCASFQAAVLESTADRLRVGLDLFEQRFGAPTALVAAGGVAANQAIRGALDDVAQAAGTRLIVPPPALCTDNGAMIAWAGAERLALGLVDGMDAPPRARWLLDANAQVPGKFANTRAGF

SEQ ID NO: 42210 - DNA, 1029 bp, Dichelobacter nodosus VCS1703A
  CDS (1)..(1029): transl_table=11
atgagcgtagatatcaacattttagcaatcgaatcctcatgcgatgaaagcggcgtagcgatttataatcccgcgcgcggcgtactcgccaatcaagtatttagtcagattgatttacaccgcgtctttggcggcgtcgttccagaattagctgcccgcgatcatttaaaacgttttcccgtattaatgaaccaagcgttaacgcaagcaaaactaaatctatccgccatcgacgtcatcgcctacacatctggcccgggtttgctcggcgctttaatgacgggcgccacttttgcgcacagcctcgcctttgccattcggcgtcccgtgctcaaaattcaccacatggaaggacatctactttctccatttctggcgccattaaaacctgaattcccttttattgccttactcgtctcaggcgggcatacgcaattgttatcagtaaaagccgttggagattatgaaattttgggacaaactttagacgatgccgttggtgaagcctttgataaaatggcaaaaataatgggacttccttatcctggcggtcccgaattagcagcgcttgcaaaaaatggtgatgaacaacgttttgtgatgccgcgccccatgattaaccgtcccgatttagattttagcttttcgggactcaaaacccacgtccgcttattaattgccgaacaaaataacgatcctcaaacgcgcgccgatattgcagccagttttcaaaaaaccgtggtagaaacattgctcatcaaatgccgtcgtgcgtggaaaaaaacgggttaccgtgatttagtcgtctccggcggcgtatccgccaatcaagcgttgcgcgccgcgttacaaaaaaacgccgatgaacacaaaaaacgcgtcttttttccgccattaacgctttgtggtgataacgctttgatgatcgcgcatgccgcatcatttcgtttacaagaggcgcggatagatgatgacgtgattgatgtgaccgcgcgctgggaactgtcgcgtttatcaacgccgttataa

SEQ ID NO: 42211 - protein, 342 aa, Dichelobacter nodosus VCS1703A
MSVDINILAIESSCDESGVAIYNPARGVLANQVFSQIDLHRVFGGVVPELAARDHLKRFPVLMNQALTQAKLNLSAIDVIAYTSGPGLLGALMTGATFAHSLAFAIRRPVLKIHHMEGHLLSPFLAPLKPEFPFIALLVSGGHTQLLSVKAVGDYEILGQTLDDAVGEAFDKMAKIMGLPYPGGPELAALAKNGDEQRFVMPRPMINRPDLDFSFSGLKTHVRLLIAEQNNDPQTRADIAASFQKTVVETLLIKCRRAWKKTGYRDLVVSGGVSANQALRAALQKNADEHKKRVFFPPLTLCGDNALMIAHAASFRLQEARIDDDVIDVTARWELSRLSTPL

SEQ ID NO: 42212 - DNA, 1032 bp, Candidatus Protochlamydia amoebophila UWE25
  CDS (1)..(1032): transl_table=11
atgttagttttgggaatagaaagtacttgtgatgaaacagcgtgtgccatcgttcgtgatggaaaagatattttgtcaaacattgtcgcttcacaaattgatttacacaaagaatacggaggcgttgttcctgaactggcttgtcgaaggcatattgatttaattattccagtcattgatcaagctcttaatcaagcaaaattaacacttgaacaaattgatttaattgcggttgcaaatggcccagggttaattggagctttactgattggtttaaatactgctaaagcactcgctttagcccttcgaaaaccttttattggcattaatcacgtggaagctcatttatatgcagcaattatgtcacaccctcaagattttcaatttccttgtttaggcgtcgttctgtctggcggtcatactgctcttgttttaattaaacaaattggtcaatacgaacttatcgggcaaactgtggatgatgcagtcggagaagcttttgataaagtcgctaagatgcttaatcttccctatcctggtggaccagaaatagaaaatttagcaaggcacggccgttctgttaaatttaattttaaagctggacaagtgaaaggtcgccctttggatttttctttcagcggactaaaaacagcagtcctttatgctattaaagatcctaaagcgcttaaagagatggttcttttatcctccgaaatgactcaagatatcgcagcaagtttccaagaagccgcttgcagtgatattgtgaaaaaatctctattggctgcaaaacaatatggtgtcaatactctcttatttggggggggtgtaacgaataattgttacttaagaaaattattttctgtggccaattcaaacttaaactatatatggccttctgccggtttaagtttggataatgctgccatgatcgcaggtcttggatactaccgttatcaattacaaaacaaaagtgattccatggatttagaaccattaacacgaacccctttacaatccgtaaaagaatag

SEQ ID NO: 42213 - protein, 343 aa, Candidatus Protochlamydia amoebophila UWE25
MLVLGIESTCDETACAIVRDGKDILSNIVASQIDLHKEYGGVVPELACRRHIDLIIPVIDQALNQAKLTLEQIDLIAVANGPGLIGALLIGLNTAKALALALRKPFIGINHVEAHLYAAIMSHPQDFQFPCLGVVLSGGHTALVLIKQIGQYELIGQTVDDAVGEAFDKVAKMLNLPYPGGPEIENLARHGRSVKFNFKAGQVKGRPLDFSFSGLKTAVLYAIKDPKALKEMVLLSSEMTQDIAASFQEAACSDIVKKSLLAAKQYGVNTLLFGGGVTNNCYLRKLFSVANSNLNYIWPSAGLSLDNAAMIAGLGYYRYQLQNKSDSMDLEPLTRTPLQSVKE

SEQ ID NO: 42214 - DNA, 1590 bp, Picrophilus torridus DSM 9790
  CDS (1)..(1590): transl_table=11
atgatcgttcttggtcttgaaggcaccgcacatacaataagtgccggcatcgttgatgagaaatcaatattatcaaatgtatcatcgacatatgttccggagcacggcggcatacatccaagggaggctgcagtgcatcatgctgataaaatatacgatgttataaaaagatcgtttgataacgccggtttaaaaccggaggatctcgatctaatagcgttttcaatgggtcctggccttgggccatgccttcgggttgtctcaaccgccgccagggcactttcaattaaatattcaaagccattgcttggtgtgaaccatccccttggccacgttgagataggaagaaagctctctggtgcaagggatccaataatgctatatatatcaggtggaaacacgcaggtaatagcacatttaaacggcagataccgagtccttggggaaaccatggacataggccttggaaacatgcttgataaatttgccagggaccttggaataccatttccgggtggccctgtaatagaaagaatggcccttgatggcaaggatcttcttgaactgccatattcagtaaagggcatggatacatcattttcagggatttacaccgcggcgaaaaggtatctgtcccttggtaaaaataaaaatgatatatgctacagcctccaggaaacatcattttccatggttgttgaggtgcttgagcgtgcgatgtactacacaaataaaaacgagatcctgctggctggtggtgtggccagaaacgatagattaagatcaatggttaatgatatggcaagggactcaggttataaggcatatctaacggataaagagtactgcatggacaacggtgcaatgatagcccaggccggtatgcttatgtacatgcacggtgccaggcaggacataatggaaacaaggataaatcaaaggtttagaatagacgaggttcctgctccatggataaaggatgaaaacagcatatcatttaaggataagggtgccgaatcaataataacaaatggtgaattctatggcaggagtgttgttttcaagaagaggcctgaaaaatcataccgtgataaaaggctcgatcttaagataaggcttgaaagaatgaaaaatgaattctatataatgtattatctccataaaacaggtaatgctcccattgtatacgatttcgatagatttgacatggttttaacaattgaaagaataaatggcttaacaatgaacgattactttaaaagcaaatatgatgaaaacgttataagaatgatagcagatgccgttgcaaaaatgcatggtttaaggatatcgcatggcgatttaacaccgaacaatattattatatctgataaaatatattttatagatacaagcatgggtcatttaagatgcagcgatgaggacattgccgatgatctatttttattatacgagtcaatgaagagcctttacgtaaatggccatgaaatgataaagcattttgaaaatgagtattcaaaaaacgttgaggattataattattataaagaattgataaaaaagatagagtcaagaagaagatacgtttaa

SEQ ID NO: 42215 - protein, 529 aa, Picrophilus torridus DSM 9790
MIVLGLEGTAHTISAGIVDEKSILSNVSSTYVPEHGGIHPREAAVHHADKIYDVIKRSFDNAGLKPEDLDLIAFSMGPGLGPCLRVVSTAARALSIKYSKPLLGVNHPLGHVEIGRKLSGARDPIMLYISGGNTQVIAHLNGRYRVLGETMDIGLGNMLDKFARDLGIPFPGGPVIERMALDGKDLLELPYSVKGMDTSFSGIYTAAKRYLSLGKNKNDICYSLQETSFSMVVEVLERAMYYTNKNEILLAGGVARNDRLRSMVNDMARDSGYKAYLTDKEYCMDNGAMIAQAGMLMYMHGARQDIMETRINQRFRIDEVPAPWIKDENSISFKDKGAESIITNGEFYGRSVVFKKRPEKSYRDKRLDLKIRLERMKNEFYIMYYLHKTGNAPIVYDFDRFDMVLTIERINGLTMNDYFKSKYDENVIRMIADAVAKMHGLRISHGDLTPNNIIISDKIYFIDTSMGHLRCSDEDIADDLFLLYESMKSLYVNGHEMIKHFENEYSKNVEDYNYYKELIKKIESRRRYV

SEQ ID NO: 42216 - DNA, 1032 bp, Bacillus anthracis str. Sterne
  CDS (1)..(1032): transl_table=11
gtgggtgaatatataatggaaaaaaatacgattatacttggtattgaaacaagttgtgatgaaacagcagtagcggttgttaaaaatggaacggaaattattgcgaatgtcgttgcatcacaaattgaaagtcataaacgttttggcggagttgtaccagagattgcatctcgtcatcatgtagaagaaattacagttgtgttagaagaagctttaaaagaagcgaatatcacatttgatgatattgatgcaattgctgtaacagaaggacctggtttagtaggagcacttctaataggggtaaatgcagcgaaagcagtggcatttgcacatgatatccctctagttggcgttcatcatatcgctggccacatttatgcgaaccgtttagtaaaagaagttcaattcccattactatcacttgttgtgtctggtggacatacagagcttgtttatatgaaagaacatggttcatttgaagtaattggtgaaacgcgagatgatgcagcaggagaagcatatgataaagtagctcgtacgttatctatgccatatccaggggggcctcatattgatcgccttgcacatgaagggaaaccaacaatcgatttacctcgtgcatggcttgaacctgattcgtatgatttcagttttagcggattaaaatcagcagttatcaacactgtgcataacgcaaaacaacgcggtatagagattgcaccggaagatttagcggcaagtttccaagagagtgtcattgacgtactagtaacgaaagcatctcgtgcagcggatgcttataacgtaaagcaagtgcttcttgctggtggagtggctgctaataaagggcttcgtgcacgcttagaaacagaatttgcacaaaaagaaaatgtagagctaattattcctcctctatctttatgcacagataatgcagcaatgattgcagcggcaggtacaattgcatatgaacaaggaaaacgtgctacattagctttaaatgcaaatccaggattagatatcgaagcatag

SEQ ID NO: 42217 - protein, 343 aa, Bacillus anthracis str. Sterne
MGEYIMEKNTIILGIETSCDETAVAVVKNGTEIIANVVASQIESHKRFGGVVPEIASRHHVEEITVVLEEALKEANITFDDIDAIAVTEGPGLVGALLIGVNAAKAVAFAHDIPLVGVHHIAGHIYANRLVKEVQFPLLSLVVSGGHTELVYMKEHGSFEVIGETRDDAAGEAYDKVARTLSMPYPGGPHIDRLAHEGKPTIDLPRAWLEPDSYDFSFSGLKSAVINTVHNAKQRGIEIAPEDLAASFQESVIDVLVTKASRAADAYNVKQVLLAGGVAANKGLRARLETEFAQKENVELIIPPLSLCTDNAAMIAAAGTIAYEQGKRATLALNANPGLDIEA

SEQ ID NO: 42218 - DNA, 1095 bp, Bartonella quintana str. Toulouse
  CDS (1)..(1095): transl_table=11
atgcgcctattgggaatagaaacaagttgtgatgaaactgctgctgctgttattgaacacaatattgaaggaaacagccaaattctttccaatattgtttggagccaaacggataatcatgcaccttacggcggtgtggttcctgaaattgctgctcgtgcccatgttgaaattctcgatgatttaattctgaaagctcttaccgacgctcatacaaaattgaaagacattgatgccattgcggtcacaagtggtcctggtttgataggaggacttttagtaggcgttatgagtgcaaaagcgctgtctcttgccactggaaaaccttttattgctgtaaatcatctggaaggacatgctttaacagccgtgctaacgcataatgttgcttttccctatttattgcttttggtttcaggtggccatacacaaacaatccttgtgcatgaagtgggcaattaccaacgtttaggaaccaccattgatgatgcattgggagaagcttttgataaaacagcaaaactcttaggccttccttaccctggcggcccagcacttgaaaaggcagctttgttgggtgataaaaatcgtatttctcttccacgacctttgaaaggtgaaaaacgattagatttttctttttccggtctcaaaactgctgtccgacaagccgcgacagctatgtcccctcttacagaaaacgatgttgctgacattgcagcaagttttcaagcagccgttaccgatacagtgtatgatcgcgttcatttggctttgcagtactttacccatcagtatccactctctcattacaaagggcgccgtcctcctgctttagttgtcgcaggcggagtagcagcaaaccaagccattcgattgacactacaagaacttgcacaccaacatggctttgaatttatagcgccccctctttccttgtgtaccgacaacgctgcaatgattgcctttgctggtgcacaaaagttcgcccggggagaaaaaaactcctttgatattgcccctcgctcacggtggccattggatgaaaaagctgctcctttaatcgggacaggacgccgtggaacaaaagcataa

SEQ ID NO: 42219 - protein, 364 aa, Bartonella quintana str. Toulouse
MRLLGIETSCDETAAAVIEHNIEGNSQILSNIVWSQTDNHAPYGGVVPEIAARAHVEILDDLILKALTDAHTKLKDIDAIAVTSGPGLIGGLLVGVMSAKALSLATGKPFIAVNHLEGHALTAVLTHNVAFPYLLLLVSGGHTQTILVHEVGNYQRLGTTIDDALGEAFDKTAKLLGLPYPGGPALEKAALLGDKNRISLPRPLKGEKRLDFSFSGLKTAVRQAATAMSPLTENDVADIAASFQAAVTDTVYDRVHLALQYFTHQYPLSHYKGRRPPALVVAGGVAANQAIRLTLQELAHQHGFEFIAPPLSLCTDNAAMIAFAGAQKFARGEKNSFDIAPRSRWPLDEKAAPLIGTGRRGTKA

SEQ ID NO: 42220 - DNA, 1032 bp, Bacillus thuringiensis serovar konkukian str. 97-27
  CDS (1)..(1032): transl_table=11
gtgggtgaatatataatggaaaaaaatacgattatacttggtattgaaacaagttgtgatgaaacagcagtagcggttgttaaaaatggaacggaaattattgcgaatgtcgttgcatcacaaattgaaagtcataaacgttttggcggagttgtaccagagattgcatctcgtcatcatgtagaagaaattacagttgtgttagaagaagctttaaaagaagcgaatatcacatttgatgatattgatgcaattgctgtaacagaaggacctggtttagtaggagcacttctaataggggtaaatgcagcgaaagcagtggcatttgcacatgatatccctctagttggtgttcatcatatcgctggccacatttatgcgaaccgtttagtaaaagaagttcaattcccattactatcacttgttgtatctggtggacatacagagcttgtttatatgaaagaacatggttcgtttgaagtaattggtgaaacacgagatgatgcagcaggagaagcatatgataaagtagctcgtacgttatctatgccatatccagggggtcctcatattgatcgccttgcacatgaagggaaaccaacaatcgatttacctcgtgcatggcttgaacctgattcgtatgatttcagttttagtggattaaaatcagcagttatcaacactgtgcataacgcaaaacaacgcggtatagaaattgcaccggaagatttagcggcaagtttccaagagagtgtcattgacgtactagtaacgaaagcatctcgtgcagcggatgcttataacgtaaagcaagtgcttcttgctggtggagtggctgctaataaagggcttcgtgcacgcttagaagcagaatttgcacaaaaagaaaatgtagagctaattattcctcctctatctttatgcacagataatgcagcaatgattgcggcggcaggtacaattgcatatgaacaaggaaaacgtgctacattagctttaaatgcaaatccaggattagatatcgaatcatag

SEQ ID NO: 42221 - protein, 343 aa, Bacillus thuringiensis serovar konkukian str. 97-27
MGEYIMEKNTIILGIETSCDETAVAVVKNGTEIIANVVASQIESHKRFGGVVPEIASRHHVEEITVVLEEALKEANITFDDIDAIAVTEGPGLVGALLIGVNAAKAVAFAHDIPLVGVHHIAGHIYANRLVKEVQFPLLSLVVSGGHTELVYMKEHGSFEVIGETRDDAAGEAYDKVARTLSMPYPGGPHIDRLAHEGKPTIDLPRAWLEPDSYDFSFSGLKSAVINTVHNAKQRGIEIAPEDLAASFQESVIDVLVTKASRAADAYNVKQVLLAGGVAANKGLRARLEAEFAQKENVELIIPPLSLCTDNAAMIAAAGTIAYEQGKRATLALNANPGLDIES

SEQ ID NO: 42222 - DNA, 1026 bp, Staphylococcus aureus subsp. aureus MRSA252
  CDS (1)..(1026): transl_table=11
atgactaaagatatattaatactagctgttgaaacaagttgtgatgaaacaagcgttagtgttataaaaaatggcagagatattttatcaaatacagttttaagtcagattgaaagtcataaacgatttggcggtgtcgttcctgaagtggcaagtagacatcacgttgaaggtataacaacaacaataaacgaggctctagtggatgccgacgtatcaatggaagatattgatgccatagcggttacagaaggccctggactaattggtgcgttactaataggtgttaatgcagccaaagcattggcatttgcttacgataagccgcttattcctgttcatcatattgcaggacatatatatgctaatcacatagaagagccattaacattcccgctaattgcacttattgtttcaggtggacatactgaattagtttatatgaaagatcatttaacatttgaagtcattggtgaaacacgagatgacgcagtaggtgaggcttatgataaagtggcacgaacaattggtttaaattatccaggtggtccacaagttgaccggttggctgctgaaggtgaagatacttattcattccctcgtgtttggttggataaagatagttatgattttagttttagtgggttgaaaagtgccgtaatcaatcaacttcacaatcaacgacaaaaaaatattccaatcattgaagctaacgtagcaacgagctttcaaaacagtgttgtagaggttctcacgtttaaagctattcaagcttgtaaagaatatggtgttcagcgattaattgttgctggtggcgtggcgagtaataaaggattacgtcaatctttagcggatcaatgcaaagtcaatgacattcaattaactatcccaagtcctaaattatgcacagataatgctgcaatgataggcgttgccggccactatttgtatcagcaaggtcgatttgctgatttagcattaaatgggcacagcaatatagatttagaagagtattctgcagaataa

SEQ ID NO: 42223 - protein, 341 aa, Staphylococcus aureus subsp. aureus MRSA252
MTKDILILAVETSCDETSVSVIKNGRDILSNTVLSQIESHKRFGGVVPEVASRHHVEGITTTINEALVDADVSMEDIDAIAVTEGPGLIGALLIGVNAAKALAFAYDKPLIPVHHIAGHIYANHIEEPLTFPLIALIVSGGHTELVYMKDHLTFEVIGETRDDAVGEAYDKVARTIGLNYPGGPQVDRLAAEGEDTYSFPRVWLDKDSYDFSFSGLKSAVINQLHNQRQKNIPIIEANVATSFQNSVVEVLTFKAIQACKEYGVQRLIVAGGVASNKGLRQSLADQCKVNDIQLTIPSPKLCTDNAAMIGVAGHYLYQQGRFADLALNGHSNIDLEEYSAE

SEQ ID NO: 42224 - DNA, 1023 bp, Acinetobacter sp. ADP1
  CDS (1)..(1023): transl_table=11
atgattgttttgggtcttgaaacatcgtgtgatgaaacaggtctggcgctttatgacagtgaaaagggcttgctcggacaagtactctacagtcagattaaactgcatgctgaatatggtggtgtagttcccgagcttgcgtctcgtgatcatgtcagaaaaatgattccacttcttgatcagcttttaaacgacagccaagtaaaaaaatctcagattgatgcagtggcgtacacgcgcgggcctggtctgatgggcgccctcatgacaggtgctttatttggccgaactctggcatttgcactcaataaacctgccattggtgttcatcatatggaaggtcacatgcttgcaccgctactttctgcaacgccaccagaatttccatttgttgccttattggtatcgggtggtcacactcaactcatggctgcttatggtatcggtcaatatgagttgcttggtgagtctattgatgatgctgcgggtgaggcattcgataaagtcgctaaaatgatgggattaccttatccgggtggaccaaatattgcaaaattagctttgcaggggaacccagaaacatttgaatttcctcgccccatgcttcatcaaggcttagacttttcttttagcggcctaaaaacgtcagtttctgttcagctcaaaaaattgggtgaagaaaatcgtgatgctgatattgcggcttctttccaagaggcgattgtcgatacattggtgaagaaatctgtgaaggctttaaagcagacaggtttaaaacgtctagtgattgcgggtggtgtgagtgccaatcagcgattacgtgagcgccttgagcattcattatcaaaaatcaagtcacaagtttattatgctgaacctgcattatgtacagataatggtgcaatgattgcatttgcaggctatcaacgtttaaaggctgggcaatgtgatgatttggtggtcactaccacaccgcgctggccaatgactgaattgagtcgtccagcagagataatcgaataa

SEQ ID NO: 42225 - protein, 340 aa, Acinetobacter sp. ADP1
MIVLGLETSCDETGLALYDSEKGLLGQVLYSQIKLHAEYGGVVPELASRDHVRKMIPLLDQLLNDSQVKKSQIDAVAYTRGPGLMGALMTGALFGRTLAFALNKPAIGVHHMEGHMLAPLLSATPPEFPFVALLVSGGHTQLMAAYGIGQYELLGESIDDAAGEAFDKVAKMMGLPYPGGPNIAKLALQGNPETFEFPRPMLHQGLDFSFSGLKTSVSVQLKKLGEENRDADIAASFQEAIVDTLVKKSVKALKQTGLKRLVIAGGVSANQRLRERLEHSLSKIKSQVYYAEPALCTDNGAMIAFAGYQRLKAGQCDDLVVTTTPRWPMTELSRPAEIIE

SEQ ID NO: 42226 - DNA, 1014 bp, Erwinia carotovora subsp. atroseptica SCRI1043
  CDS (1)..(1014): transl_table=11
atgcgcgtattgggtatcgaaacatcctgtgatgaaaccggagtggctatttatgacacggaggcgggtttactcgccaatcagctatacagtcaggtcaaattacatgctgattacggtggcgtcgtgcctgagctcgcctcacgcgatcacgtgcgcaaaacggttcctttgattcaggcagcgctgcgtgaagctgggttacaggctgacgatatcgatggtgtggcttacaccgccggccctggtttggttggcgcgttattggtgggggcgacagtcggcaggtcgttggcgttcgcttgggaggtgccagcggtccctgtgcaccatatggaagggcatttgctggcgccgatgctggaagataatcctccagcgtttcccttcgtagcgctgctggtttctggtggtcatacgcagctcatcagcgtgacaggcattggcgaataccgcttgctgggtgagtcggttgacgatgcggcgggtgaagcgtttgataaaacggcgaagttgctgggattggattatcccggtggtccaatgctgtcgaaaatggcgcaggcaggtgattcccaacgctttacctttccgcgtccgatgaccgatcgtccggggttagatttcagcttttccgggctaaaaacgtttgctgcgaatacgatccgtagcaacggtgatgacgatcaaacgcgtgccgatattgcgcgtgcctttgaggatgccgtcgtggatacgctggccatcaagtgtcgtcgtgcgttggatgatacgggctttaaacgactggtcatggccggtggtgtaagcgccaatcgaacattgcgccagcgcttaggtgaggtgatggcaaaacgcggtggtgaagtgttttacgcgcgtcccgaattctgcacggataatggcgcgatgattgcctatgcgggcagcgtacgtctacttcatggtgcgagccagacgctgggcgtatctgttcgtccacgttggccgttggctgatttgcctgcggtgtag

SEQ ID NO: 42227 - protein, 337 aa, Erwinia carotovora subsp. atroseptica SCRI1043
MRVLGIETSCDETGVAIYDTEAGLLANQLYSQVKLHADYGGVVPELASRDHVRKTVPLIQAALREAGLQADDIDGVAYTAGPGLVGALLVGATVGRSLAFAWEVPAVPVHHMEGHLLAPMLEDNPPAFPFVALLVSGGHTQLISVTGIGEYRLLGESVDDAAGEAFDKTAKLLGLDYPGGPMLSKMAQAGDSQRFTFPRPMTDRPGLDFSFSGLKTFAANTIRSNGDDDQTRADIARAFEDAVVDTLAIKCRRALDDTGFKRLVMAGGVSANRTLRQRLGEVMAKRGGEVFYARPEFCTDNGAMIAYAGSVRLLHGASQTLGVSVRPRWPLADLPAV

SEQ ID NO: 42228 - DNA, 954 bp, Mesoplasma florum L1
  CDS (1)..(954): transl_table=4
atgaaaatattagcaattgaatcaagttgtgatgaattttcaatttcaataattgatgatggaaaaatattaacaaatattatttcatcacaaatagatcaacacgttaattttggtggtgttgttcctgaactagctgcaagactacatttagaaaatatatcttgagtaatcaaatctgcacttgaatcttcaaatacaaaaattgaagaaattgatcatgttgcatatactgaaaaacctggtttaataggttctttaatcataggtaaattagttgctgaaactatcgctagttatattgataaaccattaatgccattacatcatattgaaggtcacatttatggagcatcaattgagaatgagtttgtttatccggtactagctatggttgttagtggaggacatacgcaaattgaaatcgttaactcacctaatgaatttgaggtaattggtgcaactcttgatgatgctattggtgaatgttatgacaaggtagctagagtaatgggattaggttatccgggtggaccaaaaattgacaaattggctcaaaaaggaaataaagaagcttttatatttcctatatctaaaaatgatgatagttatgacttttcatattcaggattaaaaacagcagtcattaatattattcataatttaactcaaaaaggtgaggaaataccggttgcagatattgctgctagttttcaatatgcagcaacaaaaatagttgaaaaaaaactagaaaaagcaattattcaatttaaaccaaaaacattaacagttgctggtggtgttagtgctaatagtgaaattagaaacataataatgtcattgggtaaaaaatataatataacaaacacatttgttccaaagatggaatattgcacagataatgcagcaatgatagcgaaattagcgtacgaaaagttgaaaagtagtaattaa

SEQ ID NO: 42229 - protein, 317 aa, Mesoplasma florum L1
MKILAIESSCDEFSISIIDDGKILTNIISSQIDQHVNFGGVVPELAARLHLENISWVIKSALESSNTKIEEIDHVAYTEKPGLIGSLIIGKLVAETIASYIDKPLMPLHHIEGHIYGASIENEFVYPVLAMVVSGGHTQIEIVNSPNEFEVIGATLDDAIGECYDKVARVMGLGYPGGPKIDKLAQKGNKEAFIFPISKNDDSYDFSYSGLKTAVINIIHNLTQKGEEIPVADIAASFQYAATKIVEKKLEKAIIQFKPKTLTVAGGVSANSEIRNIIMSLGKKYNITNTFVPKMEYCTDNAAMIAKLAYEKLKSSN

SEQ ID NO: 42230 - DNA, 1035 bp, Desulfotalea psychrophila LSv54
  CDS (1)..(1035): transl_table=11
atgtattccaggaagataaatatgataatattaggcatagaaagttcctgtgatgacacctctgcagccgttgtaatagacggaacggcaatacagtcaaacgtcatcagtggtcaggaagaaattcataattgttttggaggtgttgtccctgaacttgcctccagaagtcatctcagcgccatccaacccgttgttgaaaaggccctgtctgacgctaagatcagccttgatgatattgatctcattgctaccacccaggggccgggattgagtggctcgctgttggtgggctattcctacgctaaatccctctctctggtgaaaaagattccctttgtcggagtagatcatatggcaggtcatgctcttgccatcctcttggaggaagagaccccagattttccctttatcgccctcaccgcctccggtggcacctcgtcaatttttttggtgaagagtagtacggattttgagcttctggggcgcacccgcgatgatgcagcaggcgaggcctttgacaaggttgccaaggtcctgggccttccctatccgggaggtccccatatcgcagcccatgcagagacgggcgatgaaaaaagtatcaaattccccagagcatggctggataaggatggttttgacttcagctttagtggcttgaagacagctgttcttaattatcacaataaaattgtgcaaaaaaatggtagtattacaaaagaagaaagggctgatatctgtgcctctttccaacaggctgttatagatgttttagtgactaaaactattaatgcagcaaggacacatggtatttcaacagtcgtcctcggtggaggggtctcctccaacagggccctgcgcctggccttttcccatgagtgcgataaatgtaagcttcaattttttgttccggcagcaaagctctgtacagacaatgcagcaatgattgccgttgccggctatcataaatacctgcgttttggacctggtaatctaagcgatgacgtttattcacgttcacaactgggatag

SEQ ID NO: 42231 - protein, 344 aa, Desulfotalea psychrophila LSv54
MYSRKINMIILGIESSCDDTSAAVVIDGTAIQSNVISGQEEIHNCFGGVVPELASRSHLSAIQPVVEKALSDAKISLDDIDLIATTQGPGLSGSLLVGYSYAKSLSLVKKIPFVGVDHMAGHALAILLEEETPDFPFIALTASGGTSSIFLVKSSTDFELLGRTRDDAAGEAFDKVAKVLGLPYPGGPHIAAHAETGDEKSIKFPRAWLDKDGFDFSFSGLKTAVLNYHNKIVQKNGSITKEERADICASFQQAVIDVLVTKTINAARTHGISTVVLGGGVSSNRALRLAFSHECDKCKLQFFVPAAKLCTDNAAMIAVAGYHKYLRFGPGNLSDDVYSRSQLG

SEQ ID NO: 42232 - DNA, 1035 bp, Mannheimia succiniciproducens MBEL55E
  CDS (1)..(1035): transl_table=11
atgcgaatcttaggaatcgaaacatcttgcgacgagacgggcgtcgctatttacgatgaagacaaagggctgattgccaaccagctttatacgcaaattgcgctgcacgccgattacggcggcgttgtgcccgaacttgcttcgcgcgatcatatccgaaaaaccgctccgttaattgaagctgcattgcaggaagcgaatttaaccgcaaaagacattgacgggattgcctatacctgcggtccgggattagtaggtgcgttattggtcggttccaccatcgcccgttcgcttgcctatgcctggaacgtgcctgctgtcggcgttcatcatatggagggacatttattggcgccgatgttggaagatgccgacaacagaccgcaatttccctttattgcgctgcttgtttccggcggtcatacccaattagtcaaagttgagggtgtcggcaaatatgaagtaatgggcgaaagcattgatgatgccgccggcgaagcctttgataaaacggcaaaattattgggcttggattatcccggcggtgcggcgctttcccgtttggcggaaaaaggcagtgccggacgttttgtttttccgaaaccgatgacggatcgccccggattggatttcagcttttcgggtttgaaaacctttgccgccaataccattaatcaggcaattaaaaacgaaggcgaactcagcgagcagacgaaagcggatatcgcccatgccttccaaaccgccgtggtggaaactctcgcgataaaatgcaaacgcgcgttaaaggaaaccggttataaacgtttagtgatcgccggcggagtaagtgccaataaacagcttcgtcaggggcttgcaaacctgatggacgatttaaaaggacgggtcttttatcccgccccgcaattttgtacggataacggcgcaatgatttcttatgtgggttatctgcgtttgaaacacggcgaacgcaccgaccttgctatcgaagtgaaacctcgctggccgatgatcgaacttgaagcaatttag

SEQ ID NO: 42233 - protein, 344 aa, Mannheimia succiniciproducens MBEL55E
MRILGIETSCDETGVAIYDEDKGLIANQLYTQIALHADYGGVVPELASRDHIRKTAPLIEAALQEANLTAKDIDGIAYTCGPGLVGALLVGSTIARSLAYAWNVPAVGVHHMEGHLLAPMLEDADNRPQFPFIALLVSGGHTQLVKVEGVGKYEVMGESIDDAAGEAFDKTAKLLGLDYPGGAALSRLAEKGSAGRFVFPKPMTDRPGLDFSFSGLKTFAANTINQAIKNEGELSEQTKADIAHAFQTAVVETLAIKCKRALKETGYKRLVIAGGVSANKQLRQGLANLMDDLKGRVFYPAPQFCTDNGAMISYVGYLRLKHGERTDLAIEVKPRWPMIELEAI

SEQ ID NO: 42234 - DNA, 1026 bp, Bacillus licheniformis ATCC 14580
  CDS (1)..(1026): transl_table=11
atgaatcataaaaaagatctgtatgtattaggaatcgaaacaagctgtgatgagactgccgctgcgattgtcaaaaacgggacggacatcatctcaaatgtcgtagcgtcgcaaatcgagagtcataaacggtttgggggcgtcgttcccgagatcgcatcaaggcatcacgtggaacagatcacgatcgtgcttgaggaagcctttgcacaagcggacatgacgtttgatgacattgatgccattgcagtaacggaaggaccggggcttgtaggcgctctattgatcggcgtgaatgctgcgaaagcgctcagttttgcccggggcataccgctcgtaggcgtgcatcatattgccggtcacatctatgccaacaggcttgttcaggacattcaatttccggcgattgcccttgtcgtctcaggcggccacaccgaactcgtatatatgaaagagcacggctcatttgaagtaatcggagagacgctcgacgatgctgcaggcgaagcctatgacaaagtggcgagaacgatggggcttccttatccgggtggacctcacattgacaaacttgcgcaaaaaggcgaggcaaatgtgccgctgccgcgcgcatggcttgaagaagggtcttatcatttcagcttcagcggattgaagtctgcagtcatcaacacgcttcacaacgcttcacaaaaaggcgaaacgatagctccggaagatttgtcagccagctttcaggaaagcgtcatagatgtcctcgtgacaaaaacggaacgcgctgcggaagcttatggcgtcaaacaggtgctgcttgccggaggagttgctgcaaacaaagggctgagagccgcgctcgaaaaaacgttcagcagccgtccggagatcgagcttttgatcccgccgctctcgctgtgtacggacaatgccgccatgattgccgccgcaggtacggttgcttttgaaaaaggaatcagaggaaaatatgatatgaatggtcagcctggcttagatctgacgtcttattga

SEQ ID NO: 42235 - protein, 341 aa, Bacillus licheniformis ATCC 14580
MNHKKDLYVLGIETSCDETAAAIVKNGTDIISNVVASQIESHKRFGGVVPEIASRHHVEQITIVLEEAFAQADMTFDDIDAIAVTEGPGLVGALLIGVNAAKALSFARGIPLVGVHHIAGHIYANRLVQDIQFPAIALVVSGGHTELVYMKEHGSFEVIGETLDDAAGEAYDKVARTMGLPYPGGPHIDKLAQKGEANVPLPRAWLEEGSYHFSFSGLKSAVINTLHNASQKGETIAPEDLSASFQESVIDVLVTKTERAAEAYGVKQVLLAGGVAANKGLRAALEKTFSSRPEIELLIPPLSLCTDNAAMIAAAGTVAFEKGIRGKYDMNGQPGLDLTSY

SEQ ID NO: 42236 - DNA, 1002 bp, Legionella pneumophila subsp. pneumophila str. Philadelphia 1
  CDS (1)..(1002): transl_table=11
atgcttgtattgggtatagagtcttcctgtgatgaaacaggtgttgctgtctatgattcagaatcaggattattgtcccacgccttgcattcacaaattgccactcatcgtgtacatggcggtgttgttccagaactggcatcaagagatcatgtgaattacttggttcctttggtcgatgaggtactaactaaagcgcaaattcgtaaaaaccaattggatggaatagcttacaccgcaggacctggattaattggcgctttgttagttggctcctgctttgccaaaagtctcgcctacgccttaaatatcccggcattggctattcatcatttggaagcccatctgttagccgcaaaaatggaaaccccatctctggactttccctttattgccctgttggtttccggtggccattgtcaactgatagaagtaaataatattggtgagtatcgattattaggagatactctcgacgatgcagtaggagaagcctttgacaagacagccaaactgatggggattccctatcctggaggagccgtgttggcaaatttggctgatcaatgtttatcaactccctatcaatttccccgtcccatgactgacaggccaggcttggactttagttttagcggactaaaaactcatgccttaaacacctggaatcaaagtgaaaaaaaagaaagcgaccgctccgaaattgcaaaagcattccaacaagcagtagttgaaacactaattataaaatgcaaaagagcaattaaagagtctcaatcaaagcgccttgtggtagccggtggagtaggagccaataaagcgttgcgcagcgctttgcaaaaatggattaaggacatccaaggggaagtgtacttccccgctctggaatattgcacagataatggtgcaatggtcgcttatgcaggatgtttgcgcatgatgcggggggagattgatggggggttgggggttatagtcaaacctcgttggcccctcgcttga

SEQ ID NO: 42237 - protein, 333 aa, Legionella pneumophila subsp. pneumophila str. Philadelphia 1
MLVLGIESSCDETGVAVYDSESGLLSHALHSQIATHRVHGGVVPELASRDHVNYLVPLVDEVLTKAQIRKNQLDGIAYTAGPGLIGALLVGSCFAKSLAYALNIPALAIHHLEAHLLAAKMETPSLDFPFIALLVSGGHCQLIEVNNIGEYRLLGDTLDDAVGEAFDKTAKLMGIPYPGGAVLANLADQCLSTPYQFPRPMTDRPGLDFSFSGLKTHALNTWNQSEKKESDRSEIAKAFQQAVVETLIIKCKRAIKESQSKRLVVAGGVGANKALRSALQKWIKDIQGEVYFPALEYCTDNGAMVAYAGCLRMMRGEIDGGLGVIVKPRWPLA

SEQ ID NO: 42238 - DNA, 1041 bp, Burkholderia mallei ATCC 23344
  CDS (1)..(1041): transl_table=11
atgctcgttctcggcatcgaaagctcctgcgacgaaaccggcctcgcgctctacgacaccgagcgcggcctgctcgcgcacgcgcttcactcgcagatcgcgatgcaccgcgaatacggcggtgtcgttcccgagctcgcgtcgcgcgaccacattcgccgcgcgctgccgctgctcgaagaggtgctcgccgcaagcggcgcgcgccgcgacgacatcgacgcgatcgcgttcacgcaggggcccggcctcgcgggcgcgctgctcgtcggcgcgagcatcgcgaacgcgctcgcgttcgcgtgggacaagccgaccatcggcatccaccacctcgaagggcatctgctgtcgccgctgctcgtcgccgagccgccgccgtttccgttcgtcgcgctgctcgtgtcgggcggccatacgcaactgatgcgcgtgagcgacgtcggcgtctacgagacgctcggcgagacgctcgacgatgcagccggcgaagcgttcgacaagaccgcgaagctgctcggcctcggctatccgggcgggccggaggtatcgaggctcgcggaagccggcaccccgggcgcggtcgtgctgccgcggccgatgcttcattcgggggatctcgacttcagcttcagcgggctgaagaccgccgtgctcacgcaaatgaagaagctcgaagcggcgcacgcgggcggcgccgtgctcgagcgggcgaaggcggatctcgcgcgcggcttcgtcgacgcggccgtcgacgtgctcgtcgcgaagtcgctcgccgcgttgaaggcgacgcggctcaagcggctcgtcgtcgccggcggcgtgggcgcgaaccggcaattgcgcgcggcgctgtcggccgccgcccaaaagcgcggcttcgacgtccattatcccgatctcgcgctctgcaccgacaacggcgcgatgatcgcgctcgcgggcgcgctgcggctcgcgcgctggccgtcgcaggcgagccgcgattacgcgttcacggtgaagccgcgctgggatctcgcgtcgctcgcgcgatag

SEQ ID NO: 42239 - protein, 346 aa, Burkholderia mallei ATCC 23344
MLVLGIESSCDETGLALYDTERGLLAHALHSQIAMHREYGGVVPELASRDHIRRALPLLEEVLAASGARRDDIDAIAFTQGPGLAGALLVGASIANALAFAWDKPTIGIHHLEGHLLSPLLVAEPPPFPFVALLVSGGHTQLMRVSDVGVYETLGETLDDAAGEAFDKTAKLLGLGYPGGPEVSRLAEAGTPGAVVLPRPMLHSGDLDFSFSGLKTAVLTQMKKLEAAHAGGAVLERAKADLARGFVDAAVDVLVAKSLAALKATRLKRLVVAGGVGANRQLRAALSAAAQKRGFDVHYPDLALCTDNGAMIALAGALRLARWPSQASRDYAFTVKPRWDLASLAR

SEQ ID NO: 42240 - DNA, 1014 bp, Methylococcus capsulatus str. Bath
  CDS (1)..(1014): transl_table=11
gtgttggtcttgggcatcgaaacttcctgcgacgaaacgggcgtcgcgctttatgactcgagcaaggggctgctggcgcaccggctctacagtcaagtcgacgagcatgcgatgtatggtggcgtggtgccggaaatcgcatcgcgcgaccatctgcgcaagctcctcccgctggtccgcgaagtgttggccgcagggggcgtccggcgtaccgcgatcggcgggatcgcctacacggccggaccgggcctgatcggagcgctcctcgtcggggcggccgtggcccgcagcctcgcctgggcctggagcgtccctgccatcgctgtccatcacatggaaggccatctgctggcgccgctgctggaacccgagcctcccgaattccccttcgtcgcactcctggtttccggcggccacactctgttggtcgaggtgcgtggcatcggggtctaccaggtgctgggcgaatcgctggacgatgcggccggcgaggctttcgacaaaaccgcaaagcttctcgggctgggttatcccggtgggccggcattggcccgcctcgccgagaaagggcgcgccgaacggttccatttcccccgtccgatgacggacaggccgggtctcgatttcagtttcagcggactcaagacccacgcattgaacgtgcttgccgcgctgccggggacgccgcaggacaaggcggacatcgcctgcgcattccaggcggccatcgtcgatacgttggtgctgaagtgtcgccgggcgatgcgggaaaccgggttggggcgcctggtcgtcgcagggggcgtgagcgccaatcaggcagtgcgcaaggggcttcaggcgatggctgaaagcgagcgctaccgggtttacttcccaaggccggagttctgcaccgacaatggggcgatgatcgccttcgccggttgctggcgtcttcgggccggccagttcgaaccgtcggcgatcgaggcgagggcacgctgggcgatggaaacgctcacagccgtttag

SEQ ID NO: 42241 - protein, 337 aa, Methylococcus capsulatus str. Bath
MLVLGIETSCDETGVALYDSSKGLLAHRLYSQVDEHAMYGGVVPEIASRDHLRKLLPLVREVLAAGGVRRTAIGGIAYTAGPGLIGALLVGAAVARSLAWAWSVPAIAVHHMEGHLLAPLLEPEPPEFPFVALLVSGGHTLLVEVRGIGVYQVLGESLDDAAGEAFDKTAKLLGLGYPGGPALARLAEKGRAERFHFPRPMTDRPGLDFSFSGLKTHALNVLAALPGTPQDKADIACAFQAAIVDTLVLKCRRAMRETGLGRLVVAGGVSANQAVRKGLQAMAESERYRVYFPRPEFCTDNGAMIAFAGCWRLRAGQFEPSAIEARARWAMETLTAV

SEQ ID NO: 42242 - DNA, 1026 bp, Anaplasma marginale str. St. Maries
  CDS (1)..(1026): transl_table=11
atgtccggtgtggggtgcattttggggatagagaccagttgtgatgagacagcagttgcagtcttaaatcagcgcagcgtactgtcacatgaagtattatcccagaaggagcactcgtcttttggtggtgtggtaccggagattgcagcaagggcccattctgattttctacatgttctggtctccaaggctatgggtggtgctcatatagggtttagtgatctaagcgcgattgcggtaacatctggccctggattggtgggttcacttatagttggtgtaatgcttgccaaggcaattgcatatgtggcacataaacccatcattgctgtgaatcaccttgaggctcatgcactagtggcacgtatgatttatgctgaccttgaatttccattcctagtgttgatcatatctggggggcactgccaattcttgatcgcacatgatgtcggtaggtatacaaaacttggtgaatcggttgacgactcgctgggggagagctttgataaagtggccagaatgcttggcctagggtatccaggtgggcctgaggtggaaagttgtgctctcaagggggatgcgcacaggtttccgtttcctagggccctgaaaagcaggccggggtgcaacttttcgttttctgggctcaaaaccgcggtgcgctataccatcgccaaggagggaaagttagacaaccaggctttatatgacatttgtgcgtcattccagcaatgcgttggtgaaattttggtgagtagaattgcgaatgcgatggcggcggcgaaatctgccgatagtagcatcagtaaaatggttgtaagtggaggcgtagccgccaacaattttttgcgcggcagcatacgcaaatgtgccaatgaactcggatttgatgcaatattccctccccaagagctgtgcacggataacggtattatggtcggatgggccgggctcgaaaacctacgcaagggcaatttctcgtccttagagctcattcccagggctcgctggcccctctgcccgtag

SEQ ID NO: 42243 - protein, 341 aa, Anaplasma marginale str. St. Maries
MSGVGCILGIETSCDETAVAVLNQRSVLSHEVLSQKEHSSFGGVVPEIAARAHSDFLHVLVSKAMGGAHIGFSDLSAIAVTSGPGLVGSLIVGVMLAKAIAYVAHKPIIAVNHLEAHALVARMIYADLEFPFLVLIISGGHCQFLIAHDVGRYTKLGESVDDSLGESFDKVARMLGLGYPGGPEVESCALKGDAHRFPFPRALKSRPGCNFSFSGLKTAVRYTIAKEGKLDNQALYDICASFQQCVGEILVSRIANAMAAAKSADSSISKMVVSGGVAANNFLRGSIRKCANELGFDAIFPPQELCTDNGIMVGWAGLENLRKGNFSSLELIPRARWPLCP

SEQ ID NO: 42244 - DNA, 1098 bp, Silicibacter pomeroyi DSS-3
  CDS (1)..(1098): transl_table=11
atggcgcaaaccctgacgatactcgggctggaaagcagttgcgacgataccgccgccgcagtggtgcgccagaccgaggggcaggcggccgagatcctgtcctcggtcgtgcatggccaggccgatctgcacagcgcctatggcggtgtggtgcccgagatcgccgcccgcgcccatgccgaaaagctggatatctgcgtgcgccaggcgctgaccgaggcgggtgtttccctgaccgatctggatgcggtggcggtgactgccgggccgggcctgatcggcggggtgatgtcgggagtgatgtgcgccaagggaatcgccgccgcgaccggcctgccgctgatcggggtgaaccatctggcgggtcacgcgctgaccccgcgcctgaccgaccagatcgcctatccctatctgatgctgctggtctcgggcgggcattgccaatacctgatcgcgcacgggcccgaacaattttcacggcttggcgggaccatcgacgatgccccgggcgaggcctttgacaagaccgcgcgcctgctgggcctgccccagccgggcggcccctcggtcgagggcgaggcgcggcaaggtgaccccaagcggttccgctttccccggcccttgctggaccggcccgattgcgacctgtccttttcagggctgaagacagcgctgatgcggatgcgcgaccagctggttggcgaaaagggcgggctgacccggcaggatcgcgccgatctgtgcgccgggtttcaggccgccgtggtagatacgcttgcggaaaagacccggcgtgcgctgacgctttatctggatgaggcgccggcggagccggttgtcgcggtcgccggtggggtggcggcaaacgccgccatccgcgcggcgctggagacggtctgcgccgaggcgggtgcccggttcaccgcgccgccgctgcgcctgtgcaccgacaacgcggcgatgatcgcctatgccgggctcgaacgcttccgcagtggcgcccgcgacgggctggacctgaccgcccggccccgctggccacttgatcaaagcagcccggcgatgctgggcagtggcaagaagggcgccaaggcatga

SEQ ID NO: 42245 - protein, 365 aa, Silicibacter pomeroyi DSS-3
MAQTLTILGLESSCDDTAAAVVRQTEGQAAEILSSVVHGQADLHSAYGGVVPEIAARAHAEKLDICVRQALTEAGVSLTDLDAVAVTAGPGLIGGVMSGVMCAKGIAAATGLPLIGVNHLAGHALTPRLTDQIAYPYLMLLVSGGHCQYLIAHGPEQFSRLGGTIDDAPGEAFDKTARLLGLPQPGGPSVEGEARQGDPKRFRFPRPLLDRPDCDLSFSGLKTALMRMRDQLVGEKGGLTRQDRADLCAGFQAAVVDTLAEKTRRALTLYLDEAPAEPVVAVAGGVAANAAIRAALETVCAEAGARFTAPPLRLCTDNAAMIAYAGLERFRSGARDGLDLTARPRWPLDQSSPAMLGSGKKGAKA

SEQ ID NO: 42246 - DNA, 978 bp, Thermococcus kodakarensis KOD1
  CDS (1)..(978): transl_table=11
atgatagcgctcggcatagagggaaccgcccacactcttggcataggcatagtgaccgaaaagagtgtcctcgccaacgtatttgacactctcacaacggaaaagggtggcatccacccaaaggaggccgccgagcaccacgcaaggctactgaagccgctcctcagaaaggcccttgaaaccgctggagtaacgatggaagacgttgacctaatagcattttcccaggggcctgggctggggcctgcactcagggtcgttgccacagcagcgagggcgctcgcgataaagtacaacaagcccatagtcggcgtgaaccactgcatagcccacgtcgagataacgaagatgttcggcgttaaagatccggtcggcctctacgtgagcggtgggaacacgcaggttttggcattagagggcggccgctaccgcgtctttggagagacgctggacatcggcatagggaacgcgatagataccttcgcgagggagctcggtataggctttcctgggggacctaagatagagaagctcgccctaaaaggggagaagtacattgaactgccctacgctgtcaagggcatggacctgagtttctcgggcgttcttactgaagccgtcaggaagtaccgtactggcaagtacaggattgaagacctcgcttactccttccaggaaacggccttcgcggccctcgtagaggtcacagagagggcagttgcccacactggcaaagaagaggttgtcctggtcgggggagttgcggcaaacaacaggctccgcgagatgctcaaaatcatggctgaggacagggggattaagttcttcgtaccgccctacgacctctgcagggacaacggggcgatgatagcctacacaggcctgagaatgtaccgcggaggggtaaggttcaagattgaagacaccgtagttaaacagaagttccgcaccgatgaggtggaagttgtatgggactga

SEQ ID NO: 42247 - protein, 325 aa, Thermococcus kodakarensis KOD1
MIALGIEGTAHTLGIGIVTEKSVLANVFDTLTTEKGGIHPKEAAEHHARLLKPLLRKALETAGVTMEDVDLIAFSQGPGLGPALRVVATAARALAIKYNKPIVGVNHCIAHVEITKMFGVKDPVGLYVSGGNTQVLALEGGRYRVFGETLDIGIGNAIDTFARELGIGFPGGPKIEKLALKGEKYIELPYAVKGMDLSFSGVLTEAVRKYRTGKYRIEDLAYSFQETAFAALVEVTERAVAHTGKEEVVLVGGVAANNRLREMLKIMAEDRGIKFFVPPYDLCRDNGAMIAYTGLRMYRGGVRFKIEDTVVKQKFRTDEVEVVWD

SEQ ID NO: 42248 - DNA, 1035 bp, Chlamydophila abortus S26/3
  CDS (1)..(1035): transl_table=11
atgcttactctagggttggaaagctcttgtgatgagactgcgtgtgctttagtagatgctaatgcgaaaattgtagccaatgtcgtcttttcccaacaggatcacgtttcttatggtggcatagttcctgaactagcttctcgagcccatcttcaagttttcccctctgtggtgcaatctgctttaaaggagtcgggcgtttctttagaagatattgatttgtttgcagtcacacatacaccaggacttataggtgctctagctataggcgtgaattttgctaaaggtctggctgtgggatgtcaaaaacctatcattggagtaaatcatgttgaggcgcatctttacgccgcctacatggaagcaagctctgtggaattccctgccttaggtctagtcgtttctggagctcataccgccatatttttgatggaagaccctttaacttataagttaatcggaaaaagccgagatgatgctataggagaaactttcgataaagtggcgcgatttttgggtttgccctatcccggaggagctttaatagaaaaactcgcagttcacggctgtgaatcctcctaccctttttctccttccaaagttcccggttatgatttgtcttttagtggattaaagacagctgttctttatgcaattaagggaaataacagtaatcatcgtaccccactgccagagctttctgaaagtcaaaagaacaatatttcagcgtcttttcaaaaagccgcattcactagtgttgcgcaaaaacttcctaatattgtaaaaaaattttcgtgcaggtctctccttgttggagggggagtagcaaacaataagtatttccaaagcttattaaaaaatactctagatttgcctttatactttccttcttctaagttatgtacagataatgctgcgatgatagcaggattaggaagagagctatttctctcagaaaaaatcacttcaggaattactccatgcgcaagatatcaatgggaatctgcttcggtttccttatctcctcttccttaa

SEQ ID NO: 42249 - protein, 344 aa, Chlamydophila abortus S26/3
MLTLGLESSCDETACALVDANAKIVANVVFSQQDHVSYGGIVPELASRAHLQVFPSVVQSALKESGVSLEDIDLFAVTHTPGLIGALAIGVNFAKGLAVGCQKPIIGVNHVEAHLYAAYMEASSVEFPALGLVVSGAHTAIFLMEDPLTYKLIGKSRDDAIGETFDKVARFLGLPYPGGALIEKLAVHGCESSYPFSPSKVPGYDLSFSGLKTAVLYAIKGNNSNHRTPLPELSESQKNNISASFQKAAFTSVAQKLPNIVKKFSCRSLLVGGGVANNKYFQSLLKNTLDLPLYFPSSKLCTDNAAMIAGLGRELFLSEKITSGITPCARYQWESASVSLSPLP

SEQ ID NO: 42250 - DNA, 1026 bp, Pseudomonas syringae pv. syringae B728a
  CDS (1)..(1026): transl_table=11
atgctagtactgggattagaaacctcctgcgacgaaaccggcgtcgcgttatacgacagcgaacgcggtttgcttgcggacgcattattcagccagatcgacctgcatcgtgcctatggcggtgtggtaccggagctggcttcgcgcgatcacgtcaagcgcatgctgcccctgattcgccagacactggccgaggcggactgcgtggccactgatatcgacgccattgcctacacggccggccctggattggtaggcgccttgctggtcggcgcttcgtgcgctcaggcgctggcgttcgcctgggatatcccggcgctgggcgtgcatcacatggaaggtcatctgctggccccgatgctggaagaaaacccgccacagttcccgttcgtcgccttgctggtgtcgggcggccatacgcaactggtgcgcgtcgacggcatcggtcagtacgagctgctgggcgagacgctggatgatgccgcaggcgaggccttcgacaagaccgccaagatgatgggcatgcagtaccccggcggcccggagatttcaaaggcggccatgcagggcgtggcggggcggtttgtcttccctcggccgatgaccgatcgtcccgggctggaattcagcttcagcggcctgaaaacctctgcgctcaatacctggcagcaatgccggaatgctggagacgacagtgagcaaacccgctgcgacatcgctctggccttccagcaggcggtagtggagactttgaccatcaagtgcaagcgcgcgctgaagcagaccggtctcaagagcctggtgattgccggtggcgtgagcgccaacaaggcactgcgcgcttcgctggaaagcatgcttggcgacctgcgcggccatgtctattacgcacggcccgagttttgtaccgataacggcgcgatgatcgcgtttgccgggtgccagcgtttgcaggtcgggcagaaggaagatttgagcatcagcgtgcaggcacgctggcccatggagcagttgtcggggctgtga

SEQ ID NO: 42251 - protein, 341 aa, Pseudomonas syringae pv. syringae B728a
MLVLGLETSCDETGVALYDSERGLLADALFSQIDLHRAYGGVVPELASRDHVKRMLPLIRQTLAEADCVATDIDAIAYTAGPGLVGALLVGASCAQALAFAWDIPALGVHHMEGHLLAPMLEENPPQFPFVALLVSGGHTQLVRVDGIGQYELLGETLDDAAGEAFDKTAKMMGMQYPGGPEISKAAMQGVAGRFVFPRPMTDRPGLEFSFSGLKTSALNTWQQCRNAGDDSEQTRCDIALAFQQAVVETLTIKCKRALKQTGLKSLVIAGGVSANKALRASLESMLGDLRGHVYYARPEFCTDNGAMIAFAGCQRLQVGQKEDLSISVQARWPMEQLSGL

SEQ ID NO: 42252 - DNA, 1029 bp, Haemophilus influenzae 86-028NP
  CDS (1)..(1029): transl_table=11
atgaaaatcttaggcattgaaacttcctgtgatgaaacgggcgtggcgatttatgatgaagaaaaagggttaattgctaatcaactttatactcaaattgccctgcatgcagattatggtggtgtggttcctgaattagcatcacgtgatcatattcggaaaacagcgcctcttattaaagcggcattagaggaagccaatttaaccgcaagcgatattgatggtattgcttatactagtggccctgggcttgtcggcgcattgcttgttggtgctacgattgcacgttctttagcctatgcttggaatgtgccagcgattggtgttcatcatatggaagggcatttacttgcgccaatgcttgatgaaaattcaccgcactttccttttgttgctctgttggtatcgggtggccacactcaattagtgcgtgtcgatggtgtaggaaaatatgaagtgataggagaatctattgatgatgctgctggcgaagcctttgataaaacagcaaaattacttggattagattatccaggcggcgcggcactttctcgtttagcggaaaaaggcacgccaaatcgctttatatttccacgtccaatgacagatcgtgcaggccttgattttagtttttctggtttaaaaacatttgccgcaaatacagttaatcaagcaattaaaaacgagggcgaactgacagaacaaactaaatcggatattgcttatgctttccaagatgcggtggtggatactcttgccattaaatgtaagcgcgcattaaaagaaactggctataaacgtttagtgattgcgggaggagtgagtgcaaataaaaaactccgagaaacgcttgcgcacttaatgcaaaatttaggtggcgaagtgttttatcctcaacctcaattttgtacagataatggcgcaatgattgcttacacaggttttttacgtttaaaacaaggtcagcatagcgatctggctattgatgttaaacctcgttgggcaatgacggaattaccggcaatttag

SEQ ID NO: 42253 - protein, 342 aa, Haemophilus influenzae 86-028NP
MKILGIETSCDETGVAIYDEEKGLIANQLYTQIALHADYGGVVPELASRDHIRKTAPLIKAALEEANLTASDIDGIAYTSGPGLVGALLVGATIARSLAYAWNVPAIGVHHMEGHLLAPMLDENSPHFPFVALLVSGGHTQLVRVDGVGKYEVIGESIDDAAGEAFDKTAKLLGLDYPGGAALSRLAEKGTPNRFIFPRPMTDRAGLDFSFSGLKTFAANTVNQAIKNEGELTEQTKSDIAYAFQDAVVDTLAIKCKRALKETGYKRLVIAGGVSANKKLRETLAHLMQNLGGEVFYPQPQFCTDNGAMIAYTGFLRLKQGQHSDLAIDVKPRWAMTELPAI

SEQ ID NO: 42254 - DNA, 1026 bp, Pseudomonas fluorescens Pf-5
  CDS (1)..(1026): transl_table=11
atgctagtactgggattagaaacgtcctgcgacgaaaccggcgtcgcgttatacgacagtgagcggggcctgctggccgatgcgctgttcagccagatcgacctgcatcgcgcctacggtggcgtggtgccggagctggcctcccgggatcacgtcaagcgcatgctgcccttgatccgccaggtgctggccgaggccgactgcgtgcctaccgagatcgacgcgattgcctacaccgctggccccggccttgtcggtgccttgctggtgggggcttcctgcgcccaggcgctggcctttgcctggggcattccagcgctgggcgtgcaccatatggagggccacctgctggcgccgatgctggaggagcaacctccgcaattcccgttcgtcgctttgttggtgtccggtggtcatacccagttggttcgggtcgatggtatcggccaatacgagttgttgggcgagaccctggatgacgccgcaggcgaggcattcgacaagacggcgaagatgatcggcctgaattatccgggcggccccgagattgcgcgcctggcgactcagggcgtagcggggcgctttgtctttccgcggccgatgaccgatcgcccggggctggatttcagcttcagcggcttgaaaaccttcgccttgaacacctggcagcagtgcgtcagcgctggagacgacggcgagcaaacccgttgcgacatctccctcgcgttccagcaggcggtggtggagactctgaccatcaaatgcaagcgtgccttgaagcagaccggtctcaaacgtctggttattgcgggaggtgtaagtgccaacaaggcattgcgcgcttcgctggaaaagatgctggctgaaatgaagggcaatgtgttctacgcccgtcccgagttctgcaccgacaacggagcgatgatcgcctttgccggttgccagcgtttgcaggccgggcagcaggaaagcctggcgatcagcgtacaggcgcgttggccgatggagcagttgtcagctctctga

SEQ ID NO: 42255 - protein, 341 aa, Pseudomonas fluorescens Pf-5
MLVLGLETSCDETGVALYDSERGLLADALFSQIDLHRAYGGVVPELASRDHVKRMLPLIRQVLAEADCVPTEIDAIAYTAGPGLVGALLVGASCAQALAFAWGIPALGVHHMEGHLLAPMLEEQPPQFPFVALLVSGGHTQLVRVDGIGQYELLGETLDDAAGEAFDKTAKMIGLNYPGGPEIARLATQGVAGRFVFPRPMTDRPGLDFSFSGLKTFALNTWQQCVSAGDDGEQTRCDISLAFQQAVVETLTIKCKRALKQTGLKRLVIAGGVSANKALRASLEKMLAEMKGNVFYARPEFCTDNGAMIAFAGCQRLQAGQQESLAISVQARWPMEQLSAL

SEQ ID NO: 42256 - DNA, 1050 bp, Psychrobacter arcticus 273-4
  CDS (1)..(1050): transl_table=11
atgaaagtattgggtttagagacttcttgtgatgagaccggtctggcgattttcgatagcgaacagataaatagcgagaataaaggtctgcttgggcaagtattgtattcacaaatagagctgcacgccctttacggcggcgttgtgcctgagcttgccagtcgcgatcatattcgtaagctggtgcctctgtttaatgagctgttggcccaatgtaatatcagcaaagatgagattgatgctatcgcttataccaagggtccggggcttatcggcgcgctgatgacgggtgcattgtttggtcgtagcttggcttatggtctagatattccagcgattggcattcatcatatggaagggcatttattggcaccgctgatgggtctcaatccaccagcgtttccatttgtgtcgctattagtgtccggtggacatacgctactcattgccgcccacggtatcggacaatatgaaatcctcggcgagtccatcgatgatgcggcgggcgaatgttttgataaagccgcaaagatgttgggcttgccctatccgggcggtcctaatattgctaaattggcggaaaacggcaatccgaatgcttatagtctgcccagaccgatgttacatcgcggtttggatttttcttttagcggtatgaaaacggctgtgcacaatcttatcaaggacactgacggttcaggaaatggttctgatagcgacccgcaagtccgcgctgatattgctgccagttttcagcatgctgtcgttgataccttggtgaaaaaatgcgtcaaagcgcttaagcaagtggatatgagccgattggtaatagcaggcggtgtcagtgccaatagccatttgcgtgaaactctcgagcgtgagctggctaaaatcaatgccactgttcattatgcgccgcctgctttatgtactgataatggtgcaatgattgcttatgccggttatgagcgtttgcaagcagggcagtccgatgatttagcggtgagctgtgtgccacgttggccaatgacagaactgcctgcggtttaa

SEQ ID NO: 42257 - protein, 349 aa, Psychrobacter arcticus 273-4
MKVLGLETSCDETGLAIFDSEQINSENKGLLGQVLYSQIELHALYGGVVPELASRDHIRKLVPLFNELLAQCNISKDEIDAIAYTKGPGLIGALMTGALFGRSLAYGLDIPAIGIHHMEGHLLAPLMGLNPPAFPFVSLLVSGGHTLLIAAHGIGQYEILGESIDDAAGECFDKAAKMLGLPYPGGPNIAKLAENGNPNAYSLPRPMLHRGLDFSFSGMKTAVHNLIKDTDGSGNGSDSDPQVRADIAASFQHAVVDTLVKKCVKALKQVDMSRLVIAGGVSANSHLRETLERELAKINATVHYAPPALCTDNGAMIAYAGYERLQAGQSDDLAVSCVPRWPMTELPAV

SEQ ID NO: 42258 - DNA, 1050 bp, Colwellia psychrerythraea 34H
  CDS (1)..(1050): transl_table=11
atgcgtattttgggtattgaaacttcttgtgatgaaacaggtatcgccatttatgatgacggtttaggtgatagtcctgaaggtatactcgcccatcgtttgtatagtcaaatagccgttcatgctgattacggtggcgtagtaccagaactcgcatcaagagaccatgtacgtaagactattcctctgattaaggaagtattggcagatgccaaccttacccccaaagatctagacggtgttgcgtacactgctggtcctggtttagttggcgcactcttggttggttgttccattggtcgaagtttggcttatggttgggagctacccgcagttcctgtacatcatatggaaggtcatctattagcgcctatgcttgaagatgatgtacctgagtttccttttgtcgctttattagtttctggcggacataccatgctggtacgtgtcgatgctattggtgaatacaaactacttggtgaatcagttgatgatgctgccggtgaagcgtttgataaaacagctaaattgctaggtttagactaccctggtggaccggctttatctaagatggctgaaagcggtgaagcaggacgctttaaattaccccgccctatgactgatagacctggtttagattttagctttagtggtttaaaaacagcggcaggaaccttagttcgcaaagaatgtttgaatttgtcagatagcgatcttaagcaaacccatgctgatattgccaatgcgtttcaacaagcagtggtagacaccttagcgataaaatgtaaacgcgccttgcaacaagaaaaattaagcagattagtaattgctggtggtgtaagcgccaatacagctttacgagagcaactggcgataaccacaaagaaacttggtggcagtgtattttatccacgtcctgagttttgcactgataacggcgctatgattgcttatgctggtttacagcgtttaaaagcaggaacagatgccgacttaacttttaaagctaaccctcgatgggcgctcgattcattacctccagtaaaatag

SEQ ID NO: 42259 - protein, 349 aa, Colwellia psychrerythraea 34H
MRILGIETSCDETGIAIYDDGLGDSPEGILAHRLYSQIAVHADYGGVVPELASRDHVRKTIPLIKEVLADANLTPKDLDGVAYTAGPGLVGALLVGCSIGRSLAYGWELPAVPVHHMEGHLLAPMLEDDVPEFPFVALLVSGGHTMLVRVDAIGEYKLLGESVDDAAGEAFDKTAKLLGLDYPGGPALSKMAESGEAGRFKLPRPMTDRPGLDFSFSGLKTAAGTLVRKECLNLSDSDLKQTHADIANAFQQAVVDTLAIKCKRALQQEKLSRLVIAGGVSANTALREQLAITTKKLGGSVFYPRPEFCTDNGAMIAYAGLQRLKAGTDADLTFKANPRWALDSLPPVK

SEQ ID NO: 42260 - DNA, 1026 bp, Pseudomonas syringae pv. phaseolicola 1448A
  CDS (1)..(1026): transl_table=11
atgctagtactgggattagaaacctcctgcgacgaaaccggtgtcgcgttgtacgacagcgaacgcggtttgctcgcggacgcattattcagccagatcgacctgcatcgtgcctatggcggtgtagtgccggagctggcttcgcgcgatcacgtcaagcgcatgctgccgctgattcgccagacactggccgaggcggactgcgtggccactgacatcgacgccattgcctacacggccggaccgggtctggtaggtgcattgctggtcggcgcctcgtgcgctcaggcgctggcattcgcctgggatatcccggcgttgggcgttcaccacatggaaggccatttgctggccccgatgctggaagaaaacccgccgcagttcccgttcgtcgcgttgctggtgtccggtggtcatacccaactggtgcgcgtcgatggcatcggtcagtacgaactgctgggcgagacgctggacgatgcggcaggtgaggcgttcgacaagaccgccaaaatgatgggcatgcagtacccaggcggcccggagatttccaaggcggcgatgcagggcgtggcggggcgttttgtctttccccggccaatgaccgatcgccccgggctggaattcagtttcagcgggttgaaaacttctgcgctcaatacctggcagcaatgtcagggcgctggagacgacagcgagcaaacccgctgcgacatagctctggcgttccagcaggcggtagtggagactttgaccatcaagtgcaagcgtgcgctcaaacagactggcctcaagagcctggtcattgcgggcggcgtcagcgcgaataaggcgctgcgggcttcgctggaaagcatgctcggcgacctgcgcggaaatgtttactacgcaaggcccgagttctgtaccgataacggcgcaatgatcgcctttgcgggctgtcagcgtttgcaggcagggcagaaggaagatttgagcatcagcgtgcaggcgcgttggctcatggagcagttgccggggctgtga

SEQ ID NO: 42261 - protein, 341 aa, Pseudomonas syringae pv. phaseolicola 1448A
MLVLGLETSCDETGVALYDSERGLLADALFSQIDLHRAYGGVVPELASRDHVKRMLPLIRQTLAEADCVATDIDAIAYTAGPGLVGALLVGASCAQALAFAWDIPALGVHHMEGHLLAPMLEENPPQFPFVALLVSGGHTQLVRVDGIGQYELLGETLDDAAGEAFDKTAKMMGMQYPGGPEISKAAMQGVAGRFVFPRPMTDRPGLEFSFSGLKTSALNTWQQCQGAGDDSEQTRCDIALAFQQAVVETLTIKCKRALKQTGLKSLVIAGGVSANKALRASLESMLGDLRGNVYYARPEFCTDNGAMIAFAGCQRLQAGQKEDLSISVQARWLMEQLPGL

SEQ ID NO: 42262 - DNA, 1077 bp, Dechloromonas aromatica RCB
  CDS (1)..(1077): transl_table=11
atgctaaaaaaccttgctgctccaagtgttaaaatgtgtgccatgctgatcctcggtgtcgaatcctcctgtgacgaaaccggcattgcgctctacgacagcgaagccggcctgttatcccatgccctgtattcccaggtggcaatgcatgccgagtacggcggcgtcgtgccggagctggcatcgcgcgaccatatccgccgggtcgtgccattgttgcgcgaggcgctcgggcaggccggaaaaatgctggatgaggtcgatgccgtcgcttacacacgcggtcccggtctggctggcgccttgctggttggctgcgcctttgccgaagcgctggcgctggccatcgacaaaccgaccattccggtgcatcaccttgaaggccacttgctgtcgccgctgctgtcgagcgatccgccgaccttcccatttgttgcgctgctggtctccggcggacatacccaattgatgaaggtgaccggcgttggcgagtacgaactgctcggcgaaacgctggacgatgcagcgggtgaagctttcgacaagagtgccaagctgctcggcctgccttatcccggtggtgccttactgtcgaagctggccgaacagggaacgcccggggttcatgaattgccgcgaccgatgctgcattccggtgatctgagtttcagcttttccggcttgaagacagcggtcctgacgttggttcgcgagcacgccgatgcaatgagcgacgagttcaaggccaatgcggcgcgggcctttcaggaggccattgtcgaggtgttggtcaagaagtcgctgaaggcgatgaagcagaccggactgaaacagctggtggtggccggtggggtcggcgccaacaagcagttgcgcaccaccttgaacgacgaggccaaacgcaagcgtttccgtgtctattaccccgaactggaattctgtaccgataacggcgcgatgattgcgctggccggttgcttgcgtttgcagtccggctcgccgtccaaggcggcagggagttttgccgtgcagccacgctggccattgatggaaatgtcggtcagcccaacgaagtag

SEQ ID NO: 42263 - protein, 358 aa, Dechloromonas aromatica RCB
MLKNLAAPSVKMCAMLILGVESSCDETGIALYDSEAGLLSHALYSQVAMHAEYGGVVPELASRDHIRRVVPLLREALGQAGKMLDEVDAVAYTRGPGLAGALLVGCAFAEALALAIDKPTIPVHHLEGHLLSPLLSSDPPTFPFVALLVSGGHTQLMKVTGVGEYELLGETLDDAAGEAFDKSAKLLGLPYPGGALLSKLAEQGTPGVHELPRPMLHSGDLSFSFSGLKTAVLTLVREHADAMSDEFKANAARAFQEAIVEVLVKKSLKAMKQTGLKQLVVAGGVGANKQLRTTLNDEAKRKRFRVYYPELEFCTDNGAMIALAGCLRLQSGSPSKAAGSFAVQPRWPLMEMSVSPTK

SEQ ID NO: 42264 - DNA, 1071 bp, Prochlorococcus marinus str. NATL2A
  CDS (1)..(1071): transl_table=11
atgtcaataattttatccctcgaaacaagttgtgacgagtctgcagcggctttggtttctaatgaaaaaggaaaaattgatttgttagctaatgaaatagcttcacaaattgatgaacatgctaattggggtggtgttgttccagaaatcgcttcaagaagacatttagaaaaccttccatttttaattgaagaggtttttgcaaaatcaaaattacagataaaagatatagatgcagtagccgcaactgttactccaggattagcaggatcactgttggtcggatcaattacggcaagaactttagctaatttacatcaaattccattcttaggtatccatcatttggagggacatctttcctcgatatatttgtcagaaaaacatcctaaacctccttttttagtcttattggttagtggaggacacactgaattgataaaagtagatgttaaacataagtatcaacgtcttggtagaagtcatgatgatgcagctggagaagcttttgataaggttgcaagacttttgggactttcatatccagggggccctgcaattcaaaaaatagctaaatcgggagacccaaaaaaatttttatttccaaaaggaagagtctctaaacctgaaggtggtttttatccatatgacttttcttttagtggtttaaaaacggctgtatttcgccagatagaaaaaattagatcagaaaataaaaaattaccaatagaagatattgctgcaagttttgaatacatagtggctgaggtcttagtagagaggagctttaaatgtgcccttgaccaaggtttaaattctcttgttttagttggaggagttgctgcaaatgtgagattaagggaaatgatgcttgcaaaagcatctgaaaattcaattgatattactcttgcaccaatggaattttgtactgataatgcggcaatgattggggcggcagctttgttaagattgtcatctgaaagctttaaaagttcaatggaattaggtgtatctgctcgatggccactagaaaaatctgatttactttatgatccgattcctcctttttaa

SEQ ID NO: 42265 - protein, 356 aa, Prochlorococcus marinus str. NATL2A
MSIILSLETSCDESAAALVSNEKGKIDLLANEIASQIDEHANWGGVVPEIASRRHLENLPFLIEEVFAKSKLQIKDIDAVAATVTPGLAGSLLVGSITARTLANLHQIPFLGIHHLEGHLSSIYLSEKHPKPPFLVLLVSGGHTELIKVDVKHKYQRLGRSHDDAAGEAFDKVARLLGLSYPGGPAIQKIAKSGDPKKFLFPKGRVSKPEGGFYPYDFSFSGLKTAVFRQIEKIRSENKKLPIEDIAASFEYIVAEVLVERSFKCALDQGLNSLVLVGGVAANVRLREMMLAKASENSIDITLAPMEFCTDNAAMIGAAALLRLSSESFKSSMELGVSARWPLEKSDLLYDPIPPF

SEQ ID NO: 42266 - DNA, 1035 bp, Ralstonia eutropha JMP134
  CDS (1)..(1035): transl_table=11
atgcttgtcctcggcatcgaatcttcctgcgacgaaaccggcctggccctctacgacaccgaggccggcctgctctcgcacgccctgcattcgcagatcgccatgcaccgtgactacggcggcgtagtgcctgaactggcctcgcgcgaccatattcgccgcgtgctgccgctgctgcagcaggtgctcgatgaagcgggccgcagccgcgcggacatcgacgccattgccttcacccagggtcctgggcttgcgggcgcgctgctggtcggcgcttcggtcgccaatgcgctgggcttcgcgctgaacgtgccgatggtgggtgtccaccacctggaaggccacctgctgtcgccgctgcttacgcgcgagccaccgccgttcccgttcatcgccttgctggtttcaggcggccacacgcagctcatggaagtgaaaggcatcggcgactatacgctgctcggcgaaacgctcgacgatgccgccggcgaggccttcgacaagaccgccaagctgctcggcctcggttatccgggcggaccggaagtgtcgcgccttgccgagttcggcacgcccggcgcgttcgacctcccccggccgatgctgcattcgggcaacctcgatttctcgtttgccgggctcaagaccgccgtgctgacgcagacgcgcaagctcgccaacacctgcgagcaggaccgcgccaacctcgcgcgcgcgttcgtcgatgcgatcgtcgatgtgctcgctgcgaagtcctttgccgcgctcaagcagaccggccacaagcggctcgtcgtggccggcggcgtgggcgccaaccggcaattgcgcgaacgcctgaaccagctcggcaagcagcgcaagatcgacgtctattacccggaccttgcgttctgcaccgacaacggcgcgatgattgctctcgctggcgccatgcggttgcaggcagcacctgatctcgcgcagcacagctacggctatggcgtgacgccgcgatgggatctggctgatatccgcctgccttcggccgcctga

SEQ ID NO: 42267 - protein, 344 aa, Ralstonia eutropha JMP134
MLVLGIESSCDETGLALYDTEAGLLSHALHSQIAMHRDYGGVVPELASRDHIRRVLPLLQQVLDEAGRSRADIDAIAFTQGPGLAGALLVGASVANALGFALNVPMVGVHHLEGHLLSPLLTREPPPFPFIALLVSGGHTQLMEVKGIGDYTLLGETLDDAAGEAFDKTAKLLGLGYPGGPEVSRLAEFGTPGAFDLPRPMLHSGNLDFSFAGLKTAVLTQTRKLANTCEQDRANLARAFVDAIVDVLAAKSFAALKQTGHKRLVVAGGVGANRQLRERLNQLGKQRKIDVYYPDLAFCTDNGAMIALAGAMRLQAAPDLAQHSYGYGVTPRWDLADIRLPSAA

SEQ ID NO: 42268 - DNA, 1053 bp, Ehrlichia canis str. Jake
  CDS (1)..(1053): transl_table=11
gtgaagaaatcagtaaaagtagtactagggatagaaacaagttgtgatgagactgctgttgctattgtaaacagtaacaaggaagttttatcacataaaattctttcgcaaaaagaacatgcagaatatggtggagttgttccagaaattgcttctcgtgctcatattaattatttatatgatttaactgttagttgtatagaagagtcgcaactttctttaaataatatagatgctgttgctgttacttctggtccagggcttattggtgggttaatagttggtgtgatgatagctaaaggtattgctagtgttactggtaagcctataattgagattaatcatttagaagctcatgctttaattgttcgcatgttttatgaaattaattttccatttttgttgttgataatatctggtgggcattgtcagtttttaatagtttataatgtaggttgttatcataaattaggttcttctttagatgattctttaggtgaagtgtttgataaagtagcaaaaatgttgaatcttgggtatcctggggggccagttattgagaaaaaatctttgagtggggatagtaaaagctttgttttaccgagagcattgactggccgttgtggatgtgatttttcattttctggtcttaaaactgctgtaaggaatattattatgaatcatgaatatatagataataaattgatatgtgacatttcagcatcttttcaagagtgtgttggtgatatattggtaaatagaattaataatgcaattgcaatgtcaaaagctatagataaaagaattgataaattagtagttactggtggtgttgcagcaaataaattgttacgtgaacgtatgttaagatgtgcttctgataataattttgaaatattttatcctccaagtaagttgtgtactgataatggtattatgatagggtgggctggtattgaaaatttagtgaaagattatgtttcaaatttagattttgctccgaaggcaagatggcctttggaaagtttaaggtctaatataatgaaagagtag

SEQ ID NO: 42269 - protein, 350 aa, Ehrlichia canis str. Jake
MKKSVKVVLGIETSCDETAVAIVNSNKEVLSHKILSQKEHAEYGGVVPEIASRAHINYLYDLTVSCIEESQLSLNNIDAVAVTSGPGLIGGLIVGVMIAKGIASVTGKPIIEINHLEAHALIVRMFYEINFPFLLLIISGGHCQFLIVYNVGCYHKLGSSLDDSLGEVFDKVAKMLNLGYPGGPVIEKKSLSGDSKSFVLPRALTGRCGCDFSFSGLKTAVRNIIMNHEYIDNKLICDISASFQECVGDILVNRINNAIAMSKAIDKRIDKLVVTGGVAANKLLRERMLRCASDNNFEIFYPPSKLCTDNGIMIGWAGIENLVKDYVSNLDFAPKARWPLESLRSNIMKE

SEQ ID NO: 42270 - DNA, 1026 bp, Thiobacillus denitrificans ATCC 25259
  CDS (1)..(1026): transl_table=11
atgttagtgctcggtatcgaatcttcctgcgacgaaaccggtgtcgcgctgtacgacagcgcagagggcctcgtggcgcacgccttacattcgcagatcgcgatgcacaacgcgtacggcggtgtcgtgcccgagctcgcctcgcgtgaccatattcgacggattctgccgctgacccgccaggtgttcgaggaaagcggccgcctgctttccgaactcggcggcgtcgccttcacgcaggggccaggcctggccggtgcgctcctcgtcggcgctggaatgggccgggcgttggcgtttgccctccgcgtgccggcgatcggcgtccatcatctcgaggggcatctgttgtcgccgctcatttccgatacgccgccggcgttcccgttcgtcgccttgctggtatcgggtggccacacccaactgatgctcgtttcggcggtggggcaatacacgctccttggcgagacgctcgacgacgccgcgggcgaagccttcgacaagacggcgcaattgctcgggctcggatacccggggggaccggctttgtcgcgcctcgcggcggcgggcgacgcaacgcgcttcgcgctgccgcggccgatgctcaattcgggggacttcgatttcagcttcagcggcttgaagaccgcagtgctgacgctcgtgcgcaaacagggcctgggacaggcggccgacatcgccgctgcgttcgaagccgccgcggtcgatgtgctggtcggcaaaagtcttgcggcgtgtcggcacgccgcggcgaaccgtctcgtcgtcgccggcggcgtcggcgccaacgcgcggctgcgcgagcggcttaccgccgagggcggccgcgccggcgtcagcgtgttctatccgtcgctcgaattctgcaccgacaacggcgcaatgatcgcgttcgccggggctcagcgcctggcatccgtggcagatcgtgtggcgcgcgcgtcagacctcgacttcgcggtcaagccgcgctgggcactggcttcgcttggcccggtcgagtga

SEQ ID NO: 42271 - protein, 341 aa, Thiobacillus denitrificans ATCC 25259
MLVLGIESSCDETGVALYDSAEGLVAHALHSQIAMHNAYGGVVPELASRDHIRRILPLTRQVFEESGRLLSELGGVAFTQGPGLAGALLVGAGMGRALAFALRVPAIGVHHLEGHLLSPLISDTPPAFPFVALLVSGGHTQLMLVSAVGQYTLLGETLDDAAGEAFDKTAQLLGLGYPGGPALSRLAAAGDATRFALPRPMLNSGDFDFSFSGLKTAVLTLVRKQGLGQAADIAAAFEAAAVDVLVGKSLAACRHAAANRLVVAGGVGANARLRERLTAEGGRAGVSVFYPSLEFCTDNGAMIAFAGAQRLASVADRVARASDLDFAVKPRWALASLGPVE

SEQ ID NO: 42272 - DNA, 1041 bp, Anabaena variabilis ATCC 29413
  CDS (1)..(1041): transl_table=11
atgacaactgttttagcaatcgaaactagctgtgatgaaactgccgtggcaattgttaacaatcgtcaagtttgcagcagtatcatagcttcacaaattccagtccaccagcagtacggtggagtggtaccggaggtagcctcacgagcgcacttggaaacgataaatgacgcgatcgctcaagcgatggatcaagctcaactaggttgggataaaatcgatgggatcgctgccacttgtgcgcctggacttgtaggagcgctgttagtggggctaactgctgccaaaactttagcaatcttacacaataaaccatttttgggagttcaccaccttgaaggtcacatctacgcgacttatttgagtgagccaactttagatcccccttttcttagcttactggtttctgggggacatacaagcttaatttacgttaaggaatgtggcaggtatgaaagtctgggtgaaactcgtgatgatgctgctggggaagcttttgacaaagtagctaggctattaaagctgggttatcctggcggcccagtcattgataaactagcgcaaacaggtaattctcaagcctttgcgttgccggaaggaaaagtgtccttagctggtgggggatatcatccctatgatggcagttttagcggcttaaagacggctgtactgcgtttagtgcagcaattagagagggatggagatccattgcctatagaggacatttccgccagcttccaggcgacagtagccaaggcattaaccaagagagcgatcgcctgtgctttagactatggtctagataccattgctgtaggtggtggggtagccgctaacagtggtttgagacagcacctacaagcagcagccaccgcaaataatctccgcgtcctctttccccccctaaaattctgtaccgataacgccgccatgatagcctgcgctgccgccgatcacttatcacggggtcatctatcccccatcaccttaggcgtagagtcacgcctcagtcttagccaagtgatgaagttatatcagtaa

SEQ ID NO: 42273 - protein, 346 aa, Anabaena variabilis ATCC 29413
MTTVLAIETSCDETAVAIVNNRQVCSSIIASQIPVHQQYGGVVPEVASRAHLETINDAIAQAMDQAQLGWDKIDGIAATCAPGLVGALLVGLTAAKTLAILHNKPFLGVHHLEGHIYATYLSEPTLDPPFLSLLVSGGHTSLIYVKECGRYESLGETRDDAAGEAFDKVARLLKLGYPGGPVIDKLAQTGNSQAFALPEGKVSLAGGGYHPYDGSFSGLKTAVLRLVQQLERDGDPLPIEDISASFQATVAKALTKRAIACALDYGLDTIAVGGGVAANSGLRQHLQAAATANNLRVLFPPLKFCTDNAAMIACAAADHLSRGHLSPITLGVESRLSLSQVMKLYQ

SEQ ID NO: 42274 - DNA, 1026 bp, Pseudomonas fluorescens PfO-1
  CDS (1)..(1026): transl_table=11
atgctagtactgggattagaaacttcctgcgacgaaaccggcgtcgctttgtacgacagcgagcgcggactgctggccgacgcgctgttcagtcagatcgacctgcaccgcgtctatggcggcgtggtgccggagctcgcttcgcgcgaccacgtaaagcgcatgctgcccctgattcgtcaggtgctggccgaggccgactgcgtgccgaccgaaatcgacgccatcgcctacaccgcaggtcccggcctggtcggggcgctgctggtgggtgcttcgtgtgcccaggcgctggcgtttgcctggggcattccggcgctcggcgtgcaccacatggaaggccatttgctggcgccgatgctggagccaaaaccgccggaatttccgttcgtcgctttgttggtgtccggtggtcatacgcagctggttcaggtcgatggcatcggccaatacagtctgctcggcgagacgctggatgatgccgcgggcgaagctttcgacaagactgcaaaaatgatgggcctgaattatccgggcggtccggaaatcgccaagctggcagagaagggtgtcgcaggacgtttcaccttcccgcgtccgatgtgtgatcgcccgggtctggatttcagcttcagcggcctgaagaccttcgccctcaacacctggcagcaatgcgtcagcgccggggacgacagcgagcaagcccgttgcgacatcgcgctggcgttccagcaggccgtggtggagactttgaccatcaagtgcaagcgtgccctgaagcaggccggcatgaagcgtctggtgatcgccggaggcgtcagtgccaacagggcgctgcgtgtttcgctggagaagatgctcggcgacatgaagggcgatgtgttctatgcccgtcccgagttttgcaccgataacggcgcaatgattgcgtttgccggctgccagcgtttgcaggccggccagcaggaaagcctggcgatcagcgtacaggcgcgctggccgatggagcaattgtcagcgctgtga

SEQ ID NO: 42275 - protein, 341 aa, Pseudomonas fluorescens PfO-1
MLVLGLETSCDETGVALYDSERGLLADALFSQIDLHRVYGGVVPELASRDHVKRMLPLIRQVLAEADCVPTEIDAIAYTAGPGLVGALLVGASCAQALAFAWGIPALGVHHMEGHLLAPMLEPKPPEFPFVALLVSGGHTQLVQVDGIGQYSLLGETLDDAAGEAFDKTAKMMGLNYPGGPEIAKLAEKGVAGRFTFPRPMCDRPGLDFSFSGLKTFALNTWQQCVSAGDDSEQARCDIALAFQQAVVETLTIKCKRALKQAGMKRLVIAGGVSANRALRVSLEKMLGDMKGDVFYARPEFCTDNGAMIAFAGCQRLQAGQQESLAISVQARWPMEQLSAL

SEQ ID NO: 42276 - DNA, 1095 bp, Rhodobacter sphaeroides 2.4.1
  CDS (1)..(1095): transl_table=11
atgtcccgtccgctcacctttctcggcatcgagagcagctgtgacgacaccgcggcggccgtggtgcgcgcggagggcacgcgggcggagatcctctcttcggtggtggacgggcagacggcgctgcatgcggccttcggcggcgtggtgcccgagatcgcggcccgtgcccatgccgaacggctggacctctgcgtcgaacgcgcgctggaggaggcgggcctcggactgcgcgacctcgacgggatcgcggtgacggcggggccggggctgatcggcggcgttctgtcgggcgtcatgctggccaaggggcttgcggcgggcaccggcctgccgctcgtgggggtgaaccatctggcgggccacgcgctcacgccgcggctgacggacgggctcgccttcccttatctcatgcttctggtgtcgggtgggcattgccagttcctgatcgcgcgtggagcggaagagttttcgcgcctcggaggttccatcgacgatgcgccgggcgaggctttcgacaagacggcgaagctgctgggcctgccgcagccgggcgggccttcggtcgaggccgaggcggcagcgggcgatccgcgccgcttcgcctttccacggccgatgctcgaccggccgggctgcgacatgtccttctcggggctgaagaccgcgcttctgcgggcgcgcgacgggctcgtggccgagaagggcgggctcacgcgggccgaccgggccgacctctgcgcgggctttcaggccgcggtggtcgaggtgctggccgaaaagacccgccgcgcgctggcggtctatgcggccgagggcgcggccgagcccgcgctggccgtggcgggcggggtcgcggccaacgggccgatccgggcggcgctgacccgcgtggccgaggcggcaggcgtgcgcttcctcgccccgccgctccggctctgcaccgacaatgcggcgatgatcgcctgggccgggattgagcggttccgcgccggcggccgcgacgggatggagctgtccgcccgcccgcgctggccgctcgaccgcagcgcgccggcgctgatcggctcgggcaggaagggggccaaggcatga

SEQ ID NO: 42277 - protein, 364 aa, Rhodobacter sphaeroides 2.4.1
MSRPLTFLGIESSCDDTAAAVVRAEGTRAEILSSVVDGQTALHAAFGGVVPEIAARAHAERLDLCVERALEEAGLGLRDLDGIAVTAGPGLIGGVLSGVMLAKGLAAGTGLPLVGVNHLAGHALTPRLTDGLAFPYLMLLVSGGHCQFLIARGAEEFSRLGGSIDDAPGEAFDKTAKLLGLPQPGGPSVEAEAAAGDPRRFAFPRPMLDRPGCDMSFSGLKTALLRARDGLVAEKGGLTRADRADLCAGFQAAVVEVLAEKTRRALAVYAAEGAAEPALAVAGGVAANGPIRAALTRVAEAAGVRFLAPPLRLCTDNAAMIAWAGIERFRAGGRDGMELSARPRWPLDRSAPALIGSGRKGAKA

SEQ ID NO: 42278 - DNA, 1002 bp, Carboxydothermus hydrogenoformans Z-2901
  CDS (1)..(1002): transl_table=11
ttgggtaaggttatcttaggcattgaaacatcctgcgatgagacggcagtttccttagtggaagatggtagaaaggtgttaatttctttactttcttctcaggttgatcttcaccggctgtacggtggtgtagtacccgaaatagcatcccgcaggcatttagaactgatttttcccctgttagatgaagcctttcggaaattccccagggaaaagatagctgcggtagcggttacgtacggtcccgggcttgtaggagctttactggttggcctttcggtagccaaaagtttaagctatgccttaaacgttccgttaattggagttaatcacatggaagggcatatttttgccaattttcttgaagatgcaaatccggtttttccggcactggtgctggtggtttcggggggacataccgatttaattttcatgcggggcttcggggattacgagcttttgggggaaaccattgacgatgctgccggggagtgttttgataaagtgggccgggtattaaacttaccctatcccgcggggccggttattgaccggttgagtaaaaagggaaaacccatttataagtttccggtagctcgtttaaaagaggaaggatataactttagctttagcggtttaaaaactgcggtaagagttttccgggaaaaaaatcccgaggctaaagttgaagacattgccgcgtcttttcaggaagctctggtcagagctttggtggaaaataccgaaaaagctttaaaagaatgcatgccggctaagctttacttagccggtggcgttgcggctaactcaaggttgagagaagagtttttaaatcttggtaaaacctataatgttccggtacattttccttcccttcagtactgtaccgataatgcggcaatgattgctgccgccggttatcaccgctatctttcggggaagtatgcaccgcttaatttaaacgcctacccttcgctgatgctcggggaggaaagatattaa

SEQ ID NO: 42279 - protein, 333 aa, Carboxydothermus hydrogenoformans Z-2901
MGKVILGIETSCDETAVSLVEDGRKVLISLLSSQVDLHRLYGGVVPEIASRRHLELIFPLLDEAFRKFPREKIAAVAVTYGPGLVGALLVGLSVAKSLSYALNVPLIGVNHMEGHIFANFLEDANPVFPALVLVVSGGHTDLIFMRGFGDYELLGETIDDAAGECFDKVGRVLNLPYPAGPVIDRLSKKGKPIYKFPVARLKEEGYNFSFSGLKTAVRVFREKNPEAKVEDIAASFQEALVRALVENTEKALKECMPAKLYLAGGVAANSRLREEFLNLGKTYNVPVHFPSLQYCTDNAAMIAAAGYHRYLSGKYAPLNLNAYPSLMLGEERY

SEQ ID NO: 42280 - DNA, 1026 bp, Geobacter metallireducens GS-15
  CDS (1)..(1026): transl_table=11
atgctcattctcacgatcgaaacatcctgcgacgaaaccgccgccgcggtggtccgcgacgggcgcacggtgctgtcgagcatcgttgcgacccaggtgaaggaccatgccgtctacgggggggttgtccctgagatagcctcccgcaaacatctggagagcatcccggtcgtcatcgacgaagccctccgcactgcttcggtctccctcgacgccatcgagggggtcgccgtgacccaggggccgggactggccggggcacttctggtgggtaccgccgttgccaaggccatcgcctttgcccgccggctccccatcgttggggtgaaccatatcgaagggcacctctcggccattttcctggagcgagaggtggcgtttcccttcgtggccctcgccgtctcgggggggcatacccatctctaccgggtcgacggcatcggccgctacaccaccctcggccagacccgcgacgacgctgccggcgaggccttcgacaaagtcgcaaagctcttgggactcccctatccgggcggggttgagatcgatcgccttgccgccgagggggacccagccagcatttccttcccccggccgctcctccacgacggcagcttcaacttcagcttcagcggcctcaagactgcggttctgaaccatgtccgcaagaatccggtccaggaggatggccagcaactccgggacctctgcgcttcgtttcaacgggccgcctgcgacgtgctcgtgacgaaaacgctccttgccgcagagaccgaggggatcggtcgggtcgtggttgccggcggcgttgcctgcaatagcgccctgcgccgcgacatggcccgggaggctgctgacaggggaatcgagctcgccatcccttctccttccctctgtagcgataacgccgccatgctggcggttcccggtgatttctacctctcccgggggatcagcgacggcctctccctggacgccttggtaaactggcccttggatacgatccggacgaggctggagtcgtga

SEQ ID NO: 42281 - protein, 341 aa, Geobacter metallireducens GS-15
MLILTIETSCDETAAAVVRDGRTVLSSIVATQVKDHAVYGGVVPEIASRKHLESIPVVIDEALRTASVSLDAIEGVAVTQGPGLAGALLVGTAVAKAIAFARRLPIVGVNHIEGHLSAIFLEREVAFPFVALAVSGGHTHLYRVDGIGRYTTLGQTRDDAAGEAFDKVAKLLGLPYPGGVEIDRLAAEGDPASISFPRPLLHDGSFNFSFSGLKTAVLNHVRKNPVQEDGQQLRDLCASFQRAACDVLVTKTLLAAETEGIGRVVVAGGVACNSALRRDMAREAADRGIELAIPSPSLCSDNAAMLAVPGDFYLSRGISDGLSLDALVNWPLDTIRTRLES

SEQ ID NO: 42282 - DNA, 1104 bp, Desulfovibrio desulfuricans G20
  CDS (1)..(1104): transl_table=11
atgcgttgtttaggtattgaatcaagctgtgacgagactgctctggccatagtggatgacggccgtctggtcgatgctgtgatgtccacacaggcggagctgcatgcgctttttggcggggttgtgcctgaactggcctcgcgcgagcattaccggctgattgggcgcatgtttgattcgcttatgctccggtgcggacttggcgttcaggatattgatgtgatttctgtagcccgtgggccgggtttgctgggcagcctcctcgtgggggtggggtttgccaaggggctggcattggccggaggccagcggctggtaggtgtcaatcatctgcatgctcacctgctggctgcggggctggagcaccgccttgtttttcctgctctgggagttcttgtttccggcgggcatacccatctttaccggattgattcgcctcgtaatttcacgctggtggggcgcactctggatgatgccgccggtgaggcctttgataaagtggcaaaaatgctcaatctgccgtatcccggcggacgttttattgatgtattggggcatatggctgaccctgatgacagcatgttcccgcggccctacaccgataatgacaatctcgatttcagcttcagcggcttgaagacagcagtttccacgtggttgaaagctcacggtggcacagcgcttgccgctccgccggcggaatccgagctgcaggccatgctgcagaacaatgtgctgccgtcgggtatgcctgcagatatgccgcttgtgtgcgcatcatttaatgcggctgtggctgatacgttgtacattaaagcccgcagggcgttgcagcgtctgggagggcgtgggcaaatccggtctgtggtggtcgcgggcggggtggctgcaaacagccgtgtgcgtacttcaatgcaacgtcttgccgccgaagaaggcctgcacttgcatttgccgtcccctgcattatgtactgacaacggggccatgattgcctacacgggctggttgctggcatccgaagggcttcatcattcgctcgaactggaaactatgccgagagggcgtgttattccggatgattacatttatgatgcccactga

SEQ ID NO: 42283 - protein, 367 aa, Desulfovibrio desulfuricans G20
MRCLGIESSCDETALAIVDDGRLVDAVMSTQAELHALFGGVVPELASREHYRLIGRMFDSLMLRCGLGVQDIDVISVARGPGLLGSLLVGVGFAKGLALAGGQRLVGVNHLHAHLLAAGLEHRLVFPALGVLVSGGHTHLYRIDSPRNFTLVGRTLDDAAGEAFDKVAKMLNLPYPGGRFIDVLGHMADPDDSMFPRPYTDNDNLDFSFSGLKTAVSTWLKAHGGTALAAPPAESELQAMLQNNVLPSGMPADMPLVCASFNAAVADTLYIKARRALQRLGGRGQIRSVVVAGGVAANSRVRTSMQRLAAEEGLHLHLPSPALCTDNGAMIAYTGWLLASEGLHHSLELETMPRGRVIPDDYIYDAH

SEQ ID NO: 42284 - DNA, 1029 bp, Moorella thermoacetica ATCC 39073
  CDS (1)..(1029): transl_table=11
atggtaaaggaattggcgacagaaacgaatatcctggccatcgagagttcctgtgatgagacggcggcggccattgtcagcgacggcaccagggtccgggccaacatcatcgcctcccagatcgccgttcaccgccgctttggcggcgtggtgccggaaatagcttcccgccaccatatggagaatatagtaccggtggtatcggaggccctggctacagccggcctggcctttagcgatgtggacgccgtggcggtgacctatggtcccggactggtaggggccctgctggtgggtgtcgcttacgccaagagcctggcctacgccctgggtaagcccctcatcggtgtccaccacctcctggggcatatctatgccggttttctggcctaccctggcctgcccttgccggcggtctccctggtggtctcgggcgggcataccaacctggtctacctggaggatcacaccacccgtcgtatcctggggtcaacccgggatgacgccgccggggaagccttcgacaaggtggccagggtcctggggttgccctatccgggcgggccggagctggaaaaactggcccgggaaggcaatccccgggccattcctttcccccgggcctggctggaggaaaacagccttgatttcagctttagcggcctgaaatctgcggtcatcaactacctgcaccacgcccgccaggtgggccaggaggttaaccgggccgacgtggctgccagtttccaggcggcggtggccgaggtcctggtgaccaagaccctgctggcggctaccagctaccgggccaggtctatccttctcgccggtggggtggcggccaattcggtcctgcgccgggaacttcgttcagccggggagcaggcgggcctcccggtcttttttccaccgcgggaactctgcaccgacaacgcggccatgatcggctgtgccgcttattaccagtacctgcgccgggattttgcccctttaagcctcaacgctatccccgatttaccccttaattga

SEQ ID NO: 42285 - protein, 342 aa, Moorella thermoacetica ATCC 39073
MVKELATETNILAIESSCDETAAAIVSDGTRVRANIIASQIAVHRRFGGVVPEIASRHHMENIVPVVSEALATAGLAFSDVDAVAVTYGPGLVGALLVGVAYAKSLAYALGKPLIGVHHLLGHIYAGFLAYPGLPLPAVSLVVSGGHTNLVYLEDHTTRRILGSTRDDAAGEAFDKVARVLGLPYPGGPELEKLAREGNPRAIPFPRAWLEENSLDFSFSGLKSAVINYLHHARQVGQEVNRADVAASFQAAVAEVLVTKTLLAATSYRARSILLAGGVAANSVLRRELRSAGEQAGLPVFFPPRELCTDNAAMIGCAAYYQYLRRDFAPLSLNAIPDLPLN

SEQ ID NO: 42286 - DNA, 1041 bp, Burkholderia thailandensis E264
  CDS (1)..(1041): transl_table=11
atgctcgttctcggcatcgaaagctcctgcgacgaaaccggcctcgcgctctacgacaccgggcgcggcctgctcgcgcacgcgcttcactcgcagattgcgatgcaccgcgaatacggcggcgtcgtccccgagctcgcgtcgcgcgaccacattcgccgcgcgctgccgctgctcgaggaagtgctcgccgctggcggcgcacgccgcgaggacatcgacgcgatcgcgttcacgcaagggcccggcctcgcgggcgcgctgctcgtcggcgcgagcatcgcgaacgcgctcgcgttcgcgtgggacaagccgaccatcggcatccatcacctcgaagggcatctgctgtcgccgctcctcgttgccgagccgccgccgtttccgttcgtcgcgctgctcgtgtcgggcggccacacgcagttgatgcgcgtgaccgacgtcggcgtctacgagacgctcggcgaaacgctcgacgacgccgccggcgaagcgttcgacaagaccgcgaagctgctcggccttggctatcccggcggaccggaagtgtcgaagctcgccgaagccggcacgccgggcgcggtcgtgctgccgcggccgatgctccattcgggggatctcgacttcagcttcagcgggctgaagaccgccgtgctcacgcaaatgaagaagctcgaagccgcgcacgcgagcggcgccgagctcgatcgcgcgaaggccgatctcgcgcgcggcttcgtcgacgcggccgtcgacgtgctcgtcgcgaagtcgctcgccgcgctgaagaagacgcggctcaagcggctcgtcgtcgcgggcggcgtcggcgcgaaccggcagttgcgcgcggcgctgtcggccgccgccgggaagcgcggcttcgacgtccattatcccgacctcgcgctctgcaccgacaacggcgcgatgatcgcgctcgcgggcgcgctgcggctcgcgcgctggccgtcgcaggcgagccgcgactacgcattcacggtgaaaccgcgctgggacctcgcgtcgctcgcgcgatag

SEQ ID NO: 42287 - protein, 346 aa, Burkholderia thailandensis E264
MLVLGIESSCDETGLALYDTGRGLLAHALHSQIAMHREYGGVVPELASRDHIRRALPLLEEVLAAGGARREDIDAIAFTQGPGLAGALLVGASIANALAFAWDKPTIGIHHLEGHLLSPLLVAEPPPFPFVALLVSGGHTQLMRVTDVGVYETLGETLDDAAGEAFDKTAKLLGLGYPGGPEVSKLAEAGTPGAVVLPRPMLHSGDLDFSFSGLKTAVLTQMKKLEAAHASGAELDRAKADLARGFVDAAVDVLVAKSLAALKKTRLKRLVVAGGVGANRQLRAALSAAAGKRGFDVHYPDLALCTDNGAMIALAGALRLARWPSQASRDYAFTVKPRWDLASLAR

SEQ ID NO: 42288 - DNA, 1017 bp, Syntrophus aciditrophicus SB
  CDS (1)..(1017): transl_table=11
atgattgttttagggattgagtcgtcatgtgacgaaacggcggcggcggtcgttcgggacggccgtgttctgttgtccaatgtgatcgcctcgcagattggcgaacacagcaaatatggcggcgtggtgcccgaaatcgcgtcgcgcaagcatattgaagcggtcattccggttattctgcaggcgcttcatgatgccgggatggagttatcggatatcgaagggatcgcagtaaccagaggaccggggcttgtcggttctctgctggttggactttccgttgcgaaagccctggctttttcccggaagcttcccctcgtgggaattcatcacctggaagggcacatagcggccatcttcctcagtgagaaggtgcccgagtttcccttcattgcgcttgtagtgtccggggggcataccaacatatacttcgtccgggggttcgggttatttactcttctgggtcagacaagagatgatgcggcaggagaagcctttgacaaggcagcgaaactgctgaatatcggctatcccggaggagtggtgatcgatcgtctggcgaaggagggcgaccggaatctgctgaatttcccaagggcgatgaaggaaagccttgatttcagtttcagcggacttaagacgtctcttcttgttcatgtaaaaaaacatgggagcccttctgccagggaagatcttgctcatctggttgccgcctatcaggaagccattgtcgatgtcctggtggagaaaaccctgaaagccgccaaaatgaattccgttccccaggttgtcgtctgtggcggagtggcctcgaacagtcgtctcagggaacattttatggagagaagccgggaagaaaacatcgatctgtttattcctcctcccgtgctgtgcactgacaatgccgcgatgatcgccgtggtgggcgaaaaccttctgaacaaagggaaaagcgaagaactcagtataaatgccgtatcgcgatggcctctcgatgtggcgggatcgttccggtag

SEQ ID NO: 42289 - protein, 338 aa, Syntrophus aciditrophicus SB
MIVLGIESSCDETAAAVVRDGRVLLSNVIASQIGEHSKYGGVVPEIASRKHIEAVIPVILQALHDAGMELSDIEGIAVTRGPGLVGSLLVGLSVAKALAFSRKLPLVGIHHLEGHIAAIFLSEKVPEFPFIALVVSGGHTNIYFVRGFGLFTLLGQTRDDAAGEAFDKAAKLLNIGYPGGVVIDRLAKEGDRNLLNFPRAMKESLDFSFSGLKTSLLVHVKKHGSPSAREDLAHLVAAYQEAIVDVLVEKTLKAAKMNSVPQVVVCGGVASNSRLREHFMERSREENIDLFIPPPVLCTDNAAMIAVVGENLLNKGKSEELSINAVSRWPLDVAGSFR

SEQ ID NO: 42290 - DNA, 1053 bp, Novosphingobium aromaticivorans DSM 12444
  CDS (1)..(1053): transl_table=11
atggccctgatccttggcatagaatccagctgcgatgaaaccgccgccgcggtgatcgacagcaatggcgcgtcgctcgaagcgcgcatcgtggcgcagcgcatcgcctcgcaggacgaagcgcatcgaccctatggcggcgtcgttccggaaatcgcggcgcgcgcgcacgccgaagtgctcagtccgatgatcgcggcggtgctggccgacgcggggatcgggctggacgacctcgatgccatcgccgcgaccgcggggccggggttgatcggcggcgtcatggtcggtctcgttaccggaaaggcgctggccatggcggcggacaagccgctgatcgcggtcaaccacctggaaggccacgcgctttcgccgcgactggccgaaccctcgttgcaatacccctacctgttgctgctggtttcgggcggacattgccagatcctggaagttgcgggggtcgggcagttccgccgccttgccaccaccatcgacgatgccttgggcgaagcgttcgacaagaccgcgaagatcctcggcctcggctatccaggtgggccggcggtggaacggatggcgcgagagggcaaccccaaggccgtgcccctgccgcgcccgctggtcggcagcggggagccgcacttctcgttcgcgggcctgaagagcgcggtcatgcgggcgaaggatgccggtgttcacggggacgccgacatcgccgcttcattccagcaggcggcgatagattgcgtgatcgatcgcacccgcatcgcgcttgagactgcttctccgggcatgacggcgctggtggtggctggaggcgtcgccgccaatgccgccttgcgtggcgcgctggaaggactggcggagagccacgggctttcgctggtcgcgccgccgccgaaactgtgcacagacaacgctgcgatgattggttgggctggcgcggaacgccttgctctgggatatgtcgatccacttgacgtggcggcgcgtccgcgctggccgctcgacgagaacgccgcgccggtgcgcggagcaggggtaaaggcatga

SEQ ID NO: 42291 - protein, 350 aa, Novosphingobium aromaticivorans DSM 12444
MALILGIESSCDETAAAVIDSNGASLEARIVAQRIASQDEAHRPYGGVVPEIAARAHAEVLSPMIAAVLADAGIGLDDLDAIAATAGPGLIGGVMVGLVTGKALAMAADKPLIAVNHLEGHALSPRLAEPSLQYPYLLLLVSGGHCQILEVAGVGQFRRLATTIDDALGEAFDKTAKILGLGYPGGPAVERMAREGNPKAVPLPRPLVGSGEPHFSFAGLKSAVMRAKDAGVHGDADIAASFQQAAIDCVIDRTRIALETASPGMTALVVAGGVAANAALRGALEGLAESHGLSLVAPPPKLCTDNAAMIGWAGAERLALGYVDPLDVAARPRWPLDENAAPVRGAGVKA

SEQ ID NO: 42292 - DNA, 1029 bp, Anaplasma phagocytophilum HZ
  CDS (1)..(1029): transl_table=11
gtgggtgaagtactactaggaatagagacgagttgtgatgagactgctgttgctatattgaccgacagtggggaagtctttgcgcatgaggtcttatctcaagtagagcattctgcatatggtggggtggttcctgaaatagctgcacgtgctcactacgatttcctgcaagtgctcgtgaagaaggcaatgagcaattcaggtctaaaattcgatgatctttcaagtatagctgttacagccgggcccgggttagtaggttctttgattgtgggtgttatgtttgcaaaggctgtttcctatgcaacgaaaaagcctatcatagcggtaaatcatttagaagcccatgctttagtagcgcggatgaatcaagagattgtctttccttttcttgtccttattgtttcgggcggccattgtcagtttatgttagctcatgacgttggttgctacagtaaattgggcggtgcaattgatgattcactaggtgaagcgtttgataaagtagcgcgaatgcttgggttagggtatccgggtggtccggctgtagaatgtaaggctaagaatggtcgtggggatagattctttttccctcgggctttacataatagacctggctgtgatttttcattttcaggattaaagacagcggttcgttatgcgatcgagagagaagggcctctggatgaagaaatggtatgtgacatatgtgcatcttttcaggaatgcgttggtgatatactggtgagtaggatacggaatgccataaaggctgctagacaactgaaggagggtatagataagctggtggttactggtggggtagcatcgaatggatttttaagaactattatatcgcagtgcgcagaagacatgggtgttactgcggtattcccgccacgcgaactatgcacggacaatggcataatggtggcttgggcaggggtggagaacttccgtaagggtaacgcagttgcttcactaggatttgctcccagagctagatggactatggaaagcattagctag

SEQ ID NO: 42293 - protein, 342 aa, Anaplasma phagocytophilum HZ
MGEVLLGIETSCDETAVAILTDSGEVFAHEVLSQVEHSAYGGVVPEIAARAHYDFLQVLVKKAMSNSGLKFDDLSSIAVTAGPGLVGSLIVGVMFAKAVSYATKKPIIAVNHLEAHALVARMNQEIVFPFLVLIVSGGHCQFMLAHDVGCYSKLGGAIDDSLGEAFDKVARMLGLGYPGGPAVECKAKNGRGDRFFFPRALHNRPGCDFSFSGLKTAVRYAIEREGPLDEEMVCDICASFQECVGDILVSRIRNAIKAARQLKEGIDKLVVTGGVASNGFLRTIISQCAEDMGVTAVFPPRELCTDNGIMVAWAGVENFRKGNAVASLGFAPRARWTMESIS

SEQ ID NO: 42294 - DNA, 1011 bp, Francisella tularensis subsp. holarctica
  CDS (1)..(1011): transl_table=11
atgatagtacttggtattgagagctcctgtgatgaaacaggtttagcgatatatgattattcaaaaaagaaattaattgcagatgaattatatagccaagtcaaattgcataagaagtatggtggtgttgtaccggaacttgcctcgcgtgagcatatcgctaagcttaatcttttagctaagaaaatattcaaagaaactggtcttagctttgaagatattgattgtatagcatataccgcgatgcctggtttagttggtgcattgatggttggagctacatttgccaaaacactaggcttaatccataatattgatacaattgcagttcatcaccttgagggtcatcttttatcaccattattggatcacaatagtaatatagaatatcctttcgtagccttgctagtttctggaggacatacacaactatttgaggtaaaagagtttggtgagtatagtttactaggggaatcaattgatgatgcagcaggtgaggcatttgataagacgactaagcttttaggtatgggttatcctggtggagttgaggtggcaaatttagctgatcaagctactgataagtctaagtatattctaccaaggccgatgaaaaataaacctaatttagattttagctttagtggtttaaaaactgctgtgctaaatacatggtatgatgagcaagatcagtcattagagaataaggcaaatctatgctacgcattccaaaatgcggctatagatgtattggtttctaaatgtgctaaagcattacaaaaaactaaaaatacaagattggttatttcaggcggagtcagtgcaaataaactattgcgtcatcagctagatttattggctaaaaatagagaatatcaaatattttttcctccaatgaaatattgtacagataatggtgcaatgattgctctagcgggagcatataggtatgtaaatggttttaaggactctaatttagagattaatgttaaagcaagatcaccactctag

SEQ ID NO: 42295 - protein, 336 aa, Francisella tularensis subsp. holarctica
MIVLGIESSCDETGLAIYDYSKKKLIADELYSQVKLHKKYGGVVPELASREHIAKLNLLAKKIFKETGLSFEDIDCIAYTAMPGLVGALMVGATFAKTLGLIHNIDTIAVHHLEGHLLSPLLDHNSNIEYPFVALLVSGGHTQLFEVKEFGEYSLLGESIDDAAGEAFDKTTKLLGMGYPGGVEVANLADQATDKSKYILPRPMKNKPNLDFSFSGLKTAVLNTWYDEQDQSLENKANLCYAFQNAAIDVLVSKCAKALQKTKNTRLVISGGVSANKLLRHQLDLLAKNREYQIFFPPMKYCTDNGAMIALAGAYRYVNGFKDSNLEINVKARSPL

SEQ ID NO: 42296 - DNA, 1026 bp, Saccharophagus degradans 2-40
  CDS (1)..(1026): transl_table=11
atgcgagttttgggaatagaaacctcctgcgatgagaccggtgtagctatttacgatagtgaagcgggcttgcttggccacaccctgtacagtcaggtggcggtgcacgccgagtatggtggcgtggtgccagagttggccagccgcgaccatgtgcgcaagttgttgccgttggtggatggtttgctagataacaccgactcgcgcaataaaatagatgccattgcttatacgtctggcccggggttaattggcgcgcttttggttggcgcgtgttttggccgcggtttggcaatggcgtggggttgccccgcaattggcgtgcaccatatggaaggccatttgctggccccaatgttggaagatgctccgccggccttcccgtttgtggcgctgttggtgtcgggtggccacacccagctggtagaggtgcagggcattggtaaatatgtgctgttgggcgagtcgctagatgatgctgccggtgaagccttcgataaagccgccaaaatgatggatttggattaccccggtgggccaaatattgccaagcttgctaccaagggcgatgtttcgcggtttaagtttccgcgccctatgaccgatcgcccagggttagattttagttttagtggtttgaaaacttttacccttaataccgttgccaagtatgcagatgaaaccggcttgccggacgatcaaacctgcgccgatattgcctgcgcgtttcaagaagccgtggtggacacgttagttattaaatgccgccgcgcgctgcagcaaactaaattaaatactttggttatagccggtggtgtatcggctaatgttcgcctgcgcgagcgtttagaagccgctttggcaaaaattaattcacaggtttactatgctcgcccagagttttgcaccgataacggcgcaatgattgcctacgccggttgccagcgtttgcttgcggggcaggtagagccgttagctattaacgtttcgccgcgttgggcgctagataccttgcctgctatttag

SEQ ID NO: 42297 - protein, 341 aa, Saccharophagus degradans 2-40
MRVLGIETSCDETGVAIYDSEAGLLGHTLYSQVAVHAEYGGVVPELASRDHVRKLLPLVDGLLDNTDSRNKIDAIAYTSGPGLIGALLVGACFGRGLAMAWGCPAIGVHHMEGHLLAPMLEDAPPAFPFVALLVSGGHTQLVEVQGIGKYVLLGESLDDAAGEAFDKAAKMMDLDYPGGPNIAKLATKGDVSRFKFPRPMTDRPGLDFSFSGLKTFTLNTVAKYADETGLPDDQTCADIACAFQEAVVDTLVIKCRRALQQTKLNTLVIAGGVSANVRLRERLEAALAKINSQVYYARPEFCTDNGAMIAYAGCQRLLAGQVEPLAINVSPRWALDTLPAI

SEQ ID NO: 42298 - DNA, 1020 bp, Methylobacillus flagellatus KT
  CDS (1)..(1020): transl_table=11
atgttaattcttggcattgaatcttcctgcgatgaaaccggcctagccttgtacgacacggaacgaggcttgctcgcccatgcattgcactcccagatcgacatgcatgccgcatacggcggcgtggtgccagaattagcttcccgcgaccatattcgccggacattaccactgacccagcatgtattggagcaagcaggaaaatcattggccgacctggatggcatcgcctacacccaggggcctggcctctcgggcgccctgctggtcggcaccagcattgccgaatccctggcattcagcctcgaccttccgaccatcggcgtccaccatctcgaaggccatttactcgccccgttgcttgagcccgatccaccggcatttccattcgtagccttgttggtatcaggcggacatacccaacttatgcgcgtgtccgcgatcggcgactatgagttgctgggcgacaccctggacgatgccgccggggaagcgttcgacaaaaccgccaagctgctcggcctcagctaccccggcggccccgcggtttcgaggctggcaaaccagggacagcccggtgcctgtcaattgcctcgccccatgctgaacagcggggacctcaatttcagcttcagcggcctcaagacggcggtgctcacactggtcaaccaatatggcgacgcactcgacgaaactgcgcgcgccaatattgcctacgaatttcaggaagccgtcacggaagtactcaccaagaaatgcatggccgccctgcgcaacaccggtttaaatcaattaatcgtctcgggcggagtaggcgccaatgcccggctgcgcgaacgcctcaatatggcagccaagcgcaggcaataccaagtgcattatccgaggctggaattctgtaccgacaatggcgccatgatcgcatttgctggcgccatgcgcatgcaacacgccaagcaaggcaaccacagcttcaccgtgcggccgcgctgggacctggcggaactgaacaagccgtaa

SEQ ID NO: 42299 - protein, 339 aa, Methylobacillus flagellatus KT
MLILGIESSCDETGLALYDTERGLLAHALHSQIDMHAAYGGVVPELASRDHIRRTLPLTQHVLEQAGKSLADLDGIAYTQGPGLSGALLVGTSIAESLAFSLDLPTIGVHHLEGHLLAPLLEPDPPAFPFVALLVSGGHTQLMRVSAIGDYELLGDTLDDAAGEAFDKTAKLLGLSYPGGPAVSRLANQGQPGACQLPRPMLNSGDLNFSFSGLKTAVLTLVNQYGDALDETARANIAYEFQEAVTEVLTKKCMAALRNTGLNQLIVSGGVGANARLRERLNMAAKRRQYQVHYPRLEFCTDNGAMIAFAGAMRMQHAKQGNHSFTVRPRWDLAELNKP

SEQ ID NO: 42300 - DNA, 1008 bp, Methanococcoides burtonii DSM 6242
  CDS (1)..(1008): transl_table=11
ttgacaactgttctcggtatagaaggcacagcctggaatttaagcgcagcaattgttgacgaagatgatgttatcgcagaggtgactgagacatatcggccaaaaaccggaggtattcatccaagggaagctgcgcaacatcatgctttgcatgcatccgatgttattgaaagattgctgaaggaatatagggataagggtcattcccctgaaaatatcgatgctattgcgttttcgcagggcccgggtttgggggcatgtctgaggacggtcgcgacatctgcaagggcactggcattgtcgctggatattccgcttgtgggtgtgaaccactgtatcggacatgttgagataggacgctggaaaacaccggcagttgatcctgtggtgctgtatgtcagtggtgggaactcgcaggtgcttgctcacagggctggaaagtataggatattcggggaaacccttgatatcggcatagggaatgcccttgataaatttgcaaggggtgcagggctgacccatcccggtggtcccaaggtggaagagtatgccagaaaagctacgaattatgtgaaaatgccatatgttgtaaagggtatggatttctcattttcagggctatccacggctgccacagatgcgctgaaggacaattcccttgaagatgtctgttattctttccaggagaatgcttttgcaatgcttgtggaggttacggagcgtgcactggcccatacaggtaagagcgaagtgcttcttgcaggaggggtgggtgcgaacatgcgacttcgtgaaatgcttgatctcatgtgtgaggacagaggtgcgagcttctatgtgcctgaaagacgtttcatgggtgacaatggtgccatgatagcttatacaggtctgttgatgttcaattcagggaccactttaccgattgaaaattctcatgtggacccgagcttcaggccggatactgtcgatgtgacctggatagctgatgaaaaggaggttctgtga

SEQ ID NO: 42301 - protein, 335 aa, Methanococcoides burtonii DSM 6242
MTTVLGIEGTAWNLSAAIVDEDDVIAEVTETYRPKTGGIHPREAAQHHALHASDVIERLLKEYRDKGHSPENIDAIAFSQGPGLGACLRTVATSARALALSLDIPLVGVNHCIGHVEIGRWKTPAVDPVVLYVSGGNSQVLAHRAGKYRIFGETLDIGIGNALDKFARGAGLTHPGGPKVEEYARKATNYVKMPYVVKGMDFSFSGLSTAATDALKDNSLEDVCYSFQENAFAMLVEVTERALAHTGKSEVLLAGGVGANMRLREMLDLMCEDRGASFYVPERRFMGDNGAMIAYTGLLMFNSGTTLPIENSHVDPSFRPDTVDVTWIADEKEVL

SEQ ID NO: 42302 - DNA, 1146 bp, Acidobacteria bacterium Ellin345
  CDS (1)..(1146): transl_table=11
atggccgacgccgtcatcctgggaattgaaagctcgtgcgacgagaccgccgcggctgtgatccgaaacggcgcagaaatcctctccagcgtagtgttctcgcagatctacacgcatatgcggtacggcggcgtggtgccggaactggcctcgcgcgagcacttgaaggctatcgttcccgtggtgcgccaggcggtggaagacgctggacagagctatgacaagattgatgccatcgctgtgacacgcggacccggactggccggagcgctgctggtgggcgtgagttatgcgaaggcgctgtcattcgcgctggataagccgctgatcggcgtgaaccacctggaaggacacattcacgtggtgctgctggaacagaagcagcaaggcgtcggcgaaattcagtttccggtgctggcgctggtggtgagcggcggacacacgcatctttaccttgcagagaagaaggatgcgggatggacgtatcgcgatgtgggacacacgcgcgacgatgcggccggcgaggcctacgacaaagtcgcgaagctgctggggcttggatatcccggggggccgattctcgatggcctggcaaagcatggcgatcccagggcggtgaggtttccgttcgcgcagatcaagcatcgcgaccgcaatccgcagaaccgacatgaggatgacgatgcgcgagtggatttctcgtatagcggtatcaagaccgcggtgctgcgctatgttgaaacgcacgagatgaaggcggcgattgaagcgcggcgaacggcgttgaaggaaatcgagaagccatcgcaggacgattatttgcgggtgtgcgatcggcagacgctcgatctgattgcatcgtttcagcgcgcggtggtgaatgatcttgtctcgaaggcgctgcacgcggctgcggaaaacaatgcagcaacgctcttggtgacgggcggagttgcggcgaattccgagctgcgtgagacgtttgaacgacgtgccggcgaacttgggttgcctgtgtatttcccttcgcgaccgctgtctacggacaacgcggcgatgattgcggcggcggcgtatccgcggtttctgagcggagaatttgcggcgcctgatctgtccgcggaagccaatcttcgcctgcgctaa

SEQ ID NO: 42303 - protein, 381 aa, Acidobacteria bacterium Ellin345
MADAVILGIESSCDETAAAVIRNGAEILSSVVFSQIYTHMRYGGVVPELASREHLKAIVPVVRQAVEDAGQSYDKIDAIAVTRGPGLAGALLVGVSYAKALSFALDKPLIGVNHLEGHIHVVLLEQKQQGVGEIQFPVLALVVSGGHTHLYLAEKKDAGWTYRDVGHTRDDAAGEAYDKVAKLLGLGYPGGPILDGLAKHGDPRAVRFPFAQIKHRDRNPQNRHEDDDARVDFSYSGIKTAVLRYVETHEMKAAIEARRTALKEIEKPSQDDYLRVCDRQTLDLIASFQRAVVNDLVSKALHAAAENNAATLLVTGGVAANSELRETFERRAGELGLPVYFPSRPLSTDNAAMIAAAAYPRFLSGEFAAPDLSAEANLRLR

SEQ ID NO: 42304 - DNA, 996 bp, Myxococcus xanthus DK 1622
  CDS (1)..(996): transl_table=11
ttgctcgtcctaggactggaaacctcgtgtgatgagactgccgccgccgtcgtggaggacggccgccgcgcgttgtcggatgtcgtctccacgcaggtggacatccaccggcggtggggtggggtggtgccggagctggccagccgcaaccacatcgtccaggtgctgcccgtcgtccacgaggcgctgacgcgggcgaacaagacgctcgacgacgtggacctcatcgccgtcacgtccggccccggactcatcggcgcgctgctggtgggagtgcaggtggccaagggcttgagcctggcgacgggcaagcccttcgtgggcgccaaccacctggagggccacctgctggccatccggctgttggaggtggcgccggagccgccgttccttgggctcgtcgtttccggcgggcacaccagcctctacgaggtgcaggcctacgggcagtaccggctggtgggcagcacgcgcgacgacgcggccggcgaggcatatgacaagaccgctcgcatcctcggcctgccgtatccgggtgggcagcccatcgaccagttggcgcagcaggggaacccggaggccatccgcttcccgcgcgcgctgccgggcgacaacttcgacgtgtccttctccgggttgaagacggcggtgctgcaccacgtgcagaagcacggcgtgccgcaggggcaggcgctggcggatttgtgcgcgtccttccaggaggccgtggcggacgtgctgtcgaagaagctggtggccgccgcgcgccggttgggccacaagcagttggtgctgtgcggcggcgtcgccgcgaactcgcggctgcgggcactgtgtcaggcgcgagccgaggagcgggggttgaacatgttcctgcccccggtgcggctgtgcacggacaatggcgccatgattgcggtggcggggtatgaggcgtaccgccgcggcctgcgcggagatttccgcctcgccgccgacccggcctggcgcatgtag

SEQ ID NO: 42305 - protein, 331 aa, Myxococcus xanthus DK 1622
MLVLGLETSCDETAAAVVEDGRRALSDVVSTQVDIHRRWGGVVPELASRNHIVQVLPVVHEALTRANKTLDDVDLIAVTSGPGLIGALLVGVQVAKGLSLATGKPFVGANHLEGHLLAIRLLEVAPEPPFLGLVVSGGHTSLYEVQAYGQYRLVGSTRDDAAGEAYDKTARILGLPYPGGQPIDQLAQQGNPEAIRFPRALPGDNFDVSFSGLKTAVLHHVQKHGVPQGQALADLCASFQEAVADVLSKKLVAAARRLGHKQLVLCGGVAANSRLRALCQARAEERGLNMFLPPVRLCTDNGAMIAVAGYEAYRRGLRGDFRLAADPAWRM

SEQ ID NO: 42306 - DNA, 1029 bp, Haemophilus somnus 129PT
  CDS (1)..(1029): transl_table=11
atgcgtattctaggcatagaaacatcttgtgatgaaacaggcgttgccatttacgatgaaaaaaaaggattgattgccaatcaactgtatactcaaattgctttacatgctgattatggcggtgttgtccctgaattagcgtctcgtgatcatatccgtaaaaccgcaccattaattcaggcggctttacaacaagcgggattagaagcaaaagacattgatggcatagcttacacttgtggaccgggattggtgggtgcacttttagtaggttcaacaattgcacgctcgcttgcctatgcttggaacattaaagctattggtgtacatcatatggaagggcatttacttgcccctatgttagaaaataatcccccaaaatttccttttgtagcgttattagtatccggcggacatacacagcttgttcgtgttaatgctgtagggcaatatgaattactgggagaaagtattgacgatgctgccggtgaagcatttgataaaacggcaaaattattaggattggattaccctggagggagtgcactttcacgtttggcagaaaaagggaatcccgaacgttttttctttcctcgtcctatgacagatcgccccggcttagattttagtttttcagggttaaaaacttttgccgccaatacaattaatcaagcaattaaacaagaaggtgaactcactgaacaaactaaagcagatatcgcctacgcattccaacaagcagtagtagatacgttagcaattaaatgtcgtcgagctttaaaagaaacaggctttaaacgcttagtcattgcaggcggtgtgagtgcaaataaacaattacgtcaatctttagcggatatgatgaaacaattaaaaggagaggtcttttaccctcaacctcaattttgtacagataacggtgcaatgattgcttacgtcggttttttgcgtctaaaacaaggtgaatattcacctttggaaattgacgttaaaccccgctgggcaatgactgaactgaaagcaatttaa

SEQ ID NO: 42307 - protein, 342 aa, Haemophilus somnus 129PT
MRILGIETSCDETGVAIYDEKKGLIANQLYTQIALHADYGGVVPELASRDHIRKTAPLIQAALQQAGLEAKDIDGIAYTCGPGLVGALLVGSTIARSLAYAWNIKAIGVHHMEGHLLAPMLENNPPKFPFVALLVSGGHTQLVRVNAVGQYELLGESIDDAAGEAFDKTAKLLGLDYPGGSALSRLAEKGNPERFFFPRPMTDRPGLDFSFSGLKTFAANTINQAIKQEGELTEQTKADIAYAFQQAVVDTLAIKCRRALKETGFKRLVIAGGVSANKQLRQSLADMMKQLKGEVFYPQPQFCTDNGAMIAYVGFLRLKQGEYSPLEIDVKPRWAMTELKAI

SEQ ID NO: 42308 - DNA, 978 bp, Trichodesmium erythraeum IMS101
  CDS (1)..(978): transl_table=11
atgacaacggttttagctatagaaacaagttgtgatgaaacatctgtggcaattgttaaaaatcgtcaagttttaagtaacattgtgaagtcacaaattaatatccatagcttttatggaggagtagttccagaggtagcttcacgacaacatttagaaataattaatcaggcgatcgctcaagctttcagagaagcaaatttagactggccagacattgatggtattggagctacttgcgcccctggtctagttggcgctctgttagttggcctgacggcggccaaaaccttagctattgtccatgaaaagccctttgtgggagtccatcacttagaaggtcatatttatgcaacctacctaagccaacccgagttagtaccaccttttctttgtttgttagtttctggaggtcataccagtttgatttatgtcaaaaattgtggggaatatgaaactttagggcaaacaagagatgatgcagcaggagaagcttttgacaaagtagctagattattaaaacttggctatcccggtggacctgtaattgataaattagctgcagagggtaataaattagcattttctctccctgaagggaaaatttctttgcctggaggaggctatcatccttatgattttagtttcagtggactcaaaactgcagtattgcgattagtccagaaaatagaacaagaaggtaatgaattattatcagggtcttcagtaactaaagacattgcagccagctttcaagaaactgtagcaaaagggctaacaaaaagagctatcgcttgtgcattagactatagcttaaacacaattgctattggcggtggtgtagcagctaatagtagtttgcgacagcacttaagtagagcagtagaaagtcataacttgcaagtactatttccctcactcagattttgtacggataatgcagccatgataggttgtgtgcggctcgttggccactaa

SEQ ID NO: 42309 - protein, 325 aa, Trichodesmium erythraeum IMS101
MTTVLAIETSCDETSVAIVKNRQVLSNIVKSQINIHSFYGGVVPEVASRQHLEIINQAIAQAFREANLDWPDIDGIGATCAPGLVGALLVGLTAAKTLAIVHEKPFVGVHHLEGHIYATYLSQPELVPPFLCLLVSGGHTSLIYVKNCGEYETLGQTRDDAAGEAFDKVARLLKLGYPGGPVIDKLAAEGNKLAFSLPEGKISLPGGGYHPYDFSFSGLKTAVLRLVQKIEQEGNELLSGSSVTKDIAASFQETVAKGLTKRAIACALDYSLNTIAIGGGVAANSSLRQHLSRAVESHNLQVLFPSLRFCTDNAAMIGCVRLVGH

SEQ ID NO: 42310 - DNA, 1017 bp, Shewanella sp. MR-4
  CDS (1)..(1017): transl_table=11
atgcgggttctaggtattgagacatcttgtgacgagacaggtattgccgtctatgacgataagctggggttactctcccatgctttatatagtcaggttaagttgcatgcggattatggtggggtagtgcctgaactggcttcccgcgaccatgtgcgcaaaattgtcccgctgatccgccaagcgttgaaaaacgccaataccgagattgccgatttagatggcattgcctacaccaaaggccctggccttatcggtgctttattagtgggcgcttgtgttggccgctcacttgcctttgcttggaacaagcccgccatcggtgtgcatcatatggaagggcatctgctggcgccaatgctggaagacgatgcgcctgagtttccctttgttgcactattagtatcaggtggccactctatgttagtaaaggttgatggcatcggcctttatgaagttttaggtgagtcggtggatgatgccgccggtgaagccttcgacaaaaccgctaagctaatggggctggattaccccggcggtccacggcttgcgaaactggccgccaaaggtgagcctgcaggttatcaatttccgcggccaatgaccgatagacccgggctcgattttagcttctcaggcctgaaaacctttaccgccaataccattgccgccgagccagatgatgagcaaacccgcgccaacatcgcccgagcctttgaagaagcggttgtggataccctcgcgataaaatgtcgccgcgcgttaaaacaaacgggctataaccgtttagtgatcgcgggtggcgtgagcgccaacacacgcttacgggaaaccttggccgagatgatgacctctatcggtggccgagtttattatcctcgcggcgagttttgtactgacaacggcgccatgattgctttcgctggcctgcagcgtttaaaggcggggcagcaggaagacttagcggtcaaaggtcaaccgagatggccgctcgataccttaccgccagttgcgtga

SEQ ID NO: 42311 - protein, 338 aa, Shewanella sp. MR-4
MRVLGIETSCDETGIAVYDDKLGLLSHALYSQVKLHADYGGVVPELASRDHVRKIVPLIRQALKNANTEIADLDGIAYTKGPGLIGALLVGACVGRSLAFAWNKPAIGVHHMEGHLLAPMLEDDAPEFPFVALLVSGGHSMLVKVDGIGLYEVLGESVDDAAGEAFDKTAKLMGLDYPGGPRLAKLAAKGEPAGYQFPRPMTDRPGLDFSFSGLKTFTANTIAAEPDDEQTRANIARAFEEAVVDTLAIKCRRALKQTGYNRLVIAGGVSANTRLRETLAEMMTSIGGRVYYPRGEFCTDNGAMIAFAGLQRLKAGQQEDLAVKGQPRWPLDTLPPVA

SEQ ID NO: 42312 - DNA, 1020 bp, Alkalilimnicola ehrlichei MLHE-1
  CDS (1)..(1020): transl_table=11
atgcgcgtacttggtgtggaaagctcctgcgacgagaccggcctggccatctacgacagcgcccagggcctgatggcgcacgccctgcacagtcaggtggccacccacgcggaatacggcggcgtggtgccggagctggcctcccgcgatcatgtccggcgggtggtgccactgacccggcgggtactggccgaggccgggtgccggctgcgggatatcgatgcggtggcctacacccgcggccccggcctggtgggcgcgctgatggtgggcgccggcatggcgcgcagcctggcctgggggctgggggtcccagccctgggcgtacaccacatggaggcccacctgctcgcgcccatgctggagccaaacccgccggccttccccttcgtggccctgctggtctccggcggccacacgctattggtccaggtggcaggcgtgggccgctaccgcgtgctgggcgagaccctggatgacgcagcgggcgaggccttcgacaagaccgccaagctgctcggcctgccctaccctggcggtccggagctggagaaactcgcggagtcgggtgacccggggcgctaccgcttcccccggccgatgaccgaccgccccgggctggatttcagcttcagtgggctcaagacccgggtgctgcagaccgtgcagcagagccgggaggcggaccgggcggacatcgccgcggccttccagtcggcggtggtggataccctggttatcaagtgccggcgggcgctgcgggcgaccggcagccagcggctggtgatctccggcggtgtgggggccaatggtctgttgcgtgagcagatgcgcgccatggcggatcaggcgggggccagcctgcattacccgcggttggcgctgtgtaccgacaacggcgccatggtggcctacaccggctggtgccgcctgagcgagggccagcacgacgatctggacttcagtgtcaccgcccgctggccgctggccgatctgaccccgcccgggcagccggtctga

SEQ ID NO: 42313 - protein, 339 aa, Alkalilimnicola ehrlichei MLHE-1
MRVLGVESSCDETGLAIYDSAQGLMAHALHSQVATHAEYGGVVPELASRDHVRRVVPLTRRVLAEAGCRLRDIDAVAYTRGPGLVGALMVGAGMARSLAWGLGVPALGVHHMEAHLLAPMLEPNPPAFPFVALLVSGGHTLLVQVAGVGRYRVLGETLDDAAGEAFDKTAKLLGLPYPGGPELEKLAESGDPGRYRFPRPMTDRPGLDFSFSGLKTRVLQTVQQSREADRADIAAAFQSAVVDTLVIKCRRALRATGSQRLVISGGVGANGLLREQMRAMADQAGASLHYPRLALCTDNGAMVAYTGWCRLSEGQHDDLDFSVTARWPLADLTPPGQPV

SEQ ID NO: 42314 - DNA, 1098 bp, Hyphomonas neptunium ATCC 15444
  CDS (1)..(1098): transl_table=11
atgcgggcgatgagcaagtccctgacgatcctcggtatcgagacaagctgcgacgagaccgccgccgccgtgctgcgctatgaggatggccgggcaacgctcctgtcagatgtgatccgcacacagctggccgagcacgcgccctatctcggcgtcgtgccggaaatcgccgcccgcgcgcatgccgagctggctgacctgaccgtcgcggccgccatgaatgcctcgggcctctcttatgctgagcttgacggcgtcgccgctacagccggccccggcctcatcggcggcgtgcttgtcgggttgatgaccggcaaggccatcgcccaggccgccggcaagcccttcatcccggtcaaccatctggaaggccacgcgctttccccccgcctcagtgaagactgcccctttccctatctcctgctgcttgtctcgggcgggcattgccagttcctggacgtgcgcggcctgggcgactatcgccgcctcggctcaacaatagatgacgcggtgggcgaagccttcgacaaggtggccaagctcctcggcctcggctttcccggcggcccggcggtggaagccctggcgcgaaacggcgacccgaaggcccacgactttccacgcccgctcctgaaccgccccggtctcgacatgagctttgccggcctcaagaccgccgtggcccgcgcgtccgcaaacgcaaagagcgaagcggaaaaggccgacatctgcgccagcttccaggccgcgatctgtgacgtgctggcggaaaaggcccgccgcgcgctggaagggtttgacgcgggggccggcgacaagcgcttcgtggtcgccgggggcgttgcctcaaacaaggccatccgggccgcgctggagacggccgccaccgcgcagggcgcgcgcctgatcgccccgcccctgcgccactgcaccgataatgccgccatgattgctcttgccggggccgaacatcttgccgctggcctgtgtgaaacagatgggctcgcctcatcggcccggccacgctggccgctcgacgaagcatccgcaaaagcagaccctgtcttcggtgccggccggcgcggcgcgaaagcctga

SEQ ID NO: 42315 - protein, 365 aa, Hyphomonas neptunium ATCC 15444
MRAMSKSLTILGIETSCDETAAAVLRYEDGRATLLSDVIRTQLAEHAPYLGVVPEIAARAHAELADLTVAAAMNASGLSYAELDGVAATAGPGLIGGVLVGLMTGKAIAQAAGKPFIPVNHLEGHALSPRLSEDCPFPYLLLLVSGGHCQFLDVRGLGDYRRLGSTIDDAVGEAFDKVAKLLGLGFPGGPAVEALARNGDPKAHDFPRPLLNRPGLDMSFAGLKTAVARASANAKSEAEKADICASFQAAICDVLAEKARRALEGFDAGAGDKRFVVAGGVASNKAIRAALETAATAQGARLIAPPLRHCTDNAAMIALAGAEHLAAGLCETDGLASSARPRWPLDEASAKADPVFGAGRRGAKA

SEQ ID NO: 42316 - DNA, 1098 bp, Rhizobium leguminosarum bv. viciae 3841
  CDS (1)..(1098): transl_table=11
atggttccctttctgcgcatccttggcatcgaaacgagctgcgacgagaccgccgccgcggtcgtcgagcgcgatgcggaggggcattccaacgtgctgtcggacgtggtgctttcccagctcgacgaacatagcgcctatggcggcgtggtgccagagattgccgcacgcgcccatgtcgaagcgctggacgagctgatcgaggaagcgctgaagcgcgccaatgtgtcgctcaacgatgtcgacgccatcgccgccacgtcggggccggggctgatcggcgggctgctggtggggctgatgaccggcaaggcgatcgccagagccgccggcaagccgctctatgcgatcaaccatctcgaaggccatgcgctgacggcgcggctgacggacgggctgtcctttccctatctgatgctgctcgtctccggcggccatacccagctcatcctggtgcgcggcgttgggcagtacgagcgttggggcacgacgatcgacgatgcgctcggcgaagccttcgacaagacggcaaagttgctcggcctgccctatcccggcgggccggcggtggagcggatggcgcgggacggcaatcccgatcggttcgattttccgcggccgctggtcggcgaggcacggctcgacttctcgttctccggcctgaagacagcggtgcggcaggcggcacaggatatcgcgccgctcagcgatcaggatgtggcggatatctgcgcctcgttccagaaggcggtttcgcggacgctgaaagaccgcatcggccgtggcctgcagcggttcaagacggaattcccagcgactggcgaaaagccggcgctggtcgttgccggcggggtcgccgccaatctcgaactgcgtggcacgctgcaggcgctgtgcaacaagaacggtttccgcttcattgcaccgccgctgcacctctgcaccgacaatgccgtgatgatcgcctgggcgggactggagcggatggcgaccggtgccgcaccggatacgctcgacgtacagccgcgctcgcgctggccgctcgattccaatgcggaaacgctgatcggtttcggaaaacgaggggccaaggcatga

SEQ ID NO: 42317 - protein, 365 aa, Rhizobium leguminosarum bv. viciae 3841
MVPFLRILGIETSCDETAAAVVERDAEGHSNVLSDVVLSQLDEHSAYGGVVPEIAARAHVEALDELIEEALKRANVSLNDVDAIAATSGPGLIGGLLVGLMTGKAIARAAGKPLYAINHLEGHALTARLTDGLSFPYLMLLVSGGHTQLILVRGVGQYERWGTTIDDALGEAFDKTAKLLGLPYPGGPAVERMARDGNPDRFDFPRPLVGEARLDFSFSGLKTAVRQAAQDIAPLSDQDVADICASFQKAVSRTLKDRIGRGLQRFKTEFPATGEKPALVVAGGVAANLELRGTLQALCNKNGFRFIAPPLHLCTDNAVMIAWAGLERMATGAAPDTLDVQPRSRWPLDSNAETLIGFGKRGAKA

SEQ ID NO: 42318 - DNA, 1062 bp, Magnetococcus sp. MC-1
  CDS (1)..(1062): transl_table=11
atgttacgggttttaggcatagagagcagttgcgacgagaccgccgccgctgtggtggaaggggcagaacatggtcacccccatggggtggtggtgcgctccaatgtggtgtggagccagttggaggtacacgccctctacggcggggtggtgcccgaactggccagccgggcccacatacgccatatacagccggtgattgagcaggctttggctgaggctggggtgcgaccccagcagttggatgccattgcggttacggtggctcccgggttggtgggcgcactgctggtgggggtagcggcggcgcaggggttggcggtggcgctggataagccgctggtgccggtacaccacatggaagggcacctgatgagcccttttctcatggcgggcgtggtacctgccatggagttcccctttgtggccttactggtctccggtgggcacaccctgttgctgcacgcccgtgattttggcgactaccagctgctggggcagacccgtgacgatgcggtgggggaggcgtttgacaagggggcgcgcatgctgggcttggggtatcccggtggtccagaggtcgccgccttggcccagtcgggggatcggcaggcggtggcttttccccgtgtgttgctggaccgcagccaatttgatttctccttttctggcctaaaaaccgccttgcgtacccatcttcttaaattcccgccggagtccggtggtccctctttggccgatgtggccgccagttatcaagaggccattgtggataccctggtgattaaatccttgagcgcctgccgccatgtgggggtgtcgcgtttggtgattgccggtggagtaggggccaatagacgattgcgggaaaaattggccaaacaagctcttaaacagggtgtgcaactctacgctccccccatccacctgtgtactgataatggcgcgatgatcgcctctgccggcgtgtgccgcttggccaggggggatcaagcgcggggggtggtgaatgcggtgccccggctgccgattcatgaactggagaaaatttatggccgttga

SEQ ID NO: 42319 - protein, 353 aa, Magnetococcus sp. MC-1
MLRVLGIESSCDETAAAVVEGAEHGHPHGVVVRSNVVWSQLEVHALYGGVVPELASRAHIRHIQPVIEQALAEAGVRPQQLDAIAVTVAPGLVGALLVGVAAAQGLAVALDKPLVPVHHMEGHLMSPFLMAGVVPAMEFPFVALLVSGGHTLLLHARDFGDYQLLGQTRDDAVGEAFDKGARMLGLGYPGGPEVAALAQSGDRQAVAFPRVLLDRSQFDFSFSGLKTALRTHLLKFPPESGGPSLADVAASYQEAIVDTLVIKSLSACRHVGVSRLVIAGGVGANRRLREKLAKQALKQGVQLYAPPIHLCTDNGAMIASAGVCRLARGDQARGVVNAVPRLPIHELEKIYGR

SEQ ID NO: 42320 - DNA, 1047 bp, Nocardioides sp. JS614
  CDS (1)..(1047): transl_table=11
gtgagcagcgaacccctggtcctcggcatcgagacctcgtgcgacgagaccggtgtcggcatcgtccgtgggcacaccctgctcgcggacgcggtggcgagcagcgtcgacgagcacgcccgcttcggcggggtggtgcccgaggtcgcgagtcgcgcccacctcgaggcgatggtgccgaccatcgaacgggcctgcgagacggccggcatccgcctgtacgacgtcgacgcgatcgcggtcaccagcggaccggggttggccggggcgttgatggtgggggtagccgccgcgaaggcgctcgcggtcggcctcggcaagccgatctacggcgtgaaccacctcgcggcgcacgttgccgtcgaccagctcgagcacggcccgctgcccgagccctgcctcgcgctgctggtcagcggcggccactccagcctgctgcgggtcgaggacgtcacctccggggtggacccgatgggggcgaccatcgacgacgccgccggcgaggccttcgacaaggtggcccggctgctcggcctgccgttccccggtggcccctacatcgaccgtgcggcccgcgagggcagcaccgtgtacgtcgacttcccgcgcggcctgaccagccgccgcgacctcgagcggcaccgcttcgacttctcgttctcgggcctcaagaccgcggtcgcgcggtgggtcgaggcacgggagcggtccggcgagccggtgccggtggccgacgtggcggcgagcttccaggaggcggtctgcgacgtgctgacccgcaaggcgatcgacgcggcgtccagtgcgggcatcgaggacctcctcatcggcggtggggtcgccgcgaactcccggctgcgcgtgctggcggaggagcgcgccgcggcgcgggggatccgggtccgggtgccccgtcccggcctgtgcaccgacaacggcgccatggtcgccgctctgggcgccgagatggtcgcccgcggccgcaccccgtcccccctggacctccccgccgactcctcgctccccgtgaccgaggttctcgtctga

SEQ ID NO: 42321 - protein, 348 aa, Nocardioides sp. JS614
MSSEPLVLGIETSCDETGVGIVRGHTLLADAVASSVDEHARFGGVVPEVASRAHLEAMVPTIERACETAGIRLYDVDAIAVTSGPGLAGALMVGVAAAKALAVGLGKPIYGVNHLAAHVAVDQLEHGPLPEPCLALLVSGGHSSLLRVEDVTSGVDPMGATIDDAAGEAFDKVARLLGLPFPGGPYIDRAAREGSTVYVDFPRGLTSRRDLERHRFDFSFSGLKTAVARWVEARERSGEPVPVADVAASFQEAVCDVLTRKAIDAASSAGIEDLLIGGGVAANSRLRVLAEERAAARGIRVRVPRPGLCTDNGAMVAALGAEMVARGRTPSPLDLPADSSLPVTEVLV

SEQ ID NO: 42322 - DNA, 1032 bp, Azoarcus sp. BH72
  CDS (1)..(1032): transl_table=11
atgaaagtactgggtatcgaaacgtcgtgcgacgaaacaggggtcgccatctacgatggaagcgtgcggcgcttgctggggcactgcctgcactcccagatcgatctgcacgccgcgtacgggggcgtggtcccggaactcgcgtcgcgcgaccacatccggcgcttgccgctcctgctgaaacagctctttggcgaaacgggactttcccgccgcgatatcgacgcagtggcctacaccgcggggccggggcttgccggtgcgctgctcacgggagccagcttcgcggaggcgtttgccctcgcggctggcgtgccggcactgccaattcatcacctggaggggcacctgttgtcgccgctgctggcggatgacgcgccccgcttcccttttgtcgcgctgctggtatccggcggccatacccagttgatgcatgttgccggggtcgggcgctacgagctgctcggcgagtcgctcgacgatgcggcgggcgaagccttcgacaagaccgcgaaactgttgggcctgggctatcccggcgggccgcaactgtccgcgcttgctgcgcagggctgcgccggtcgtttcaagttgcctcgtcccatgctgcattcgggcgatttcgatttcagcttcagcgggctgaagaccgccgtgttgaaccgggtgagcagcgacgactgggagccggggctggcagcggatctggcggctgacttccaggaggcggtggtcgaggtgctgtgtgccaaggcgctggcggcgctcaagcacaccgggctcgacactctggttgtcgccggcggagtaggggccaaccgacgcttgcgcgaacgccttgataatctcgccgcacgacggcggtatcgggtgtgttatccggagcccgcgctgtgtaccgacaacggcgcaatgattgcgtttgcgggcgcgttgcggctggaggccggcgagcgtcgagcggccgcgccggcggtgcgggtgcggccgcgctggccgctggtcgaactggacgccccaggctgcccctga

SEQ ID NO: 42323 - protein, 343 aa, Azoarcus sp. BH72
MKVLGIETSCDETGVAIYDGSVRRLLGHCLHSQIDLHAAYGGVVPELASRDHIRRLPLLLKQLFGETGLSRRDIDAVAYTAGPGLAGALLTGASFAEAFALAAGVPALPIHHLEGHLLSPLLADDAPRFPFVALLVSGGHTQLMHVAGVGRYELLGESLDDAAGEAFDKTAKLLGLGYPGGPQLSALAAQGCAGRFKLPRPMLHSGDFDFSFSGLKTAVLNRVSSDDWEPGLAADLAADFQEAVVEVLCAKALAALKHTGLDTLVVAGGVGANRRLRERLDNLAARRRYRVCYPEPALCTDNGAMIAFAGALRLEAGERRAAAPAVRVRPRWPLVELDAPGCP

SEQ ID NO: 42324 - DNA, 1104 bp, Acidovorax sp. JS42
  CDS (1)..(1104): transl_table=11
gtgcgattgcccccggcccggcgggcgcggggggcggccactacactcgcgggcatgagtcagctgatcctcggtatcgaatcttcctgtgacgaaaccggcgtggccctggtgcgcgccggcgagggcggcgccgtgcccgtgctgctggcgcatgcgctgcacagccagatcgacatgcaccaggcctatggcggcgtggtgcccgagctggccagccgcgaccacatccgccgcgtgctgccgctgacccgcgaggtgctgcgcgaatcgggcgagcgcctggaggatgtggacgtggtggcctacacgcgcgggccgggcctggcgggtgcgctgctggtgggcgcgggcgtggcctgcgcgctgggcgcagcgctggacaagcccgtgctgggcgtgcaccacctcgaaggccatctgctgtcgccgttcctgagcagcgacccgccggagtttccgttcgtcgcgctgctggtgtcgggcgggcacacgcagctcatgcgcgtggagggcgtggggcgctacgagatcctgggcgagaccatcgacgacgcggcgggcgaggccttcgacaagtcggccaagctcatgggcctgggctaccccggcgggccggcgctgtcgcgcctggccgagcagggcagcgccaccgcgttcaaactgccgcgcccgctgctgcacagcggcgacctggacttctcgttcgcaggcctcaagaccgccgtgctgacccaggccaagaagctgggcgacgagctgaccgcgcgcaaggccgacctggccgcgagcaccgaggccgccatcgtggaggtgctggtcaagaagacgctggccgcccttcagaaaacagggctccagcgcgtggtggtggccggcggcgtgggcgccaaccggcatctgcgcgcgcaacttaacgcggcctgcgcgcgagccaaggtgcgtgtgcactaccccgagttgcacctgtgtaccgacaacggcgccatgatcgccatggccgcggccatgcgcctgcaggccgggcagcagcagcccaaccgcgattacgccttcgacgtgaagccgcgctggccgctggacgccatcacgctcgcggcctga

SEQ ID NO: 42325 - protein, 367 aa, Acidovorax sp. JS42
MRLPPARRARGAATTLAGMSQLILGIESSCDETGVALVRAGEGGAVPVLLAHALHSQIDMHQAYGGVVPELASRDHIRRVLPLTREVLRESGERLEDVDVVAYTRGPGLAGALLVGAGVACALGAALDKPVLGVHHLEGHLLSPFLSSDPPEFPFVALLVSGGHTQLMRVEGVGRYEILGETIDDAAGEAFDKSAKLMGLGYPGGPALSRLAEQGSATAFKLPRPLLHSGDLDFSFAGLKTAVLTQAKKLGDELTARKADLAASTEAAIVEVLVKKTLAALQKTGLQRVVVAGGVGANRHLRAQLNAACARAKVRVHYPELHLCTDNGAMIAMAAAMRLQAGQQQPNRDYAFDVKPRWPLDAITLAA

SEQ ID NO: 42326 - DNA, 1029 bp, Haemophilus somnus 2336
  CDS (1)..(1029): transl_table=11
atgcgtattctaggcatagaaacatcttgtgatgaaacaggcgttgccatttacgatgaagaaaaaggattgattgccaatcaactgtatactcaaattgctttacatgctgattatggcggtgttgtccctgaattagcgtctcgtgatcatatccgtaaaaccgcaccattaattcaggcggctttacaacaagcgggattagaagcaaaagacattgatggcatagcttacacttgtggaccgggattggtgggtgcacttttagtaggttcaacaattgcacgctcgcttgcctatgcttggaacattaaagctattggtgtacatcatatggaagggcatttacttgcccctatgttagaaaataatcccccaaaatttcctttcgtagcgttattagtatccggcggacatacacagcttgttcgtgttaatgctgtagggcaatatgaattactgggagaaagtattgacgatgctgccggtgaagcatttgataaaacggcaaaattattaggattggattaccctggagggagtgtactttcacgtttggcagaacaggggaatcccgaacgttttttctttcctcgtcctatgacagatcgccccggcttagattttagtttttcaggtttaaaaacttttgccgccaatacaattaatcaagcaattaaacaagaaggtgaactcactgaacaaactaaagcagatatcgcctacgcattccaacaagcagtagtagatacgttagcaattaaatgtcgtcgagctttaaaagaaacaggctttaaacgcttagtcattgcaggcggtgtgagtgcaaataaacaattacgtcaatctttagcggatatgatgaaacaattaaaaggagaggtcttttaccctcaacctcaattttgtacagataacggtgcaatgattgcttacgtcggttttttgcgtctaaaacaaggtgaatattcacctttggaaattgacgttaaaccccgctgggcaatgactgaactgaaagcaatttaa

SEQ ID NO: 42327 - protein, 342 aa, Haemophilus somnus 2336
MRILGIETSCDETGVAIYDEEKGLIANQLYTQIALHADYGGVVPELASRDHIRKTAPLIQAALQQAGLEAKDIDGIAYTCGPGLVGALLVGSTIARSLAYAWNIKAIGVHHMEGHLLAPMLENNPPKFPFVALLVSGGHTQLVRVNAVGQYELLGESIDDAAGEAFDKTAKLLGLDYPGGSVLSRLAEQGNPERFFFPRPMTDRPGLDFSFSGLKTFAANTINQAIKQEGELTEQTKADIAYAFQQAVVDTLAIKCRRALKETGFKRLVIAGGVSANKQLRQSLADMMKQLKGEVFYPQPQFCTDNGAMIAYVGFLRLKQGEYSPLEIDVKPRWAMTELKAI

SEQ ID NO: 42328 - DNA, 1026 bp, Fusobacterium nucleatum subsp. vincentii ATCC 49256
  CDS (1)..(1026): transl_table=11
atgattattttaggtatagaaagttcatgtgatgaaacttctattgcagttgtaaaggatgggaaagagattttatcaaacaatatttcttctcagattgaaattcataaagaatatggtggagttgttccagaaattgcttcaaggcaacatattaaaaatatagccactgtacttgaagaaagtttagaagaagcaaaaatcaccttagatgatgtggattatatagcagtaacttatgccccaggattaattggggctttacttgtgggaatttcatttgcaaaaggtttatcttatgcaaaaaatattcctattattccagttcatcatattaagggacatatgtatgcaaattttttggaacataatgtagaattaccttgtatttctcttgttgtatctggtggacatactaatattatatatatagataaagatcataattttattaatattggagaaaccttagatgatgcagtcggagaaagctgtgataaggttgcaagagttttaggacttggatatcctgggggacctgtaatagataagatgtattataaaggagatagaaattttctaaaaattactaaaccgaaagtttcaagatttgattttagtttttcaggaataaaaacagctattataaattttgataataatatgaaaatgaaaaatcaagaatataagaaagaagatttagcagcttcatttttaggaactgttgtggatattctatgtgataaaactttggatgcagcagttgaaaaagatgtaaaaactattatgcttgcaggtggtgttgcagctaattcacttttaagaagtcaacttacagaaaaagcaactgaaaaaggaattaaagttatatatccaagtatgaaactatgcacggataatgcagctatgatagcagaggcagcatattataagctaaaaaatactaaaaataaagaagattgttttgcaggtttagacttaaatggtgttgcaagtttaatggttagtgatgaaaaagctatataa

SEQ ID NO: 42329 - protein, 341 aa, Fusobacterium nucleatum subsp. vincentii ATCC 49256
MIILGIESSCDETSIAVVKDGKEILSNNISSQIEIHKEYGGVVPEIASRQHIKNIATVLEESLEEAKITLDDVDYIAVTYAPGLIGALLVGISFAKGLSYAKNIPIIPVHHIKGHMYANFLEHNVELPCISLVVSGGHTNIIYIDKDHNFINIGETLDDAVGESCDKVARVLGLGYPGGPVIDKMYYKGDRNFLKITKPKVSRFDFSFSGIKTAIINFDNNMKMKNQEYKKEDLAASFLGTVVDILCDKTLDAAVEKDVKTIMLAGGVAANSLLRSQLTEKATEKGIKVIYPSMKLCTDNAAMIAEAAYYKLKNTKNKEDCFAGLDLNGVASLMVSDEKAI

SEQ ID NO: 42330 - DNA, 1029 bp, Haemophilus influenzae R2866
  CDS (1)..(1029): transl_table=11
atgaaaatcttaggcattgaaacttcctgtgatgaaacgggcgtggcgatttatgatgaagaaaaagggttaattgctaatcaactttatactcaaattgccctgcatgcagattatggtggtgtggttcctgaattagcatcacgcgatcatattcggaaaacagcgcctcttattaaagcggcattagaagaagctaagttaacggcgagcgatattgatggtgttgcttatacgagtggccctgggcttgttggcgcattgcttgttggtgctacgattgcacgttctttagcctatgcttggaatgttcctgcgattggcgttcatcatatggaaggacatttacttgcaccaatgcttgatgaaaattcaccgcactttccttttgttgctctgttggtatcgggtggccatactcaattagtgcgtgtcgatggtgtaggaaaatatgaagtgataggagaatctattgatgatgctgctggcgaagcctttgataaaacagcaaaattacttggattagattatccgggcggcgcggcactttctcgtttagcggaaaaaggcacgccaaatcgctttatatttccacgcccaatgacagatcgtgcaggtcttgattttagtttttctggtttaaaaacatttgccgcgaatacagttaatcaagcaattaaaaacgagggcgaactgacagaacaaactaaatcggatattgcttatgctttccaagatgcggtggtggatactcttgccattaaatgtaagcgtgcattgaaagaaacaggctataaacgtttagtgattgcgggaggggtgagcgcaaataaaaaactccgagaaacgcttgcgcacttaatgcaaaatttaggtggcgaagtgttttatcctcaacctcaattttgtacagataatggcgcaatgattgcttacacaggttttttacgtttaaaacaaggtcagcatagcgatctggctattgatgttaaacctcgttgggcaatggcggaattaccggcaatttag

SEQ ID NO: 42331 - protein, 342 aa, Haemophilus influenzae R2866
MKILGIETSCDETGVAIYDEEKGLIANQLYTQIALHADYGGVVPELASRDHIRKTAPLIKAALEEAKLTASDIDGVAYTSGPGLVGALLVGATIARSLAYAWNVPAIGVHHMEGHLLAPMLDENSPHFPFVALLVSGGHTQLVRVDGVGKYEVIGESIDDAAGEAFDKTAKLLGLDYPGGAALSRLAEKGTPNRFIFPRPMTDRAGLDFSFSGLKTFAANTVNQAIKNEGELTEQTKSDIAYAFQDAVVDTLAIKCKRALKETGYKRLVIAGGVSANKKLRETLAHLMQNLGGEVFYPQPQFCTDNGAMIAYTGFLRLKQGQHSDLAIDVKPRWAMAELPAI

SEQ ID NO: 42332 - DNA, 1035 bp, Magnetospirillum magnetotacticum MS-1
  CDS (1)..(1035): transl_table=11
ttgggcatcgaaagctcctgtgacgaaaccgccgccgcattggtcaacgaccatcgcgagatcctgggcgaggtggtcttgtcgcaactggacgagcaccgcccctttggcggtgtggtgccggaaatcgccgcgcgctcccatctcacccatctggaccggctggtggccgaggccatgcgccgggccggtgcgggctttgccgatctcgacgcggtggcggccaccggcggccccggcctgatcggcggcgtcatggtgggcgtgatgaccggcaaggccattgcgctggcctcgggcaagccctttctggccatcaaccatctggaaggccatgcgctgacggcgcgtctcacccacgacatcgcctttccctatctgctgctgctggcctcgggcgggcattgccagttgctggcggtggaaggggtgggtcaatacacccgtctcggcaccaccatcgacgacgcggcgggcgaggcctttgacaagctggccaagatggccgcgctcggctatcccggcggtccggcggtggaagccgcggccgccggtggcgatccggcccgctttaccctgccccggcccctgaagggcaagcccggctgtgatttcagcttttcaggcctgaagaatgccgcccgcctgctgatcgaaagcctgccccagccgctttcggcgcaagatcaggccgacgtggcccgcgcctttcaggacgcggtggccgattccatggccgaccgggtgcgccggggcgtgcgcgagatgaagacccgctggcctgctacccgccatctggtggtggcgggcggtgtcgccgccaatacggcgctgcgccagatcctggttcggatcggagccgaaacggggcttgaatttcttgctccgccgctgaagctgtgcaccgacaatgccgccatgatcgcctgggcggggatcgagcgtctgcgcctgggccaatgcgacgatctttccttcgcgccgcgtccgcgctggcccctggatcccaatgcgcgtaagggagccaaggcgtga

SEQ ID NO: 42333 - protein, 344 aa, Magnetospirillum magnetotacticum MS-1
MGIESSCDETAAALVNDHREILGEVVLSQLDEHRPFGGVVPEIAARSHLTHLDRLVAEAMRRAGAGFADLDAVAATGGPGLIGGVMVGVMTGKAIALASGKPFLAINHLEGHALTARLTHDIAFPYLLLLASGGHCQLLAVEGVGQYTRLGTTIDDAAGEAFDKLAKMAALGYPGGPAVEAAAAGGDPARFTLPRPLKGKPGCDFSFSGLKNAARLLIESLPQPLSAQDQADVARAFQDAVADSMADRVRRGVREMKTRWPATRHLVVAGGVAANTALRQILVRIGAETGLEFLAPPLKLCTDNAAMIAWAGIERLRLGQCDDLSFAPRPRWPLDPNARKGAKA

SEQ ID NO: 42334 - DNA, 1023 bp, Listeria monocytogenes str. 4b H7858
  CDS (1)..(1023): transl_table=11
atgaaaaaaaatacattaattcttggaatagaatctagctgcgatgaaacagctgcttctgttgtaaaaaatggcaatgaaattatatcgagtgtggtggcttctcaaattgagagccataaacgatttggcggggtagttcctgaaatcgcatcaagacatcatgtggagcaaattacgcttgtgattgaagaagctttaaaacaagcaaatgtgacgatggatgatttagacgggatagctgtgacagaaggtccaggtctagttggtgcgctgcttatcggtgtgaatgcggctaaaacgctcgcttttatgcacaatttacctttagttggcgtgcatcatattgctggccatatttatgcaaattgttttgaaactgaattcaaatttccgctactttcattagttgtcagcggcggtcatactgaactagttttaatgaaagcagataatgagtttgaaattatcggggagacaagggacgatgcagctggtgaagcttatgataaagtggcacgtacacttggtctcgcatacccaggcggcgtgcaaattgataaacttgccaaagacggcgaagatacgtttcatttcccaagagcgatgatggatgagggttcgtttgattttagttttagtggattgaagtcttcctttattaacacgcttcataatttaaggcagcgtggtgaggagccaaatccaaacgatatggcggcgagttttcaagcaagcgttgtggatgttttagtaagcaaaacgattcgtgctgctaaacaatacgatgtgaaacaactgcttcttgcgggaggcgtggcagcgaaccaaggtttacgagaacgccttattcaagaagtaaaactagagcttccagagacagaactgattattccaccattagccttatgcggagacaatgcggcaatgattgctgctgcagggactgtgagtttcttacaaggaaaacgtagtggttttgatatgaatgcgaatccgggattattgctggaagatatataa

SEQ ID NO: 42335 - protein, 340 aa, Listeria monocytogenes str. 4b H7858
MKKNTLILGIESSCDETAASVVKNGNEIISSVVASQIESHKRFGGVVPEIASRHHVEQITLVIEEALKQANVTMDDLDGIAVTEGPGLVGALLIGVNAAKTLAFMHNLPLVGVHHIAGHIYANCFETEFKFPLLSLVVSGGHTELVLMKADNEFEIIGETRDDAAGEAYDKVARTLGLAYPGGVQIDKLAKDGEDTFHFPRAMMDEGSFDFSFSGLKSSFINTLHNLRQRGEEPNPNDMAASFQASVVDVLVSKTIRAAKQYDVKQLLLAGGVAANQGLRERLIQEVKLELPETELIIPPLALCGDNAAMIAAAGTVSFLQGKRSGFDMNANPGLLLEDI

SEQ ID NO: 42336 - DNA, 1008 bp, Wolbachia endosymbiont of Drosophila simulans
  CDS (1)..(1008): transl_table=11
atgaaaaccattttagctgttgaaacaagctgcgacgaaactgcagtagcgattgtaaatagtgacaagcaagtccttgctcacgaaattctctcccaagcagaacacaaaaaacgtggtggggtgatccctgaaatagcttcacgtgctcatatggagcatttaagtggtctaataaaaagcgccgtggaaaaatctaaccttaacttttgtgacctcaatgcaattgcagcaacatcaggaccaggactcataggtggattaatagttggtacaatgatggctaaagcaattgcgcatgtagcacaaaaaccattcattgcagtgaatcacttagaagcgcatgcattggttattaggttactgcatgaggtaaaatttccatttttagtcctactaatatcaggtggtcactgtcaatttttaattgcacaggatgtaggtaaatacattaaacttggagaaacgctcgatgattcactaggagaagcatttgataaagttgctaagatgctgggtttaagctatcccggagggccattaattgaaaagttagctaaaaaaggcaatggtgcaagatttaaattgccaagggcaatgataaaacgttatggatgtaacttttcgttttctggaattaaaacagcagtaaaaaacttagtgcaagaacttaaaatgagcgagcaagatgtgtgtgatgtatgtgcttcgtttcaagagtgtattagtgacatactgctggacagggttagtaatgcgattattatggccgaatctttaaatatcaaaatcaatgactttgtgattaccggcggagttgcagcaaataatttcttgagagaaaaattaaaacaacacataaacttaaacatattttttccccctaacgacctatgtacagacaatgcaattatggttggatggacaggaattgaaaggttacagaaaaattatatagatccacttaattttgcaccaagacctaagtgggagttagagagttattaa

SEQ ID NO: 42337 - protein, 335 aa, Wolbachia endosymbiont of Drosophila simulans
MKTILAVETSCDETAVAIVNSDKQVLAHEILSQAEHKKRGGVIPEIASRAHMEHLSGLIKSAVEKSNLNFCDLNAIAATSGPGLIGGLIVGTMMAKAIAHVAQKPFIAVNHLEAHALVIRLLHEVKFPFLVLLISGGHCQFLIAQDVGKYIKLGETLDDSLGEAFDKVAKMLGLSYPGGPLIEKLAKKGNGARFKLPRAMIKRYGCNFSFSGIKTAVKNLVQELKMSEQDVCDVCASFQECISDILLDRVSNAIIMAESLNIKINDFVITGGVAANNFLREKLKQHINLNIFFPPNDLCTDNAIMVGWTGIERLQKNYIDPLNFAPRPKWELESY

SEQ ID NO: 42338 - DNA, 1047 bp, Crocosphaera watsonii WH 8501
  CDS (1)..(1047): transl_table=11
atgaagacgatattagccattgaaacaagttgtgatgaaaccgccgttgctattgttaatgagcagaagatttatagtagtattgttgcctctcaaattgacttacataaacgttatggtggggtggttccggaagaagcatctcgtcaacatcttttaaccattaacccctgtgttgaagaagcgttacaagtagcaaaattaacttggaatgatatcgatggcatcgctgcaacggttgcaccaggattaattggagctttaatggtaggagaaacagcagggaaaaccttagccatgattcatcaaaaaccattcttaggaattcatcatttagaaggtcatatttatgcaacttatctgagtcaacccgattggaaaccgccctttttatgtttattagtatccgggggtcataccagtctcattcatgttaaagattgtggtatttatgaacaactaggaaatactcatgacgatgcagcaggagaagcttttgataaagtagccagattattaaatttaggctatccagggggaccagttattgataaattagccactcgaggcaacccgaaaaggtttagtttaccagagggcaaaatctctttaccccaagggggttatcatccctacgacttcagttttagtggtttaaaaacagcagttttacgattagtagaaaagctcaaacaagaaaattctgaatccttacccattgcagatttagcggcgagttttcaagaaaccgttgcccgttccttaaccaaaaaaactattacttgcgctttagatcataacctcactcatattgccgttggtggtggggtagctgccaatagtggtttgagagatcatcttcaagaagcagcgaagaaacataatttaacagtccatttcccccccctcaaactttgcaccgataacgctgccatgataggttgtgcagcctgtgatcacctgaaaagaggtcatatttcctcctggaatttaggggtacaatctcgtttaccaattactgatgtcatgactttatatttaggttag

SEQ ID NO: 42339 - protein, 348 aa, Crocosphaera watsonii WH 8501
MKTILAIETSCDETAVAIVNEQKIYSSIVASQIDLHKRYGGVVPEEASRQHLLTINPCVEEALQVAKLTWNDIDGIAATVAPGLIGALMVGETAGKTLAMIHQKPFLGIHHLEGHIYATYLSQPDWKPPFLCLLVSGGHTSLIHVKDCGIYEQLGNTHDDAAGEAFDKVARLLNLGYPGGPVIDKLATRGNPKRFSLPEGKISLPQGGYHPYDFSFSGLKTAVLRLVEKLKQENSESLPIADLAASFQETVARSLTKKTITCALDHNLTHIAVGGGVAANSGLRDHLQEAAKKHNLTVHFPPLKLCTDNAAMIGCAACDHLKRGHISSWNLGVQSRLPITDVMTLYLG

SEQ ID NO: 42340 - DNA, 1008 bp, Exiguobacterium sibiricum 255-15
  CDS (1)..(1008): transl_table=11
atgacacagccgttgatattagcgattgaatcaagttgtgacgagacagctgcggctgtcgtccgcggagggacagacgtcttatcgaacgtcgtatcctctcaaattgaaagccacaaacgttttggaggagtagttccggaagtcgcgtcccgtcatcacgtggaacggatcacgtatgtcatcgatgacgcgttaacggaagccggtgtcagaatcgatgagatcgatgcgattgccgtgacggaaggtccgggacttgtcggagcgttactcgtcggtgtcagtgcggcaaaagcattggcatttgcccacggtaagccacttcttggtgtccaccacatcgccggtcacatctatgccaaccgtttggaacaagaacttcgctttccactcgtctgtttgattgcatccggcggacacacggaactgatttacatgccggaagacggcgtgtatgaagtcatcggtgaaacgcgcgatgatgcagcgggcgaagcctatgataaagtagcacggaccttgaaacttccttatccgggtggtccgcggattgatcaattggcgcaaaccggtcaggatacattccatttcccacgaatttggctcgaaaaagagtcgtatgacttcagcttcagcggactcaaatcgtctgtcatcaatgccgttcataacgcggaacaacgcggcgaagtcatcattccggaagacctggctgccagttttcaggcaagcgtcgtcgaagtgctcgtcacaaaagcgatccgtgccgtcaaagaaaagggcggcaaacagttgcttattgcgggtggcgtcgcggccaaccgcggactgcgggcaggattgacggaagcctgttcacgtgaaggcatcgaactggtcattccgccgatgcacttatgcggtgataatgccgcgatgattggagcggcagcgattcacccttaccgggcaggccgccaatcgacacttgccatgaatgccgaacctgggctagatttaaagtaa

SEQ ID NO: 42341 - protein, 335 aa, Exiguobacterium sibiricum 255-15
MTQPLILAIESSCDETAAAVVRGGTDVLSNVVSSQIESHKRFGGVVPEVASRHHVERITYVIDDALTEAGVRIDEIDAIAVTEGPGLVGALLVGVSAAKALAFAHGKPLLGVHHIAGHIYANRLEQELRFPLVCLIASGGHTELIYMPEDGVYEVIGETRDDAAGEAYDKVARTLKLPYPGGPRIDQLAQTGQDTFHFPRIWLEKESYDFSFSGLKSSVINAVHNAEQRGEVIIPEDLAASFQASVVEVLVTKAIRAVKEKGGKQLLIAGGVAANRGLRAGLTEACSREGIELVIPPMHLCGDNAAMIGAAAIHPYRAGRQSTLAMNAEPGLDLK

SEQ ID NO: 42342 - DNA, 1047 bp, Xylella fastidiosa Ann-1
  CDS (1)..(1047): transl_table=11
gtgaaaatcatcggtattgagtcttcatgtgatgaaactggcgttgcggtgtatgacactgcgctctctggttctgctgcgttacgtgcgcattctgtctatagccaggttgcgttgcatgccgaatacggtggtgtggtgccggagttggcaagtcgtgatcatgtacgcaagttgctgccattgctacgtcagacgctggctgaggccaagctttctgttgaggagttggatggagtggcctacacggccggaccgggtcttgttggtgcgctgttggtcggtgcaggggtggcacgtgcattggcttgggcacttgaggtgccggcgattggggtacatcacatggaaggtcatttgttgtcaccgttgctggaggatgatccacctgaggtgccgtttgtggcgttgctggtctcgggtgggcatacccagttgtttgcagtcgatgcgattggtgattaccggttgcttggtgaaacgttggacgatgcggctggcgaggcgtttgacaaggttgccaagttgatgggcctgccgtatccgggagggcctcagttggctgcgttggctgaacggggtattccaggtcgattctgtttcactcgtccgatggttgatcgtcctgggttggatttcagcttttcgggattaaaaactcaggtattgttagcgtggcgcaacagtgatcagtctgatgcgattcgcgtcgatgttgcacgcggttttgaggatgctgtggttgatactctggcgatcaaatgtgaacgtgccttggatacggtggcttgtcagacgctggtagttgctggcggtgtcggtgccaacaagtgcttgcgtgcacgattacaggcaatgtgcaggcaacgtggtgggcgtgcttgttttccgcgtccagcattgtgtacggataacggtgcgatgatcgcttttgccggggcgttgcgtttgcaggcgggtcagcagagtgatgttgcggtgcgtgtaacgccgcgttgggatatggctgcgttgccaccgttggtctcgcggtcgtgccgccgatga

SEQ ID NO: 42343 - protein, 348 aa, Xylella fastidiosa Ann-1
MKIIGIESSCDETGVAVYDTALSGSAALRAHSVYSQVALHAEYGGVVPELASRDHVRKLLPLLRQTLAEAKLSVEELDGVAYTAGPGLVGALLVGAGVARALAWALEVPAIGVHHMEGHLLSPLLEDDPPEVPFVALLVSGGHTQLFAVDAIGDYRLLGETLDDAAGEAFDKVAKLMGLPYPGGPQLAALAERGIPGRFCFTRPMVDRPGLDFSFSGLKTQVLLAWRNSDQSDAIRVDVARGFEDAVVDTLAIKCERALDTVACQTLVVAGGVGANKCLRARLQAMCRQRGGRACFPRPALCTDNGAMIAFAGALRLQAGQQSDVAVRVTPRWDMAALPPLVSRSCRR

SEQ ID NO: 42344 - DNA, 1086 bp, Sulfitobacter sp. EE-36
  CDS (1)..(1086): transl_table=11
atgttacttcttggattggaaagcagctgcgatgataccgccgccgcactggtgcgtcagctgccggggcaacgcgccctcgtgctgtcctctgtcgttgtggggcagaccgagcttcatgcctctttcggcggtgtcgtccctgaaatcgcggcccgcgcccacgcggaaaagctggacctttgcgtcgaaaaggcgctggccgaggccgcgctgaccttggcggatgttgacggtttcgccgtgaccgcgggaccggggcttatcggcggcgtgctgtcgggcgtgatgtgcgccaaggggctgtcggccgcgacgggcaagccgctatatggcgtgaaccatctggcgggccatgcgctgacgccacggctgaccgatgatgtgccctatccctacctgatgttgctggtgtccggcgggcattgccagttcctgctggtgcatgggccggaccggtttgaacgcttgggcggcaccatcgacgacgcgccgggcgaggcttttgacaaggtggcgcgcctgatctcactgccgcaaccggggggccccgcgattgaacaggcggccaaggcgggcgaccccaaacgctttgccctgccgcgcccgctgctggatcggcccgattgcgacatgtctttttcggggttgaagacggcggtgctgcgcacgcgggacaaggtgatcgacgaaaaaggcgggttgagcgttcaggatcaggccgatctggctgcgggtttccaagctgccgttaccgatgtactggccgaaaagacccgccgcgccttgcggaaatatctggaccatgcgcctgatgtgcgcaccctttgtgtggcaggtggtgtggccgcgaacaaggcaataggccacgggttagagactgttgcagccgaagtagactgcgcctttatcgcgccgccgctgtcgctgtgcaccgataatgccgcgatgatcgcctttgccgcgatcgagcaaagccagctgcgcgcgcccgatgatctgaccctatcggcccgcccgcgttggcctctggacacacgccagcccgccatgttgggcagcggcaaaaaaggagcgaaagcatga

SEQ ID NO: 42345 - protein, 361 aa, Sulfitobacter sp. EE-36
MLLLGLESSCDDTAAALVRQLPGQRALVLSSVVVGQTELHASFGGVVPEIAARAHAEKLDLCVEKALAEAALTLADVDGFAVTAGPGLIGGVLSGVMCAKGLSAATGKPLYGVNHLAGHALTPRLTDDVPYPYLMLLVSGGHCQFLLVHGPDRFERLGGTIDDAPGEAFDKVARLISLPQPGGPAIEQAAKAGDPKRFALPRPLLDRPDCDMSFSGLKTAVLRTRDKVIDEKGGLSVQDQADLAAGFQAAVTDVLAEKTRRALRKYLDHAPDVRTLCVAGGVAANKAIGHGLETVAAEVDCAFIAPPLSLCTDNAAMIAFAAIEQSQLRAPDDLTLSARPRWPLDTRQPAMLGSGKKGAKA

SEQ ID NO: 42346 - DNA, 1092 bp, Roseovarius nubinhibens ISM
  CDS (1)..(1092): transl_table=11
atgagcgacaccacgaccatactcggaattgagagcagttgcgacgacactgcggcggcgattgtgcgcgtcggcggggctgtgccggagatcctgtcatcggtggtcgatgggcagacggagctgcatgatgcctatggcggtgttgtgcccgagattgcggcgcgcgcccatgccgagaaggtcgatctctgcgtgcgcgcggcgctcgatacggcggggattggccttggtcaggtggatgcggtggcggtgaccgccggtccggggcttattggcggggtgatgtcgggggtcatgtgcgccaaggggattgccgccggggcggggctgcctctgatcggggtgaaccatctggcggggcatgcgctgacgccgcggctcaccgatgcggtggagtatccttatctcatgctgctggtgtcgggcgggcattgtcagttccttctcgtcgagggggcggaagagttcacccggctcggcggcacgatcgacgatgcgccgggcgaggcctttgacaaggtggcgcggctcttggccttgccgcagccgggcgggccgtcggtcgaggcggaggcggcgcttggcgatgcggcgcggttcaagctgccgcggcctctattggatcggccgggctgtgacatgtcgttctccgggttgaagaccgccgtgctgcgcgcccgcgatggcgagatgcaggagggccgtctgtcgcgccgggtgcgggccgatatctgcgcggggtttcaggcctcggtttgcgatgtgctgggggaaaagacgcggcgggcgctggagatttatctggaacaagcgccggcgcgcccggttctggcggtggcgggcggggtggcggccaatgggcccattcgcgcccggctcatgcaggtggccgaggcggcgggggccgcgtttgtcgcgccgcccttgcggctctgcaccgataatgcggcgatgatcgcctatgcgggggccgagcggtttgcgcgcgggcatcgcgatgggatggatctggcggcgcggccacgctggccgctcgacaaggcgagcccggcgatgctcggctctggcaagaagggggccaaggcatga

SEQ ID NO: 42347 - protein, 363 aa, Roseovarius nubinhibens ISM
MSDTTTILGIESSCDDTAAAIVRVGGAVPEILSSVVDGQTELHDAYGGVVPEIAARAHAEKVDLCVRAALDTAGIGLGQVDAVAVTAGPGLIGGVMSGVMCAKGIAAGAGLPLIGVNHLAGHALTPRLTDAVEYPYLMLLVSGGHCQFLLVEGAEEFTRLGGTIDDAPGEAFDKVARLLALPQPGGPSVEAEAALGDAARFKLPRPLLDRPGCDMSFSGLKTAVLRARDGEMQEGRLSRRVRADICAGFQASVCDVLGEKTRRALEIYLEQAPARPVLAVAGGVAANGPIRARLMQVAEAAGAAFVAPPLRLCTDNAAMIAYAGAERFARGHRDGMDLAARPRWPLDKASPAMLGSGKKGAKA

SEQ ID NO: 42348 - DNA, 1092 bp, Oceanicola batsensis HTCC2597
  CDS (1)..(1092): transl_table=11
atgacgcgcagcttcacgatcctcgggctggaaagctcctgcgacgataccggggcggcagtggtgcgcggggtgccgggcgcggcgaccatcctgtcgtcggtggtcgagggacagaattccctgcacgaggcgttcggcggcgtggtgccggaaatcgccgcgcgcgcccatgccgagcggatcgacgtggtggccgaacacgccctggccaaggccggcgtccggctcaccgagatcgacgccatcgcggtgaccgccggccccgggctgatcggcggcgtgatgtcgggcgtgatgtgcgccaagggcatcgcggcgggcgccgggcttccgctcgtgggggtgaaccaccttgcgggccatgccctgacctcgcggctgaccgacgggatcggctatccctatctcacgctgctggtctcgggcggacactgccagttcatcctggtacgcggctgcgaccggttcgaccggctgggcggcacgatagacgatgcccccggcgaggcattcgacaagacggcgcggctgctggccctgccccagcccggcggaccatcggtcgaggccgaggccgcgcgcggcgatcccgcgcggttccggttcccgcggcccctgctggaccgcgagggctgcgacatgtccttctcggggctgaagaccgcggtgctgcgaatgcgggacacggtgatggagggcaaccgcctgacggcccgggaccgcgcggatctctgtgccgggttccaggcggcggcggtcgacgtgctggcggaaaagacccgccgggcgctggcgctctaccttgacgacgcgccgggtgacccggtgttgtcggtggcgggcggcgtcgcggcgaacagggccgttcgtgccggtctcgagactgtttgcgacacccttggcgtgcggttcacggcgccgcccctgtcgctttgcaccgacaacggcgcgatgatcgcctatgccggtctcgaacggttcgcggccgggcgacaggatgcgatggacctggcggcacgtccgcgctggccgctggatgccgggcgggcggggatgctgggcagcggaaagaagggaccgaaagcatga

SEQ ID NO: 42349 - protein, 363 aa, Oceanicola batsensis HTCC2597
MTRSFTILGLESSCDDTGAAVVRGVPGAATILSSVVEGQNSLHEAFGGVVPEIAARAHAERIDVVAEHALAKAGVRLTEIDAIAVTAGPGLIGGVMSGVMCAKGIAAGAGLPLVGVNHLAGHALTSRLTDGIGYPYLTLLVSGGHCQFILVRGCDRFDRLGGTIDDAPGEAFDKTARLLALPQPGGPSVEAEAARGDPARFRFPRPLLDREGCDMSFSGLKTAVLRMRDTVMEGNRLTARDRADLCAGFQAAAVDVLAEKTRRALALYLDDAPGDPVLSVAGGVAANRAVRAGLETVCDTLGVRFTAPPLSLCTDNGAMIAYAGLERFAAGRQDAMDLAARPRWPLDAGRAGMLGSGKKGPKA

SEQ ID NO: 42350 - DNA, 1056 bp, Erythrobacter sp. NAP1
  CDS (1)..(1056): transl_table=11
atgggatcgacgcacaacattgtcctcggaatcgagtcgagctgcgacgaaacggcagtggcgctggtcacgtccgaccgccgcatcctcgccgaacgcatcgcgagtcaggaggccgagcacgcgccctatggcggagtcgtgcccgaaatcgcggcgcgagctcatgccgaaaggcttgctccgatgctcgaaggtgtgatggcggacgctggactggccttggacgacgtggacgcaattgcggcgaccgccggcccgggcctgatcggcggcgtcatggtgggcctcgtcagtgcaaaggcgctggcgatggcgtcgggcaaaccgctgatcgcggtgaaccacctcgaagggcacgcactgtcgccccggctcgcggacgaggcgctgggctatccttatctcttgctgctcgtatcaggcggacattgtcagatcctcggcgtcgagggcgtcggcgaatatcgccgcctcgcaacgacaatcgacgatgcgctgggcgaggcattcgacaagacggccaagatccttggccttggctatcccggcgggcccgcggtggagcgtttggcgctcgagggcgacgccaaggctgttcccctgcctcgccccatgaaggggtcgaaggaaccgcacttctcctttgccggtctcaagagcgccgtgctgcgcgctcatgaaagcggtaggcacaacgcagccgatatcgctgcctctttccagcaggcggcgattgattgcctgatcgaccggctcgaaaaggctcttggttcatcaggtccctaccccgcgcttgtcgtggcgggcggcgtcgcagcgaaccaggcggttcgcattgcgctcgaaaacctcgcctcgcgccatgacatgcgcttcgtcgcgccgccgctcaaactgtgcaccgacaatgcagcgatgatcgcatgggccgggtgcgagcggcttgcgcaggatcccgaatttgctggcgaccctctcgacctaaaggcgcgcccacgctggccgcttgatcaggaggctgacaaggtgcgcggtgcgggggtgaaagcatga

SEQ ID NO: 42351 - protein, 351 aa, Erythrobacter sp. NAP1
MGSTHNIVLGIESSCDETAVALVTSDRRILAERIASQEAEHAPYGGVVPEIAARAHAERLAPMLEGVMADAGLALDDVDAIAATAGPGLIGGVMVGLVSAKALAMASGKPLIAVNHLEGHALSPRLADEALGYPYLLLLVSGGHCQILGVEGVGEYRRLATTIDDALGEAFDKTAKILGLGYPGGPAVERLALEGDAKAVPLPRPMKGSKEPHFSFAGLKSAVLRAHESGRHNAADIAASFQQAAIDCLIDRLEKALGSSGPYPALVVAGGVAANQAVRIALENLASRHDMRFVAPPLKLCTDNAAMIAWAGCERLAQDPEFAGDPLDLKARPRWPLDQEADKVRGAGVKA

SEQ ID NO: 42352 - DNA, 1056 bp, Synechococcus sp. WH 5701
  CDS (1)..(1056): transl_table=11
atgccaacggttctggccctcgaaacaagttgtgacgagtcagcggctgcgattgtgcgcgatcgcacggtgctggccggcgcagtggcctcccaggtggaggagcacgcccgctgggggggtgtggtgccggaaatcgcctccaggcggcatgtggaagccctgccccacctggtggagcgggtgatggccgagtcgggcctgagctacggcgatctcgatggcatcgccgccacggtggcgccgggcctggtgggggcccttctggtgggatcggtcaccggccgtaccctcgcccgcctgcacgacctgcccttcctgggggtgcaccacctggagggtcacctctgctcggtgcagctgggggagcccctgccgccaggcccctacctggtgttgctggtcagtggcggtcacaccgagctggtgcgggtggagggggtcggggcgtaccagcggctcgggcgcagccatgacgacgcggccggggaggccttcgacaaggtggcgcggctgatgggactgggttatcccggcggccccgccatccaggcggcggctgccgccggcgatcccgagcgcttccccttgcccaagggacgggtgtccaggcctgagggtggcttccatccctacgacttcagtttcagtggtctcaaaaccgcggtgctgcggctggtacagcgcctggagcaggagccccaggcgctgccgctggccgacatcgccgccagtttcgagcgggtggtggtggacgtgctggtggagcggagctgtcgctgcgccctggatcaggggctggacaccgtggtgctggtgggcggggtggcagccaaccgccgcctgcgccaggccatggaggaacgctgcgatgccctcggcctgcactggcgtgtcgctcccctggcctactgcacggacaacgccgcgatgatcggcgtggcggccgcggcccgtctggccggcggggcccgcagcggctgcgatctgggggtactggcacggcttcctctcgagcaggccggcagcctttacgaaacacggtccggttgttaa

SEQ ID NO: 42353 - protein, 351 aa, Synechococcus sp. WH 5701
MPTVLALETSCDESAAAIVRDRTVLAGAVASQVEEHARWGGVVPEIASRRHVEALPHLVERVMAESGLSYGDLDGIAATVAPGLVGALLVGSVTGRTLARLHDLPFLGVHHLEGHLCSVQLGEPLPPGPYLVLLVSGGHTELVRVEGVGAYQRLGRSHDDAAGEAFDKVARLMGLGYPGGPAIQAAAAAGDPERFPLPKGRVSRPEGGFHPYDFSFSGLKTAVLRLVQRLEQEPQALPLADIAASFERVVVDVLVERSCRCALDQGLDTVVLVGGVAANRRLRQAMEERCDALGLHWRVAPLAYCTDNAAMIGVAAAARLAGGARSGCDLGVLARLPLEQAGSLYETRSGC

SEQ ID NO: 42354 - DNA, 1017 bp, Pseudoalteromonas tunicata D2
  CDS (1)..(1017): transl_table=11
atgcgtattttaggtattgagtcgtcttgtgatgaaacgggaattgccatttatgacgatgaaaaaggcttacttgcacatcaattatacagtcaagttaaattgcatgctgattatggcggtgtggtgcctgaattagcgtcgcgggatcatgttcgtaaaactctcccgttgattactgccgctttaaaagaagctaactgtacaccagaggatttagatggcattgcttatacggcaggtcccggcttagtgggagctctgctggttggctcatcgattgcacgagccctgtcattcggttggaaaattccagctgttgcagtgcatcatatggaaggtcatctattggcgccaatgcttgatgaacctcgtcctgaatttccatttgttgctttgcttgtatcaggtggccataccttattagtaaaagtggccggtattggtgagtatcaaatattgggtgaatcgatagatgatgccgcaggtgaagcgtttgataaaacagctaagttacttggcctcgattatccaggtggcccactattggctaaattagccgaacaaggcacaccaaaacggtttatttttccaagaccaatgacagatagacctgggcttgattttagttttagtggtttaaaaacgtttgcggctaatacaattcgctctgaaggtgatgatttacaaactaaagccgatattgcgcatgcatttcaaactgcagtgattgatacactggccatcaaatgcaagcgcgccttaaaagaaacgggtattaaacgtttggtgatagccggaggcgtgagcgctaattgttatttgcgtgagcagtttgccaaaatcatgcaagggatgcagggcgaggttttttatccaagaactgagttttgcaccgataatggtgcgatgattgcgtatgcgggtatgcaacgcttaaaagctaaacaatatgctgacttagatagtaaagtaaggccacgttggtcgattgaagaattgccaccacttaaataa

SEQ ID NO: 42355 - protein, 338 aa, Pseudoalteromonas tunicata D2
MRILGIESSCDETGIAIYDDEKGLLAHQLYSQVKLHADYGGVVPELASRDHVRKTLPLITAALKEANCTPEDLDGIAYTAGPGLVGALLVGSSIARALSFGWKIPAVAVHHMEGHLLAPMLDEPRPEFPFVALLVSGGHTLLVKVAGIGEYQILGESIDDAAGEAFDKTAKLLGLDYPGGPLLAKLAEQGTPKRFIFPRPMTDRPGLDFSFSGLKTFAANTIRSEGDDLQTKADIAHAFQTAVIDTLAIKCKRALKETGIKRLVIAGGVSANCYLREQFAKIMQGMQGEVFYPRTEFCTDNGAMIAYAGMQRLKAKQYADLDSKVRPRWSIEELPPLK

SEQ ID NO: 42356 - DNA, 1020 bp, Photobacterium sp. SKA34
  CDS (1)..(1020): transl_table=11
atgcgtatactgggcatcgagacttcctgtgatgagacaggtattgcgatttttgatgatgaaaaaggtctcttggcacatgaactttacagtcaagtaaagctacatgcagattacggtggtgttgtgcctgagttggcatcgcgtgatcacgttaagaaaacgattccattgatcaaggctgcgcttgcttctgccggactgactcatgacgatcttgatggtgttgcttacaccgcaggccctggtcttgttggtgcattattagtgggtgcaaccattggacgtagcctagcatatgcgtgggatttacctgccgttgctgtgcaccatatggaaggacaccttctcgcaccaatgttagaagataatgctcctgaattcccatttgttgctttgctggtttctggcggtcataccatgatggtcgaagtgaaaggtattggtgaataccaaatcctaggcgagtcgattgatgacgcggcgggtgaggcttttgataaaaccgcgaagatgatggggcttgattatccaggcggcccattactgtctaaaatggcagaaaaaggtaccaaagggcgttttaaattcccacgtccaatgacagatcgtcccggtcttgattttagtttttcgggtttaaaaacatttgcagcgaatacgattcgtgcaagcgacgacgatgaacaaactcgagctgatatcgcttttgcattccaagaagcggtagttgataccttagccattaaatgtaaacgagcactaaaacaaacaggtttaaagcgcttagtgattgcaggcggcgtcagtgcaaataagtatttacgtcaagagcttgaaagcatgatgaagaacctaaaaggtgaagtgttctatcctcgtacagaattttgtacagataacggtgcaatgatcgcttatgctggcatgcagcgtttgaaaaacaaagaaacgatggatttaggtgttaaagcattcccacgctggccgattgatcaacttaagccgattgctgactaa

SEQ ID NO: 42357 - protein, 339 aa, Photobacterium sp. SKA34
MRILGIETSCDETGIAIFDDEKGLLAHELYSQVKLHADYGGVVPELASRDHVKKTIPLIKAALASAGLTHDDLDGVAYTAGPGLVGALLVGATIGRSLAYAWDLPAVAVHHMEGHLLAPMLEDNAPEFPFVALLVSGGHTMMVEVKGIGEYQILGESIDDAAGEAFDKTAKMMGLDYPGGPLLSKMAEKGTKGRFKFPRPMTDRPGLDFSFSGLKTFAANTIRASDDDEQTRADIAFAFQEAVVDTLAIKCKRALKQTGLKRLVIAGGVSANKYLRQELESMMKNLKGEVFYPRTEFCTDNGAMIAYAGMQRLKNKETMDLGVKAFPRWPIDQLKPIAD

SEQ ID NO: 42358 - DNA, 1029 bp, Oceanospirillum sp. MED92
  CDS (1)..(1029): transl_table=11
atgcgtgtacttgggattgagacctcctgtgatgaaacgggcgtggcaatatatgacagtgaaaaaggcttattaggtgatgccttatacagtcaggtaaagatgcacgcagagtatggaggcgtggtacctgagctggcgtctcgtgatcatgttcgaaagttgttgccactgctggatgaaacttttgcgaaagctggcttggaaaaaggtgatgtagacgctgtcgcttatacatccgggcctgggttaatcggggcgttaatggttggtgcttctactgggcgctcaatggcaatggcctggggtaagcccgcaattggagtccaccacatggaagggcatctgctggcacccatgttagaagagaatcctcctgagtttccgtttgttgcattgttggtttcgggtggtcacacccagttagtacaagttgacggtattgggcattataccttgttgggcgaatccttagatgatgccgcgggcgaagcgtttgataaagcggctaaaatgatggggctggactaccccggagggccattgattgctaaacatgcagcgatgggtgaccggacccgtttccgcttcccaaggccgatgacggatcgcccgggtatggattttagcttttcaggcctaaagacctttactttgaatacggctaactcacaccgggacgaagcgggcacgcttgataagcagactatttgtgatatagcggcagcatttgaagaggctgtggttgatacgcttgccattaaatgtcgaagagcgctacagcataccgggtttaaacagttggtgatcgcgggtggggtgagcgccaatcaacgccttagagagcgcctggatgtaatggtgcaaaaagagcgagcagagctgttttatgccaggcctgaattttgtaccgataatggagcgatgattgcctttgctggatgtcagcgtttaaaggctggtttacatgatgacctgacgattgtcacaaagccgcgctggccacttgatactctggaggcaatctaa

SEQ ID NO: 42359 - protein, 342 aa, Oceanospirillum sp. MED92
MRVLGIETSCDETGVAIYDSEKGLLGDALYSQVKMHAEYGGVVPELASRDHVRKLLPLLDETFAKAGLEKGDVDAVAYTSGPGLIGALMVGASTGRSMAMAWGKPAIGVHHMEGHLLAPMLEENPPEFPFVALLVSGGHTQLVQVDGIGHYTLLGESLDDAAGEAFDKAAKMMGLDYPGGPLIAKHAAMGDRTRFRFPRPMTDRPGMDFSFSGLKTFTLNTANSHRDEAGTLDKQTICDIAAAFEEAVVDTLAIKCRRALQHTGFKQLVIAGGVSANQRLRERLDVMVQKERAELFYARPEFCTDNGAMIAFAGCQRLKAGLHDDLTIVTKPRWPLDTLEAI

SEQ ID NO: 42360 - DNA, 1179 bp, Xanthobacter autotrophicus Py2
  CDS (1)..(1179): transl_table=11
atggcggcgtacaatgcgcgacggaatcgaaatgggatagagcggcgttcgggcgcagcggctccatattggaataccgtacaagaacggatctgggagggtgagggcgtggccgatcttctggtgctcggcatcgagaccacgtgcgacgagacatcggcggcggtggtggcgcgctcgccttcgggggcgtccgacatccgctccaacgtgatccgctcgcaggtggagatccactcgccctatggcggcgtggtgccggagatcgcggcgcgcgcccatgtggagatcctcgaccacgtcatcgccgaggccatgcgccaggccaatgcggattattccgagctgtcgggcatcgcggcggcggccgggccggggctcatcggcggggtcatcgtcggcctcaccaccgccaaggccatcgcgctggccgccaagaagccgctggtggcggtgaaccatctggaagcccacgcgctgaccgcgcgcctcaccgacggcgtcgccttcccctatctgctgctgctggtctccggcggccacacccagcttctcgcggtggaggacgtgggccgctacacccgcctcggcaccacgctggacgatgccgtgggcgaggccttcgacaaggtggcgaagatgctcagcctgccctatcccggcgggccgcaggtggaggcacaggccaggctcggttatgccggccgcttcgcctttccccgccccatgctgggccggcgcgagccggacttttccctctccggcctcaagaccgccgtgcggcttgaagcggaccgccttgccccgctctccgacgacgacgtggcggacctgtgcgccagcttccaggcggcggtggtggacctgattgccgatcgggtacgtgccggcgcccgcgccttccgcgaccggctgggccgtggccccaccgctttggtggtggccggcggggtcgccgccaatggcatgatccgcgagacactggccaaggtggccgccgagctgaacacccgcttcgccatgccgtcgccggagctgtgcaccgacaatggcgccatgatcgcctgggccggggccgagcggctgtcgcgcggcatgcgcgaccggctcgatttcagcccccgcgcccgctggccgctggacccctcggccgccgcctccgccaacgcccgggcctga

SEQ ID NO: 42361 - protein, 392 aa, Xanthobacter autotrophicus Py2
MAAYNARRNRNGIERRSGAAAPYWNTVQERIWEGEGVADLLVLGIETTCDETSAAVVARSPSGASDIRSNVIRSQVEIHSPYGGVVPEIAARAHVEILDHVIAEAMRQANADYSELSGIAAAAGPGLIGGVIVGLTTAKAIALAAKKPLVAVNHLEAHALTARLTDGVAFPYLLLLVSGGHTQLLAVEDVGRYTRLGTTLDDAVGEAFDKVAKMLSLPYPGGPQVEAQARLGYAGRFAFPRPMLGRREPDFSLSGLKTAVRLEADRLAPLSDDDVADLCASFQAAVVDLIADRVRAGARAFRDRLGRGPTALVVAGGVAANGMIRETLAKVAAELNTRFAMPSPELCTDNGAMIAWAGAERLSRGMRDRLDFSPRARWPLDPSAAASANARA

SEQ ID NO: 42362 - DNA, 1059 bp, Rickettsiella grylli
  CDS (1)..(1059): transl_table=11
atgcaaagtttctattcaaaaaaaactcattgccaaccccaaaagatcgcttgtgtattagggattgagacctcttgcgacgaaacgggtatcgcgctctaccatggccaaaaaggtctccttgctcatacgttatatagccaaattgagcttcataatcgctatgggggggttgttccagaacttgcctcacgtgatcatatactcaaaatattacccttacttcaagaaaccttatctgctgctcatctttcgctctcagccattaatgggatcgcttattgttcaggccctggtcttgctggcgcactcttagtcggcgcaacctttgggcgtagtttaggttgggcccttggcattccaagcttaggtgtccatcacatggaagcgcatttgcttgcgccgatgttggacgacccaatgcctgaatttccgtttcttgcattactcgtttcaggcggtcataccttattagcggaggtaacccatattggccgctataaaattttaggggtaagtcttgatgacgcagccggtgaagcatttgataaaacagcccaattattagggctcgcctatccaggcgggcctgctattgcggctttcgctgaaaaagggaaatcgaaacaataccaatttccacgaccgatgctgaatagaccggattgtcattttagttttagtggtcttaaaaccttcgtgaatacaacgtttaaaaatagcgataaaaccgatcaaacaaaagccaatattgcttatgaatttcaatctgccgtggtggataccctcgttgcaaaaaccgcgcgcgctttaaatcaaacgggtttaggtcgtttagtcgttgccgggggtgtcgcggcgaatacccagctcagaaaagcacttaagacgctggcaacccaacaaaatgtttcactttattatccacaacctcgtttttgtaccgataatggcgccatgattgcttatttaggttatcgacgtttgaatttaggacaatatgataatgatttaatcataagaacgattgctcgttatcctctcgaccaattagattaa

SEQ ID NO: 42363 - protein, 352 aa, Rickettsiella grylli
MQSFYSKKTHCQPQKIACVLGIETSCDETGIALYHGQKGLLAHTLYSQIELHNRYGGVVPELASRDHILKILPLLQETLSAAHLSLSAINGIAYCSGPGLAGALLVGATFGRSLGWALGIPSLGVHHMEAHLLAPMLDDPMPEFPFLALLVSGGHTLLAEVTHIGRYKILGVSLDDAAGEAFDKTAQLLGLAYPGGPAIAAFAEKGKSKQYQFPRPMLNRPDCHFSFSGLKTFVNTTFKNSDKTDQTKANIAYEFQSAVVDTLVAKTARALNQTGLGRLVVAGGVAANTQLRKALKTLATQQNVSLYYPQPRFCTDNGAMIAYLGYRRLNLGQYDNDLIIRTIARYPLDQLD

SEQ ID NO: 42364 - DNA, 1026 bp, Oceanobacter sp. RED65
  CDS (1)..(1026): transl_table=11
atgcgggttttagccatagaaagcagttgtgatgaaacaggcatcgcgatttacgacagtgagcagggattattgtcccacgcgttgtacagtcagattgaaatgcacgctatttatggcggtgtcgtgccagaattggccagtcgtgatcatattcgtaaggctattcctttaatcaaacaagttatggcggaagccaataccacttctgacgatttagacggtattgcttatacgtcaggccctggcttggctggagcgctgttagtgggcgcttgcttggctcgctcgttggcctggagctgggatattccggcacttgcggtacaccatatggaaggtcatttattagcaccgttattagaagacccggcccccgagtttccatttgtggcgttgctggtcagtggcgggcacacacaattggtggatgtacagggtattggtcaatacgaagtattaggtgaaagcatcgatgatgccgctggtgaagcctttgataaaaccgccaaaatgatggacttgccgtatcctggtggcccgcatatttcgaaattagcagaaaaaggcacggaagggcgctttaaattcccgcgtccaatgacggatcggcccggtttggacttttcattcagtggtttgaaaacctttgcgcgtaatactattactcaatgccgcgaagaaagtggtttaaccgagcaagataaagcggatattgcgctggcgtttgagcaagccgcagtggataccctagtgattaaatgccgccgtgcattaaaagaaaccggtcgtaagcgtctagtcatcgccggtggtgtgagtgccaatcgctatttacgtgagcgtttacagcaagaattaaagaaactggatggggaagtgttttatccgcgtccagagttttgtaccgataatggagcgatgattgcctatgccggttgtcagcgcttaatggcagggcagagagatggggaggagatagttgtgcatccccgctggcccatggatgagctttcggctgtttaa

SEQ ID NO: 42365 - protein, 341 aa, Oceanobacter sp. RED65
MRVLAIESSCDETGIAIYDSEQGLLSHALYSQIEMHAIYGGVVPELASRDHIRKAIPLIKQVMAEANTTSDDLDGIAYTSGPGLAGALLVGACLARSLAWSWDIPALAVHHMEGHLLAPLLEDPAPEFPFVALLVSGGHTQLVDVQGIGQYEVLGESIDDAAGEAFDKTAKMMDLPYPGGPHISKLAEKGTEGRFKFPRPMTDRPGLDFSFSGLKTFARNTITQCREESGLTEQDKADIALAFEQAAVDTLVIKCRRALKETGRKRLVIAGGVSANRYLRERLQQELKKLDGEVFYPRPEFCTDNGAMIAYAGCQRLMAGQRDGEEIVVHPRWPMDELSAV

SEQ ID NO: 42366 - DNA, 1020 bp, Desulfitobacterium hafniense DCB-2
  CDS (1)..(1020): transl_table=11
gtgaacaataaagatattaatatacttggaattgagacaagctgtgacgagacctcagctgctgtgcttcgcaatggctgtgagctgctcagtcatattatttcatcacagataaagacccatcaaaaatatggcggagttgtgccggaagtggcctctcgggagcatatcctgcatttgcaaagtgttgtggagcaggctttgcaagaggcaaagatggggtttggcgatttggcgggaattgccgtaacctatggaccggggcttgtgggctctctcctggtaggggtggcaggagcaaaggcgatggcttatggggcagggattccgctgctgggagttaatcatttggaaggacatatctatgcgaactttcttcataatccggggctgaagtttcctttgctggctctccttgtctcgggagggcattcccatttggtctattttgaaggacatggaaaataccaggttcttgggcagactcgggatgatgctgccggagaggctttggataaggtggcccggaccttagggctgggttatccgggtggaccatatattcagaaggctgcccttgaagggaatccacatgcctacgaatttcccagggcaatgcttgagcccggcagtctggacttcagcttcagcggcgtgaagtcggcggtgctcaataccttgaattcggcacgaatgaagggcgagaccgtaaatgttgccgatgtggcggcttcttttcaggaggccatcgtcgatgtcttggtgcgtaagaccttgctggccttggctaggacaaaagctcccactctggttctggccgggggagtagcagctaatactctgctaagggaacgcctcactgaggcaactcaaaaaagaggaattgcttttagttacccgcccccaatcctctgtacggataatggggccatgatcgcgactgccggatattaccgttatttggataaggattatgctccttggaatttgaatgctataccgggactgaatttggcttaa

SEQ ID NO: 42367 - protein, 339 aa, Desulfitobacterium hafniense DCB-2
MNNKDINILGIETSCDETSAAVLRNGCELLSHIISSQIKTHQKYGGVVPEVASREHILHLQSVVEQALQEAKMGFGDLAGIAVTYGPGLVGSLLVGVAGAKAMAYGAGIPLLGVNHLEGHIYANFLHNPGLKFPLLALLVSGGHSHLVYFEGHGKYQVLGQTRDDAAGEALDKVARTLGLGYPGGPYIQKAALEGNPHAYEFPRAMLEPGSLDFSFSGVKSAVLNTLNSARMKGETVNVADVAASFQEAIVDVLVRKTLLALARTKAPTLVLAGGVAANTLLRERLTEATQKRGIAFSYPPPILCTDNGAMIATAGYYRYLDKDYAPWNLNAIPGLNLA

SEQ ID NO: 42368 - DNA, 1014 bp, Alteromonadales bacterium TW-7
  CDS (1)..(1014): transl_table=11
gtgcgaattttaggcattgaatcgtcatgtgatgaaacaggtatagcaatatatgatgacgagaaaggcttattagctcatcagttatatagccaagtaaaagtacatgctgactacggtggcgtggttcccgagctggcgtcacgcgatcatgttcgtaaaacgcttccgcttattgatgcagcttttgctcaagctggttgtggtcctgaagacttagacggtattgcttatacagccggccctggtttagttggggcgctattagtgggtacttcaattggtcgctcattggcttacggatgggatatccctgctgttgcggttcatcatatggaggggcatctacttgctcccatgcttgaagacaaggtgccagagtttccgtttattgctttacttgtttctggtggccacaccatgatggtaaaagttgaaggaattggccaatacgaagtattgggcgagtctgttgatgacgctgcaggtgaagcctttgacaaaacagctaagttattaggtcttgattacccgggtggtccccgcttagcaaaattagcagagcaaggtattccaaagcgatttatctttcctcgcccaatgacagataaacccgggcttgattttagttttagtggattaaaaactgcggcgtcgattaccattcgtgaaaatgacgatgacgagcaaactatagctgatattgcgcatgcatttcaaaccgctgttattgataccttggttattaaatgtaagcgagcgctaaagcaaacaggtatcaagcgtttagtgattgcgggcggtgtaagtgcaaatacccagcttaggcttcagcttgaaagagtcatgcagggtatgaagggcgaagtgtattatccgcgtacggagttttgtactgataacggtgcaatgattgcttatgccggtatgcaacgtttaaaagcagggcagtttgcaacccttgatatgaaaactaagcctcggtggccaatagacagcctcgagcctatttaa

SEQ ID NO: 42369 - protein, 337 aa, Alteromonadales bacterium TW-7
MRILGIESSCDETGIAIYDDEKGLLAHQLYSQVKVHADYGGVVPELASRDHVRKTLPLIDAAFAQAGCGPEDLDGIAYTAGPGLVGALLVGTSIGRSLAYGWDIPAVAVHHMEGHLLAPMLEDKVPEFPFIALLVSGGHTMMVKVEGIGQYEVLGESVDDAAGEAFDKTAKLLGLDYPGGPRLAKLAEQGIPKRFIFPRPMTDKPGLDFSFSGLKTAASITIRENDDDEQTIADIAHAFQTAVIDTLVIKCKRALKQTGIKRLVIAGGVSANTQLRLQLERVMQGMKGEVYYPRTEFCTDNGAMIAYAGMQRLKAGQFATLDMKTKPRWPIDSLEPI

SEQ ID NO: 42370 - DNA, 1041 bp, marine gamma proteobacterium HTCC2143
  CDS (1)..(1041): transl_table=11
atgctgaccctaggaatagagacttcctgtgacgagactggtatcgctctgtacgatagcgagcgaggcctattagccgatgcgctgtatagtcaaatagagttgcatgccgaatacggtggcgttgtacccgaattggcatctcgcgatcatattcgcaagactttgccgctaatagatcaggttctggaagaggctgggtgtagcaaacgggatattgatggcattgcttatacgtcgggcccgggtttggtgggtgcattgatggtaggcgccatgatcggacgatctttggctttttcattgggagttcctgcaataggtgttcatcatatggaagggcatctattggcgccaatgctggaggcggcaccgccgtcgttcccatttattgcgctgttggtttctggtggtcatacccagctggttcgcgttgatgctattggcgagtaccgattgttgggcgagtctcttgatgatgcagcgggagaagcgtttgataaggccgctaaaatgttaggattaccttaccctggtgggccgcaggttgccttgcttgctgagaaggggaatgcgggccggtttatatttccccggcccatggtgaaacatcctggacttgatttcagctttagtggcttgaaaacgtttactttgaataccgttcagcaacacagcgatgagagcggcaaggtagacgatcaaaccaaggccgatattgcacaggcttttcagcaggcggtggtagaaacattggtgataaaatgtaagcgtgcgctaaagcaggaatcattgtcccagttggtcatggctgggggcgtcagtgctaatcgccagctgcagaaaagtttagagattgcattagacaaactgggcgggcgggtattctatgcgcgccaaaaattttgtactgacaacggagcaatgattgcttatgccggttgtcagcgtctattggcgggccagaacgaaggcctcactgtgactgcggtaccacgctggccaatggatcaattgccgccacttatcaataattgctag

SEQ ID NO: 42371 - protein, 346 aa, marine gamma proteobacterium HTCC2143
MLTLGIETSCDETGIALYDSERGLLADALYSQIELHAEYGGVVPELASRDHIRKTLPLIDQVLEEAGCSKRDIDGIAYTSGPGLVGALMVGAMIGRSLAFSLGVPAIGVHHMEGHLLAPMLEAAPPSFPFIALLVSGGHTQLVRVDAIGEYRLLGESLDDAAGEAFDKAAKMLGLPYPGGPQVALLAEKGNAGRFIFPRPMVKHPGLDFSFSGLKTFTLNTVQQHSDESGKVDDQTKADIAQAFQQAVVETLVIKCKRALKQESLSQLVMAGGVSANRQLQKSLEIALDKLGGRVFYARQKFCTDNGAMIAYAGCQRLLAGQNEGLTVTAVPRWPMDQLPPLINNC

SEQ ID NO: 42372 - DNA, 1035 bp, marine gamma proteobacterium HTCC2080
  CDS (1)..(1035): transl_table=11
ttgaaggttttggggattgaaaccagctgcgatgagaccggcgttgcggtttacgatactgatcgcggtttgttggccgaggctttatacagtcaggttgaggtgcatgccgaatacggtggtgtggtgcctgagctggcctcgagagatcatattcgtaagacgctaccgctgattaacgaggtattacagcgaagcgggctggataaaagcgagctggagggtattgcctataccgctggcccgggtttgatgggcgcgctcatggtcggtgccactctagggcgctctatggcccggggtcttggcattccgtgcctgggcgtgcatcacatggaagggcatttgctggcgccaatgttgggcgagcacccccctgagtatccttttattgcgcttttggtgagtggtggtcacagccagttggtgcgagtcgatggcttgggtcgttacacgctgctgggggagtcggtcgacgacgccgcgggggaagcctttgataaaaccgccaaattgctcgacttaccctaccctgggggtcctcaggtggcaaagctggctgaaaagggcaatcctgatcgcttcgatttccctaggcccatggttcgacagcccggcctcgatatgagctttagcggtttgaaaacccacacattaaccaccgttcgagcttgccgtgaagccaccggtcttaccgatcaggacagggccgatattgcctgtgcttttgaaattgccgttgtcgatacgctggtgattaagtgtcgcagagctttggagcaagaatcgctcaagacgttggtgatggccggtggggtgagcgccaatcggcggcttagaaaggtcttggccgaaaagctggcaccgatgggtgttgcggtgcactacccgcccttggcgttgtgcacggataacggtgccatgattgcttacgcgggtgcgctcaggctcgccgcgggacagcgggaccccgatgaggccgaggtgcggccgcgttggcctatgacgttgttgcaccccccggaggtggcatga

SEQ ID NO: 42373 - protein, 344 aa, marine gamma proteobacterium HTCC2080
MKVLGIETSCDETGVAVYDTDRGLLAEALYSQVEVHAEYGGVVPELASRDHIRKTLPLINEVLQRSGLDKSELEGIAYTAGPGLMGALMVGATLGRSMARGLGIPCLGVHHMEGHLLAPMLGEHPPEYPFIALLVSGGHSQLVRVDGLGRYTLLGESVDDAAGEAFDKTAKLLDLPYPGGPQVAKLAEKGNPDRFDFPRPMVRQPGLDMSFSGLKTHTLTTVRACREATGLTDQDRADIACAFEIAVVDTLVIKCRRALEQESLKTLVMAGGVSANRRLRKVLAEKLAPMGVAVHYPPLALCTDNGAMIAYAGALRLAAGQRDPDEAEVRPRWPMTLLHPPEVA

SEQ ID NO: 42374 - DNA, 1083 bp, Candidatus Desulfococcus oleovorans Hxd3
  CDS (1)..(1083): transl_table=11
gtgttcctgcaacggttttcttttgcttttctttttcgatttcgatcccgatttcgacatggacaaccggatatgaaattacctcgaaccattcttggcattgaaacatcctgcgacgagaccggggccgctgttgtggcggatggccggcgggtgctctcctcggtggtgtcgtcccaggtggccctgcacagtccttacggcggtgtggtgccggaactggcctcccggaaacacattgagcatattctgccggtggttcgccaggcactggccgaggccgggctgaaaaccggcgacattgacgccgtggccgccacccagggacccggcctggtgggggcactgctggtggggttttcctttgcaaaggcttttgcttatgccgcgaatgtgcccatggtgggcgtcaaccatctgaacgggcacctggcctccctgtttctgaccgatgacccgccggccattccctttgtggccctgctggcctccggcggccataccgccatttaccatgtgaccgggcctgtgaccagcaccctcatgggccagacccgggacgatgccgcgggcgaagcctacgacaaggtggccaagatgatggggctgggctatcccggcggcgcggtcatcgacaacctggccgcccagggagatcccgcaaaatatgcattcacccggccctacctggacaaggcggcctttgatttcagcttcagcggcatcaaaaccgcggcccggcggtttattcaggaggccggcgacgccctggcccctgaatcgcctcatattgccgccgggttccaggaggcggtggccgatgtgttgtgctacaagctggttcacgcggcaaaggtgaaaaagtgcgggcacatggccctggtgggcggggtggcggccaaccgccgcatcggtgaaaagctgcgccacgcggcaaagcaggaggggcttgttgtccatattccgccgccggcctggtgcggggacaacgcggccatgatcggggccgccgggttttttcaactggccgccggagcagagccggtggacctgtccgccgatgtctattcccgggtggcttag

SEQ ID NO: 42375 - protein, 360 aa, Candidatus Desulfococcus oleovorans Hxd3
MFLQRFSFAFLFRFRSRFRHGQPDMKLPRTILGIETSCDETGAAVVADGRRVLSSVVSSQVALHSPYGGVVPELASRKHIEHILPVVRQALAEAGLKTGDIDAVAATQGPGLVGALLVGFSFAKAFAYAANVPMVGVNHLNGHLASLFLTDDPPAIPFVALLASGGHTAIYHVTGPVTSTLMGQTRDDAAGEAYDKVAKMMGLGYPGGAVIDNLAAQGDPAKYAFTRPYLDKAAFDFSFSGIKTAARRFIQEAGDALAPESPHIAAGFQEAVADVLCYKLVHAAKVKKCGHMALVGGVAANRRIGEKLRHAAKQEGLVVHIPPPAWCGDNAAMIGAAGFFQLAAGAEPVDLSADVYSRVA

SEQ ID NO: 42376 - DNA, 1026 bp, Pseudomonas putida GB-1
  CDS (1)..(1026): transl_table=11
atgctagtactgggattggaaacatcctgcgacgaaactggcgtcgcattatacgacagtgaacgcggtttgttggccgacgcactgttcagccagatcgacctgcaccgcgtgttcggcggcgtagtgcccgagcttgcctcgcgtgatcacgtcaagcgcatgctgccgctcattcgccaggtgctggacgaggctggctgcgtcgccaccgagatcgacgccatcgcctataccgcgggccctggcctggtcggtgccttgctggtcggggcttcctgcgcccaggcgttggcctttgcctgggacatcccggcgataggtgtgcaccacatggaaggccacctgctggcgcccatgctggaagaaaacccacccgagtttccgttcgtcgctttgttggtttccggtggtcacacgcagttggttcgggtcgatggcatcggccagtacgaactgctgggcgagagcctggacgacgctgccggcgaggcgttcgacaagaccgccaagttgatcggcctcaattacccaggcggcccggaaatcgcgcgcctcgcagagcagggcgtacctgggcgcttcgttttcccaaggccgatgaccgatcgtccgggtcttgagttcagcttcagcggcctcaagaccttcgccctcaacacctggcagcaatgcaagaatgctggcgacgacggtgagcaaacccgttgcgacgtgtccctggcattccagcaggcggtggtggaaactttgaccatcaagtgcaagcgagccctcaagcagactggcctcaagcgcctggtcatcgctggtggcgtgagtgccaacaaagcgctgcgtgcctcgctggaagagatgctggccggaatgaagggcaatgtgtactacgcgcgcccacagttctgtaccgacaatggcgcgatgatcgcctatgccggttgccagcgactgttggccgggcagcagcaggacctggcgatcagcgtgcaggcacgctggccgatggagcagttgccgccactgtaa

SEQ ID NO: 42377 - protein, 341 aa, Pseudomonas putida GB-1
MLVLGLETSCDETGVALYDSERGLLADALFSQIDLHRVFGGVVPELASRDHVKRMLPLIRQVLDEAGCVATEIDAIAYTAGPGLVGALLVGASCAQALAFAWDIPAIGVHHMEGHLLAPMLEENPPEFPFVALLVSGGHTQLVRVDGIGQYELLGESLDDAAGEAFDKTAKLIGLNYPGGPEIARLAEQGVPGRFVFPRPMTDRPGLEFSFSGLKTFALNTWQQCKNAGDDGEQTRCDVSLAFQQAVVETLTIKCKRALKQTGLKRLVIAGGVSANKALRASLEEMLAGMKGNVYYARPQFCTDNGAMIAYAGCQRLLAGQQQDLAISVQARWPMEQLPPL

SEQ ID NO: 42378 - DNA, 1059 bp, Marinobacter sp. ELB17
  CDS (1)..(1059): transl_table=11
atgctgattttaggtattgagacgtcttgtgacgaaaccggcgtggcactctaccacaccgagcgtggtttgctggcccatgcgttgttcagtcaggtagcgatacacgctgactacggcggggtggtgcccgagctggcctcccgcgaccacgttcgcaaactgttgccattgatcgagcaaattctggccgaggcagggcttgcacgtgcagacatcgaaggcattgcttacaccgcaggtcccggccttgcgggcgcgttaatggtgggcggcgctgtggctcacgctttgggtttcagtatgggcattccagtattgggcgtgcatcatatggaagggcatttgctggcgccaatgcttgaacagaatccaccggcttttccttttgttgcgttgctagtgtctggtggccatacccagctggtgcaggtcagcggtatcggcgagtacattcttttgggtgagtcggttgacgacgccgccggagaagcgttcgacaaaaccgccaaaatgctgggactggattacccgggtgggcccagagttgcggcattggctgaaaaagggcaggccgggcgttatcgctttccgcggccgatgacagaccgcccggggcttgacttcagcttcagcgggttgaaaacctttactctgaataccgttaatgccgcgcgcgcggcgggtgatttgggcgatcagacccgtgctgacattgccctggcattcgaatctgcggtggtggacaccttggcgatcaaatgtaagcgcgcgttacagctcaccgggtgcaaacgcttggtgatcgccggtggcgtcagcgccaacacgcggcttcgggccggccttgaggcgatgacggcgaaacttggcgcctcggtgttttacgctcggccggagttctgtaccgataacggagcgatgattgcctacgccggggcccagcgcttgcgggcagggcagcaagatggtgatcgcattgcggcggtgccgcgctggccgctggagtctttgccacccttgagtcagccttgcaatgatggcttggcgggtgcttga

SEQ ID NO: 42379 - protein, 352 aa, Marinobacter sp. ELB17
MLILGIETSCDETGVALYHTERGLLAHALFSQVAIHADYGGVVPELASRDHVRKLLPLIEQILAEAGLARADIEGIAYTAGPGLAGALMVGGAVAHALGFSMGIPVLGVHHMEGHLLAPMLEQNPPAFPFVALLVSGGHTQLVQVSGIGEYILLGESVDDAAGEAFDKTAKMLGLDYPGGPRVAALAEKGQAGRYRFPRPMTDRPGLDFSFSGLKTFTLNTVNAARAAGDLGDQTRADIALAFESAVVDTLAIKCKRALQLTGCKRLVIAGGVSANTRLRAGLEAMTAKLGASVFYARPEFCTDNGAMIAYAGAQRLRAGQQDGDRIAAVPRWPLESLPPLSQPCNDGLAGA

SEQ ID NO: 42380 - DNA, 1041 bp, Erythrobacter sp. SD-21
  CDS (1)..(1041): transl_table=11
atgacactcgtactgggcatagagagttcctgcgacgaaaccgccgccgcgcttgtcgacggcgagcggcgcatcgtggcgcagcggatcgcctcgcaggatgccgagcacgcgcccttcggcggtgtcgtgcccgagatcgccgcgcgcgcccatgccgagcggctcgccccgatgatcgaaggcgtgctggccgatgcgaatgtcgctctgggcgatctcgatgcgattgccgccaccgcgggtccgggcctcatcggcggggtcatggtcgggctggtgagcgccaaggcgctggccatggcgagcgatgtgccgctgattgcggtgaatcatctcgaaggccatgcgctgagcccgcggcttgccgacgcgtctctcgattttccctatgcactgctgctcgtatcgggtggccattgccagatcctgcgggtcgatggggtcgggcagtaccgccgcctcgcgactaccatcgacgatgcgctgggcgaagctttcgacaagaccgccaagatcctgggcctcggcttccccggcggccctgcggtggagcgcgtggcgaaggagggagatgccaaagcggtccccctgccccgccccatggtcggcagcggcgagccgcatttcagcttcgccggtctcaagagcgcggtcctgcgcgcgcatgagtgcggccgatacaggtccgaagacatcgccgcgagcttccagcaggcggccatcgactgcgtcaccgaccgcctgcggatcgcgctggtccagatgcaggattgcaagacgctggtggtggccggcggggtcgccgccaacgcctcggtacgcgccgcgctcgaaggggtggccgaagcccacgcgatgcgcttcaccgcaccgccgcccaagctgtgcacggataacgccgcgatgattgcgtgggcggggatcgagcggctggcgcttcccggtttcacccccgacccgctcgacatttccgcgcggccccgctggccgctcgacccgacagcagaacccgttcgcggggcaggagtcaaggcatga

SEQ ID NO: 42381 - protein, 346 aa, Erythrobacter sp. SD-21
MTLVLGIESSCDETAAALVDGERRIVAQRIASQDAEHAPFGGVVPEIAARAHAERLAPMIEGVLADANVALGDLDAIAATAGPGLIGGVMVGLVSAKALAMASDVPLIAVNHLEGHALSPRLADASLDFPYALLLVSGGHCQILRVDGVGQYRRLATTIDDALGEAFDKTAKILGLGFPGGPAVERVAKEGDAKAVPLPRPMVGSGEPHFSFAGLKSAVLRAHECGRYRSEDIAASFQQAAIDCVTDRLRIALVQMQDCKTLVVAGGVAANASVRAALEGVAEAHAMRFTAPPPKLCTDNAAMIAWAGIERLALPGFTPDPLDISARPRWPLDPTAEPVRGAGVKA

SEQ ID NO: 42382 - DNA, 1044 bp, Moritella sp. PE36
  CDS (1)..(1044): transl_table=11
atgcgcgtaataggaatagaaacatcatgtgatgagaccggcattgcaatttattgtgatgaaaaagggctaatggctcatcaactttatagccaagtaaaactgcatgccgattatggcggtgtagtaccggaattagcgtcacgtgaccatgtgcgtaaaattattccactgattaaagcggcactgatcgaagcgggctgtacgaaagatgatatcgacggcattgcttataccacaggaccgggattggttggtgcacttatggtgggtgcgaccgttggccgtagcctcgcttatgcatgggacattccggcattaggtattaaccatatggaaggtcatatgttagcgccaatgctggaagagcatacccctgactttccgttcttagcgatgctagtgtcgggtggtcatacgcaaattgtccgtgttggcggtattggtcagtatgaattgctgggcgagtcggtcgatgatgcagcgggtgaagcatttgataaaaccgctaaattactgggtttagattatccaggtggacctcgcttatcggcattggctgataaaggggttgcaggacgttatcggttcccgcgtccaatgactgaccgccccggtttagattttagtttctccgggctaaaaacattcgcggcgaataccattgccaaagaaaagaaattagcagaagaagcgggtgccgatggcgttgatgagcaaacccgtgctgatattgcgtttgcattccaagacgcagtcgttgataccatttcaattaagttaagacgggcaatcaaagaaaccggtattaaacgtctggttgttgctggtggtgtgagtgccaataaatacttgcgtatcaagttagccgagatgatggataagcaaaacggcgaagttttctatccgcgtattgagttctgtactgacaatggcgcgatgatcgcgtatgccggtttacaacgtttacgtcacggtggtgatgacagcttagagatcattgcacgaccacgttggccattagatcaaatggatgcgatataa

SEQ ID NO: 42383 - protein, 347 aa, Moritella sp. PE36
MRVIGIETSCDETGIAIYCDEKGLMAHQLYSQVKLHADYGGVVPELASRDHVRKIIPLIKAALIEAGCTKDDIDGIAYTTGPGLVGALMVGATVGRSLAYAWDIPALGINHMEGHMLAPMLEEHTPDFPFLAMLVSGGHTQIVRVGGIGQYELLGESVDDAAGEAFDKTAKLLGLDYPGGPRLSALADKGVAGRYRFPRPMTDRPGLDFSFSGLKTFAANTIAKEKKLAEEAGADGVDEQTRADIAFAFQDAVVDTISIKLRRAIKETGIKRLVVAGGVSANKYLRIKLAEMMDKQNGEVFYPRIEFCTDNGAMIAYAGLQRLRHGGDDSLEIIARPRWPLDQMDAI

SEQ ID NO: 42384 - DNA, 1056 bp, Magnetospirillum gryphiswaldense
  CDS (1)..(1056): transl_table=11
gtgctgattcttggaatcgagacaagttgcgatgaaaccgccgcggcaatcgtcgacggcgaccggcacattctggccgatgtggtgttgtcgcaaattgacgttcatcgtccctatggcggaattgtccccgaggtcgccgcccgcgcccatctggaaaacgccgatctgatggtggccgaggcgatgaagcaggccggcataagcttcgcccaactggacgcggtggcggccaccggcggccccggcctgatcggcggcgtcatggtcggcgtgatgaccgccaaggccattgcgctggcggcgcaaaagccgtttctggccgtcaaccatctggaaggccacgcgctgaccgcgcggctgaccgacgatatcgctttcccctatctgctgctgctggcctcgggcggacattgccagttgctggcggtactcggtgtcggcgattaccgccgcctgggcaccaccatcgacgatgcggtgggcgaggccttcgacaaggcggccaagatgatcggcctgggctatcccggcgggccgcagatccaggcctgggcggccaagggcgatgccgcccgctttattctgccccgcccgatgaagggcaagcccggctgtgatttcagtttttccgggctgaagaacgccgtccgcctgctggtggaaagcctgcccaagccgttgtcggaccaagacatcgccgacgtcgccgccggctttcaggcggcggtggcgcaatccatggccgaccgtacccgccgcgccatcgagctgttcacccgccaatggccccagggcaagcatctggtggtggccggcggcgtcgccgccaacagcgcgttgcgagccgaactgaccaatctggcggccaaggccggcctgaccttcatcgcgccgccgttgaaattgtgcaccgacaatgccgccatgatcgcctgggccggggtggaacgctttcgcctggggctggtcgacggcctggatttcgccccccgtccgcgctggccgctggaccccaccgcccccaaggccaaaggcgccggcgtcaaggcttag

SEQ ID NO: 42385 - protein, 351 aa, Magnetospirillum gryphiswaldense
MLILGIETSCDETAAAIVDGDRHILADVVLSQIDVHRPYGGIVPEVAARAHLENADLMVAEAMKQAGISFAQLDAVAATGGPGLIGGVMVGVMTAKAIALAAQKPFLAVNHLEGHALTARLTDDIAFPYLLLLASGGHCQLLAVLGVGDYRRLGTTIDDAVGEAFDKAAKMIGLGYPGGPQIQAWAAKGDAARFILPRPMKGKPGCDFSFSGLKNAVRLLVESLPKPLSDQDIADVAAGFQAAVAQSMADRTRRAIELFTRQWPQGKHLVVAGGVAANSALRAELTNLAAKAGLTFIAPPLKLCTDNAAMIAWAGVERFRLGLVDGLDFAPRPRWPLDPTAPKAKGAGVKA

SEQ ID NO: 42386 - DNA, 993 bp, Nosema bombycis
  CDS (1)..(993)
atgatctcattgggaatagaaggcagtgccaataaaatcggaataggaataattaaaggtagagagatcctttctaatgaaagaagaacatacgtaccacctacaggagaagggtttataccatcaaaaacagcagaacatcatagaaataatattttaagtttgcttaaggaatctttaaaaaaggctaagatccaacttaaagacgtagatgttttttgttatacgaaaggtccgggtatgggccaggctttgtcaacgacagccactgttgtccgaatgcttagtctcttttttaataagcctttggtacccgtaaaccactgtatagctcacattgaaatggggagatttataacaaaagccaggaatccaacaattttgtatgccagtggaggaaatacacaaatcatctcgtacagtaacagaagatacaaaatttttggggagaccttggataatgcggtgggcaattgtcttgataaagccgccaggattttaaaattgccaaatgatccttctccgggtttaaatattgaaatttatgcccgaaaaggacgtaaatattacgaattgccttatgtcgtaaaaggaatggatatttctttatcaggaatcatttcttcaattaaagaaattccaataattgatgaacaaactgtttgtgatttgtgttattccttacaagaaactgtttttgctgctttagtggaagtgactgaaagagcaatggcttttaatgatagcactgaagttctaattgtaggtggtgttgggtgtaatttaagacttcaagagatgatgaaggttatggctgaggctcgtggtgctacactttattctactgatgaaagattttgcatagacaatggagccatgatttctctggcaggtcttttgatgcatgaaagtggacagagatttactttagaagaatgttttataacacaaagatttaggactgactctgtggaagtgacgtggagagattaa

SEQ ID NO: 42387 - protein, 330 aa, Nosema bombycis
MISLGIEGSANKIGIGIIKGREILSNERRTYVPPTGEGFIPSKTAEHHRNNILSLLKESLKKAKIQLKDVDVFCYTKGPGMGQALSTTATVVRMLSLFFNKPLVPVNHCIAHIEMGRFITKARNPTILYASGGNTQIISYSNRRYKIFGETLDNAVGNCLDKAARILKLPNDPSPGLNIEIYARKGRKYYELPYVVKGMDISLSGIISSIKEIPIIDEQTVCDLCYSLQETVFAALVEVTERAMAFNDSTEVLIVGGVGCNLRLQEMMKVMAEARGATLYSTDERFCIDNGAMISLAGLLMHESGQRFTLEECFITQRFRTDSVEVTWRD

SEQ ID NO: 42388 - DNA, 1098 bp, Ostreococcus tauri
  CDS (1)..(1098)
atggcgccgagcgacgaacgagcgtgcacgcgcgcgctcggtctggagggatcggcgaataagatcggcgtcggcgtcgtgcgctcggacgggacgatcgaatcgaatccgagggagacgtacgtcacgccgccgggctcggggttcttaccgaacgacacggcgagacatcaccgagcgcgggtggttgacttggtgcgaaaggcgctgcgagaggctggggtgacgatgggggagattgacgtggtggcgtacacgaggggaccggggatgggggcgccgttgacggctgtcgcggcgtgcgcgcgaacgctggcgggtctgtacgataaaccgatggtgggggtgaatcactgcgtggcgcacatagagatgggacggttggtgacggggtgcgatgatccggtgatcttgtacgcgagcggagggaacacgcaggtgatcgcgtacaacgagcggaggtatcgcatattcggcgaaaccatcgacatcgcggtggggaacatgttagacaggttcgccagggtgtgtgggctcagtaacgacccggcgccggggtataacatcgagcaggaggcgaagaaggggaagaagttcgtggaggggccgtacggggtgaaagggatggacgtcaatctgagcggtattttaaccttttacaagacgtacgccgaggagaatttgggtaaaggtgaggtcacggtggcggatttgtgcttctcgatgcaagaaactgtgttttcgatgctagttgagatcactgagcgcgcgatggcgcacgtgaatgcgaaggatgtgatgatcgtcggcggcgttggatgtaacttgcgattgcaagagatgatggccatcatggcgcgcgaacgcggaggcaaactgtacggtctggacgagaacggcagaatggatgatcgattttgtattgataacggtgcgatgatcgcgcacaccgggttgattcagtacttgaacggggagacgacgccgatcgaggagacggagtgcacgcaacgatttcgcacggatgaggtcctcgtcacgtggcgagacaaggcggggacgaagcgcacggcggagggttcgccagcggcttcgtga

SEQ ID NO: 42389 - protein, 365 aa, Ostreococcus tauri
MAPSDERACTRALGLEGSANKIGVGVVRSDGTIESNPRETYVTPPGSGFLPNDTARHHRARVVDLVRKALREAGVTMGEIDVVAYTRGPGMGAPLTAVAACARTLAGLYDKPMVGVNHCVAHIEMGRLVTGCDDPVILYASGGNTQVIAYNERRYRIFGETIDIAVGNMLDRFARVCGLSNDPAPGYNIEQEAKKGKKFVEGPYGVKGMDVNLSGILTFYKTYAEENLGKGEVTVADLCFSMQETVFSMLVEITERAMAHVNAKDVMIVGGVGCNLRLQEMMAIMARERGGKLYGLDENGRMDDRFCIDNGAMIAHTGLIQYLNGETTPIEETECTQRFRTDEVLVTWRDKAGTKRTAEGSPAAS

SEQ ID NO: 42390 - DNA, 1041 bp, Solanum tuberosum
  CDS (1)..(1041)
atgatggataagaaattgatatccctatggttcgagagtgccgccaaaaaaattggcgtcggagtagtagcaatcgacggcacaattctttctaatccacgacacacctacataacgccgccaggccaaggttttctcccccgtgaaaccgcccagcatcaccaccaacacatcttaccgttagtaaaatccgctctagaaaccgccggagtaactcccgatgaaattgactgtatctgctacacaaaaggccctggaatgggtgctccactgcaggtttcggcagtggttgtacgtgttctatctcagctatggaagaaacctattgtgggggttaaccactgtgttgcgcacattgaaatgggtcggatcgtaaccggggcggttgacccggttgtgctgtacgtgagtggtggaaatactcaggttattgcgtacagtgaaggacggtataggatttttggggagacgattgatattgctgtggggaattgcttggataggtttgctagggttcttacattgtctaatgatcctagccctgggtacaacattgaacagcttgcgaaaaaaggcgaaaagttcattgaacttccatatgttgtaaagggaatggatgtttccttcagtggaatactgagcttcattgaagccacagctgaggagaagctgaaaaataacgagtgtagtccggctgacctttgtttctctttgcaggaaactctctttgcgatgcttgtagagataacagaacgagccatggcgcattgtgataagaaagatgtgttgattgttggtggtgtaggatgcaatgagcgcttgcaaaagatgatgcaaattatgtgctctgagaggggcggaaatttgtttgcaactgacgatagatactgcgttgacaatggagcaatgattgcttataccggtctcctagagtatgcgaatggtgcatcaactccaatggaggaatcaacattcactcaacggtttagaactgatgaggtcctcgcaacttggagggagaaggaatcagctatagcatga

SEQ ID NO: 42391 - protein, 346 aa, Solanum tuberosum
MMDKKLISLWFESAAKKIGVGVVAIDGTILSNPRHTYITPPGQGFLPRETAQHHHQHILPLVKSALETAGVTPDEIDCICYTKGPGMGAPLQVSAVVVRVLSQLWKKPIVGVNHCVAHIEMGRIVTGAVDPVVLYVSGGNTQVIAYSEGRYRIFGETIDIAVGNCLDRFARVLTLSNDPSPGYNIEQLAKKGEKFIELPYVVKGMDVSFSGILSFIEATAEEKLKNNECSPADLCFSLQETLFAMLVEITERAMAHCDKKDVLIVGGVGCNERLQKMMQIMCSERGGNLFATDDRYCVDNGAMIAYTGLLEYANGASTPMEESTFTQRFRTDEVLATWREKESAIA

SEQ ID NO: 42392 - DNA, 1059 bp, Methylocapsa acidiphila
  CDS (1)..(1059): transl_table=11
atgcgcgttcttggcattgaaaccacctgcgacgaaaccgccgccgccgtcgtccggctcgaaccgggcggcgccggggaaatcctctcaaacgaagtcatgagccaaatcgcggagcacgcggcctatggcggcgtcgtgccggagatcgcggcgcgcgcccatatcgacatcattgatcggctcgtcctgcgcgccctcgcccacgccgggacgcgattggccgatctcgatggcatagcagccgccgcagggcctggcctcatcggcggcgtcatcgtcggcctcacgaccgccaaggcgctcgccttagccagccgtaagcccttcatcgctgtcaatcatctcgaggcccatgcgctgacggcgcggcttaccgacgccctcgaatttccctatctgctcctgctcgtctccggcggacacacgcagctcgtcgcagtaagaggcgtcggcgattatctccgtctcggttcgacggtcgacgacgccgtgggcgaggccttcgacaagatcgcaaaaatgctcggcctgccctatcccggcggccccgaggtcgagaagcgcgcggcggagggcaatgcggcgcgcttcgacttcccgaggcccatgctcgggcggccgaagccggacttctccctctccggcctcaagaccgccgtcaggctcgaaatggagcggctgaattccctcagcccgacggatgtcgccgatctctgcgcctcgttccaggcggcggtcgtcgacatgatcatcgatcgctcacgcgtcggcttgcgcctgtttcgcgaaacggtcggtccctcgaacgccatggtcgtcgccggcggggtcgccgccaatggcgcgatccgccgcgcgctcatgcgcttttgcggcgagagcggcatgcggctcgtcctgccgccgccgcagctctgcaccgataatggggcgatgatcgcctgggccgggctcgagaggctgtcgcttggcctcatcgacgatctgaccttcgccgcgcgggcccgctggccgctcgacgccaatgcggaagccgtgcatcacggcaaggcgtga

SEQ ID NO: 42393 - protein, 352 aa, Methylocapsa acidiphila
MRVLGIETTCDETAAAVVRLEPGGAGEILSNEVMSQIAEHAAYGGVVPEIAARAHIDIIDRLVLRALAHAGTRLADLDGIAAAAGPGLIGGVIVGLTTAKALALASRKPFIAVNHLEAHALTARLTDALEFPYLLLLVSGGHTQLVAVRGVGDYLRLGSTVDDAVGEAFDKIAKMLGLPYPGGPEVEKRAAEGNAARFDFPRPMLGRPKPDFSLSGLKTAVRLEMERLNSLSPTDVADLCASFQAAVVDMIIDRSRVGLRLFRETVGPSNAMVVAGGVAANGAIRRALMRFCGESGMRLVLPPPQLCTDNGAMIAWAGLERLSLGLIDDLTFAARARWPLDANAEAVHHGKA

SEQ ID NO: 42394 - DNA, 1008 bp, Aquifex aeolicus
  CDS (1)..(1008): transl_table=11
atgaggacattagcagttgagacctcgtgtgatgaaaccgctcttgctatttatgacgaccaaaaaggcgtactgggaaacgtaatactttcacaggccgtagttcactcccccttcggtggggtcgttcccgaactctctgcaagggagcacacgagaaacatacttcctatattcgacagactcttaaaggaaagccgaataaatcttgaggagatagactttatttcctttaccctaactcccggattgatactttcgctcgtggtgggtgtagcctttgcaaaggcccttgcctacgagtacagaaaacctttagttcccgttcaccacctggaaggtcacatatactctgttttcctagaaaaaaaggttgaatatccctttctcgctctgataatttcaggtgggcacacggatctttaccttgtaagggactttgggaggtacgattttctcggaggtactctggacgacgctgtcggggaagcctacgacaaagttgcaaaaatgctcggtctgggataccccggaggtcccataatagaccgactggctaaagagggaaagaaattataccctttacccaaaccacttatggaggaaggaaacttaaacttctccttcagtgggcttaaaacggcgatactgaacctcttaaaaaaggaaaaaaacgtaaggaaagaggatatcgcttactcattccaggaaacggtggtagaaatactactcgaaaaaagcctctgggctatgaaaaaaacggggataaaaaggcttgttgtggtaggaggagtgtccgcaaactcgaggctgagggaagtgttcaaaaaagcttctcaagagtacggttttgaactctacataccgcatccgagtctctctacggacaacgcccttatgatagcttacgccggtatggagaggttcaagaggggtgttgtagcacctctggatgtaaatccccaacccaatattcccctggaggagttcggaaggatatggacttga

SEQ ID NO: 42395 - protein, 335 aa, Aquifex aeolicus
MRTLAVETSCDETALAIYDDQKGVLGNVILSQAVVHSPFGGVVPELSAREHTRNILPIFDRLLKESRINLEEIDFISFTLTPGLILSLVVGVAFAKALAYEYRKPLVPVHHLEGHIYSVFLEKKVEYPFLALIISGGHTDLYLVRDFGRYDFLGGTLDDAVGEAYDKVAKMLGLGYPGGPIIDRLAKEGKKLYPLPKPLMEEGNLNFSFSGLKTAILNLLKKEKNVRKEDIAYSFQETVVEILLEKSLWAMKKTGIKRLVVVGGVSANSRLREVFKKASQEYGFELYIPHPSLSTDNALMIAYAGMERFKRGVVAPLDVNPQPNIPLEEFGRIWT

SEQ ID NO: 42396 - DNA, 1041 bp, Bacillus subtilis
  CDS (1)..(1041): transl_table=11
atgagtgagcaaaaagacatgtacgtattaggaattgaaacaagctgtgatgagactgctgcagctattgtgaaaaacgggaaagagatcatttcaaacgtagtagcctctcaaattgaaagccataagcgcttcggaggcgttgttccggaaattgcttcaagacatcatgttgaacaaatcactttggttatagaagaggcgtttcgcaaagctggcatgacgtatagtgatattgatgcgattgcagtaacagaaggtccgggactggtgggagcgcttcttatcggagtgaatgccgctaaagcattgagctttgcatataacattccgttagtaggcgttcatcatatagccggtcatatatacgcgaaccgtcttgtagaagacatcgtgttcccggcactggcattggtcgtttcaggaggccatacagaactggtttatatgaaggaacatggatcatttgaagtcattggggaaacccttgatgatgcggcaggagaagcctacgacaaagtggcgcggacgatgggattgccatatccgggtggaccgcaaattgacaagctagctgaaaaagggaatgacaatattccgcttcctcgcgcatggcttgaagaaggctcttacaacttcagctttagcggattgaagtctgcggtgatcaatacgcttcataatgcatcccaaaaagggcaagagattgctccggaagatttgtctgccagtttccaaaatagtgtgatcgatgtcttggtaaccaaaacggcgcgcgcggcaaaggaatatgatgtcaaacaggtccttttagccggaggagtagctgcaaacagaggcctcagagctgcattagaaaaggaatttgcccagcatgaagggattacgcttgtcattcctccattagctttatgcacggataatgctgcgatgattgctgctgctggtacaattgcttttgaaaaaggaattcgcggtgcatatgatatgaatggccagcccggccttgaattgacttcttatcaaagtctcacgagataa

SEQ ID NO: 42397 - protein, 346 aa, Bacillus subtilis
MSEQKDMYVLGIETSCDETAAAIVKNGKEIISNVVASQIESHKRFGGVVPEIASRHHVEQITLVIEEAFRKAGMTYSDIDAIAVTEGPGLVGALLIGVNAAKALSFAYNIPLVGVHHIAGHIYANRLVEDIVFPALALVVSGGHTELVYMKEHGSFEVIGETLDDAAGEAYDKVARTMGLPYPGGPQIDKLAEKGNDNIPLPRAWLEEGSYNFSFSGLKSAVINTLHNASQKGQEIAPEDLSASFQNSVIDVLVTKTARAAKEYDVKQVLLAGGVAANRGLRAALEKEFAQHEGITLVIPPLALCTDNAAMIAAAGTIAFEKGIRGAYDMNGQPGLELTSYQSLTR

SEQ ID NO: 42398 - DNA, 1014 bp, Buchnera aphidicola subsp
  CDS (1)..(1014): transl_table=11
atgaaagttttaggtattgaaacatcctgtgatgatactggtatagctatttatgatgtttctaaaggtttgttaattaatgaattacatagtcaaaaaaaaatacatgctaattatggaggtattattccagaattagcatctcgtgaacatacaaggaaaataatttttttattagataaaatttttaaagaaaaaaatattatgaaggaaattgatcttattgcatatactgcgggacctggtttagctggttctttattagttggtgctacatttgcatgttctttaggtttttctttaaatattcctgttttacctgttaatcatatggaagcgcatttattatcaccaatgttagagtataagtcaatgcaatttccatttatcgcattgttagtttccggaaaacatacacaaataatcgctgcttatgaattaggaaaatatgaaatattaggaaattctttagatgatgcagcaggtgaagcttttgataaagtatcaaaaatgttaggattgaaatatccgagtggacgtgaactatctagtttagctgctcagggaataaaaaattatttttattttcctcgacctatgatacatcattcaagcttaaattttagtttttcaggtttaaaaacttttacttctaaagttattagtaataatactttaaatattcaacaaaaagctaatattgcaagagcttttgaagatgcagtaattgatgtactattaattaaaactaaaaaagcgttatacaagaaaggatggaaacgtttagttatagcaggcggtgtcagtgcaaatactgtattacgcaaaagatcgaaagacatgatggaaaacgtttttcatggaaaagttttttattcttcattaaaattttgtacagataatggtgccatgattgcctatcttggatctctacgttataaagaagcaagcgtttctcaattggagataattgtgaaaccaaaatggtctatagataagttatcttatatttaa

SEQ ID NO: 42399 - protein, 337 aa, Buchnera aphidicola subsp
MKVLGIETSCDDTGIAIYDVSKGLLINELHSQKKIHANYGGIIPELASREHTRKIIFLLDKIFKEKNIMKEIDLIAYTAGPGLAGSLLVGATFACSLGFSLNIPVLPVNHMEAHLLSPMLEYKSMQFPFIALLVSGKHTQIIAAYELGKYEILGNSLDDAAGEAFDKVSKMLGLKYPSGRELSSLAAQGIKNYFYFPRPMIHHSSLNFSFSGLKTFTSKVISNNTLNIQQKANIARAFEDAVIDVLLIKTKKALYKKGWKRLVIAGGVSANTVLRKRSKDMMENVFHGKVFYSSLKFCTDNGAMIAYLGSLRYKEASVSQLEIIVKPKWSIDKLSYI

SEQ ID NO: 42400 - DNA, 1023 bp, Helicobacter pylori
  CDS (1)..(1023): transl_table=11
atgattttaagcattgaaagttcttgcgatgacagctctttagcccttacaagaatagaggacgctcaactcatcgctcattttaaaatctctcaagaaaagcaccatagttcttatgggggcgttgtgcctgagcttgcatcacgtttgcatgctgagaatttgccgcttttattagaacgcattaaaataagcttgaataaggatttttccaaaattaaagccatcgctatcactaatcagccaggtttgagcgttactttaatagaaggtttgatgatggcaaaagccttgagcttgtctttgaatttgcccttgattttagaagatcatttgagagggcatgtgtattcgctctttatcaatgaaaaacaaacctgcatgcctttaagcgtgctcttagtctctggggggcattctttgattttagaggctagagattatgagaatattaaaatcgttgccacgagtttagacgatagctttggggagagttttgataaggtttccaaaatgcttgatttaggctatccaggaggccctatagtggaaaaattagcccttgattataggcacccaaacgagcctttaatgttccctatccctttaaaaaacagcccgaatctggcttttagtttttcaggtttaaaaaatgcggtgcgtttggaggttgaaaaaaacgcccccaacttgaatgaagcgatcaaacaaaagattggctatcattttcaaagtgcagcgattgagcatttaatccagcagactaaacgctattttaaaatcaaacgccctaaaatttttggcattgtggggggagcgagccaaaatttggctttaagaaaggcgtttgaaaatttgtgcgatgcgtttgattgcaagcttgttttagcccctttagaattttgcagcgacaatgccgccatgatagggcgatccagcctagaagcttatcaaaaaaagcgctttgtccctttagaaaaggctaacatttcgccaagaacgctgttaaaaagttttgagtga

SEQ ID NO: 42401 - protein, 340 aa, Helicobacter pylori
MILSIESSCDDSSLALTRIEDAQLIAHFKISQEKHHSSYGGVVPELASRLHAENLPLLLERIKISLNKDFSKIKAIAITNQPGLSVTLIEGLMMAKALSLSLNLPLILEDHLRGHVYSLFINEKQTCMPLSVLLVSGGHSLILEARDYENIKIVATSLDDSFGESFDKVSKMLDLGYPGGPIVEKLALDYRHPNEPLMFPIPLKNSPNLAFSFSGLKNAVRLEVEKNAPNLNEAIKQKIGYHFQSAAIEHLIQQTKRYFKIKRPKIFGIVGGASQNLALRKAFENLCDAFDCKLVLAPLEFCSDNAAMIGRSSLEAYQKKRFVPLEKANISPRTLLKSFE

SEQ ID NO: 42402 - DNA, 948 bp, Mycoplasma genitalium
  CDS (1)..(948): transl_table=4
atggaacaaccgttgtgtgttttagggattgaaacaacctgtgatgatacaggtcttagtattgtcattgatcaaaaaatcaagagtaacattgttatctcttctgctaacttacatgtaaaaacaggaggagttgtacctgaaattgcagcacgatgccacgaacaaaatctctttaaagcaataagagatttaaattttgagataagagatttatctcacattgcttatgcatgtaatcctgggttagcaggatgtttacatgtgggagccacttttgctagaagcttaagtttcttattagacaaaccattgttacccatcaaccatctttatgcgcatatcttttcttgtttaattgatcaagatttaaataagctgcaattaccagcattaggccttgtaatttcaggtggacatactgccatttatctagttaaatcattttatgaacttgaactaattgctgaaactagtgatgatgcaattggtgaagtttatgacaagataggcagagcaatgggctttgattatcctgctggtagtaaaattgatagtctttttaataaagaattagttaaacctcactatttctttaaaccttctactaagtgaactaagttttcctattctggtttaaaatctcagtgtttaaacaagattaaacaaataagtgctaataaaacccgaattgattggagtgaattagcatccaattttcaagctactattattgatcattacattgatcatgttaaaaatgcaattaaaaaatttgcccctaaaatgttgttagtaggaggtggagttagtgccaattcttatctatctaacagaattagtacattaaatttaccctttttaattgctgatagcaaatacaccagtgataatggagcaatgattggtttttatgcatcacttttaattaatggcgataagaattaa

SEQ ID NO: 42403 - protein, 315 aa, Mycoplasma genitalium
MEQPLCVLGIETTCDDTGLSIVIDQKIKSNIVISSANLHVKTGGVVPEIAARCHEQNLFKAIRDLNFEIRDLSHIAYACNPGLAGCLHVGATFARSLSFLLDKPLLPINHLYAHIFSCLIDQDLNKLQLPALGLVISGGHTAIYLVKSFYELELIAETSDDAIGEVYDKIGRAMGFDYPAGSKIDSLFNKELVKPHYFFKPSTKWTKFSYSGLKSQCLNKIKQISANKTRIDWSELASNFQATIIDHYIDHVKNAIKKFAPKMLLVGGGVSANSYLSNRISTLNLPFLIADSKYTSDNGAMIGFYASLLINGDKN

SEQ ID NO: 42404 - DNA, 1056 bp, Mycobacterium leprae
  CDS (1)..(1056): transl_table=11
atgacgatctctgctgtgcccggcacgattatcttggccatcgaaacctcttgcgatgaaaccggtgttggtattgcctgcctcgatgactatggcaccgtgacattgttggctgacgaggtggcttccagcgtcgacgagcaggcccggtttggtggtgtggtgcccgagattgcctcacgggcgcatctagaggctcttggccccaccatacgctgcgcgcttgctgctgccggcctgaccggttcggccaagccagatgttgtagccgccacgatagggcccgggttagccggtgctttgttggtaggagtggctgcggctaaagcgtactcggctgcctggggagtgccgttctacgccgtgaaccacctgggtggacacctggctgccgacgtctacgaacatggaccgttgcccgagtgtgtggcgctactggtgtctggaggccatacccacctgttgcaggtgcgttcacttggggcgcccattgtcgagctgggcagtaccgtcgacgacgccgccggtgaagcttacgataaggtcgcgcgcctactgggattgggttatccaggcggtaaagtgctagacgacctagctcgtaccggcgatcgggatgccattgtgttcccacgcggcatgactgggccggccgacgacctaaacgcgttcagcttttcagggctcaaaaccgctgtcgcacgatatgtcgagagtcaccccgacgcgctgccggccgatgtcgccgctgggtttcaggaggctgtcgccgatgtgttgaccatgaaggcggtgcgtgcggcgaccgggctcggcgtttccactttgttgatcgtcgggggagtggccgcgaattcgcggctgcgcgagctagccgcgcagcgctgcgcggcggcggggctgatgctgcggatcccagggccgcggttctgcaccgacaacggggcgatgatcgccgcgttcgccgcacatctgctggctgcggccgcgccaccgtcaccgttggatgtgcccagcgacccgggccttccggtggtaaaaaggcagattaattga

SEQ ID NO: 42405 - protein, 351 aa, Mycobacterium leprae
MTISAVPGTIILAIETSCDETGVGIACLDDYGTVTLLADEVASSVDEQARFGGVVPEIASRAHLEALGPTIRCALAAAGLTGSAKPDVVAATIGPGLAGALLVGVAAAKAYSAAWGVPFYAVNHLGGHLAADVYEHGPLPECVALLVSGGHTHLLQVRSLGAPIVELGSTVDDAAGEAYDKVARLLGLGYPGGKVLDDLARTGDRDAIVFPRGMTGPADDLNAFSFSGLKTAVARYVESHPDALPADVAAGFQEAVADVLTMKAVRAATGLGVSTLLIVGGVAANSRLRELAAQRCAAAGLMLRIPGPRFCTDNGAMIAAFAAHLLAAAAPPSPLDVPSDPGLPVVKRQIN

SEQ ID NO: 42406 - DNA, 978 bp, Pasteurella haemolytica
  CDS (1)..(978): transl_table=11
atgcgaattttaggtattgaaacctcttgtgatgaaaccggtgttgccatttatgatgaagacaaaggcttagtggcaaaccagctttatagccaaattgatatgcacgccgattacggtggcgtagtccctgaactggcttctcgagaccatatccgtaaaacgttgccactaattcaagaagccttaaaagaggccaatctgcaaccctcggatattgacggcattgcctatactgccggcccaggcttggtcggggctttattggtcggctcaaccattgcccgttcgctggcttatgcttggaatgttccggcattgggcgttcaccatatggaagggcatttacttgccccaatgttggaagaaaatgcccctgaatttccgtttgtggcattattgatttcaggtggacacacccaactggtaaaagttgacggcgttgggcaatacgaactactcggggaatcaattgatgatgctgccggtgaagcctttgacaaaacaggcaaactactcggtttggattaccctgccggtgtagcgatgtcaaaattagccgaatccggcacgccaaatcgttttaaattccctcgtccaatgaccgacagaccgggactggatttcagtttctccggtttaaaaacctttgctgcgaatacgattaaagccaatcttaatgaaaatggtgaactcgatgagcaaaccaaatgcgatattgcccacgcattccaacaagccgtggttgatactattttaattaaatgcaagcgagcgttagagcaaaccggctataaacgcttagtaatggcaggcggcgtaagtgccaataaacaattacgagcagaccttgcggaaatgatgaaaaaattaaaaggcgaagtattctaccctcgcccacaattttgcactgacaacggcgcaatgattgcctacactggctttcttcgcttaaaaacgatgaacaaaccgacttaa

SEQ ID NO: 42407 - protein, 325 aa, Pasteurella haemolytica
MRILGIETSCDETGVAIYDEDKGLVANQLYSQIDMHADYGGVVPELASRDHIRKTLPLIQEALKEANLQPSDIDGIAYTAGPGLVGALLVGSTIARSLAYAWNVPALGVHHMEGHLLAPMLEENAPEFPFVALLISGGHTQLVKVDGVGQYELLGESIDDAAGEAFDKTGKLLGLDYPAGVAMSKLAESGTPNRFKFPRPMTDRPGLDFSFSGLKTFAANTIKANLNENGELDEQTKCDIAHAFQQAVVDTILIKCKRALEQTGYKRLVMAGGVSANKQLRADLAEMMKKLKGEVFYPRPQFCTDNGAMIAYTGFLRLKTMNKPT

SEQ ID NO: 42408 - DNA, 1014 bp, Salmonella typhimurium
  CDS (1)..(1014): transl_table=11
atgcgtgtactgggtattgaaacatcctgcgatgaaaccggcatcgctatttacgacgacaaaaagggtctgttagccaaccaattgtatagtcaggtgaaattacatgctgactacggcggcgtagtgcctgaactggcttcccgcgatcatgtgcgtaaaaccgtgccgctgattcaggcggcattaaaagaagccggtctgacggcgagcgatatcgacgcggtggcctataccgcaggcccgggcctggtcggcgcgctgctggtcggcgcaaccgtcgggcgttcactggcatttgcctggaatgtgccggccattcctgtacaccatatggaaggtcatctgctggcgccaatgctggaagataatcccccggaattcccgtttgtggcgctactggtctccggcggacatacgcagctcattagcgtgaccggaatcggtcagtacgaactgctgggagagtcgattgacgatgccgccggtgaagcgtttgataaaaccgccaaattgttggggctggattatcctggcggcccgatgctgtcgaaaatggcgtcgcaggggacggcggggcgttttgtctttccgcgcccgatgaccgatcgtccggggctggattttagtttttccggtctgaaaacctttgccgctaacaccattcgtagtaatggcggcgacgaacaaactcgcgctgatatcgcgcgcgcttttgaagatgcggtcgtggatacgctgatgatcaagtgcaagcgcgcgctggaaagcaccggttttaagcgtctggtcatggcgggcggcgtcagcgctaaccgcacgctgcgcgcgaagcttgccgaaatgatgcaaaaacgccgcggcgaagtgttctatgcgcgtccggagttttgtaccgacaacggggcgatgatcgcctatgccggaatggtgcggtttaaggcgggcgttacggcggatcttggcgtaacggtacgtccgcgctggccgctggccgagctgccggcggcgtaa

SEQ ID NO: 42409 - protein, 337 aa, Salmonella typhimurium
MRVLGIETSCDETGIAIYDDKKGLLANQLYSQVKLHADYGGVVPELASRDHVRKTVPLIQAALKEAGLTASDIDAVAYTAGPGLVGALLVGATVGRSLAFAWNVPAIPVHHMEGHLLAPMLEDNPPEFPFVALLVSGGHTQLISVTGIGQYELLGESIDDAAGEAFDKTAKLLGLDYPGGPMLSKMASQGTAGRFVFPRPMTDRPGLDFSFSGLKTFAANTIRSNGGDEQTRADIARAFEDAVVDTLMIKCKRALESTGFKRLVMAGGVSANRTLRAKLAEMMQKRRGEVFYARPEFCTDNGAMIAYAGMVRFKAGVTADLGVTVRPRWPLAELPAA

SEQ ID NO: 42410 - DNA, 1125 bp, Streptomyces coelicolor
  CDS (1)..(1125): transl_table=11
atggctgactcacgcgacgagcctctcgtcctggggatcgagacctcctgcgacgagaccggcgtcggtgtcgtgcgcggcaccaccctgctggccgacgccgtcgcgtccagcgtcgacgagcacgcccgcttcggcggcgtcgtgccggaggtggccagccgcgcccacctggaggcgatggtgccgaccatcgaccgcgccctcaaggaggcgggggtgagcgcccgcgacctcgacggcatcgccgtcaccgccggacccggcctcgcgggtgccctgctggtcggcgtctcggcggccaaggcgtacgcctacgcgctgggcaagccgctctacggcgtgaaccacctcgcctcgcacatctgcgtcgaccagctcgaacacggcgcgctgcccgagccgacgatggcgctgctggtctcgggcgggcactcctcgctgctcctgtccacggacatcacctcggacgtccgccccctcggcgccaccatcgacgacgcggccggcgaggccttcgacaagatcgcccgggtgctgaacctgggcttccccggcggcccggtcatcgaccggtacgcgcgcgagggcgacccgaatgccatcgccttcccgcgcggtctgaccggcccgcgcgacgcggcgtacgacttctccttctccggcctgaagacggccgtggcccgctggatcgaggcgaagcgggcggcgggggaggaggtgccggtgcgtgacgtgtcggcctccttccaggaggcggtcgtggacgtgctgacccgcaaggcggtgcgggcctgcaaggacgagggcgtcgaccacctgatgatcggcggcggcgtggccgccaactcgcggctgcgggcactggcccaggagcgttgcgaggcggccgggatccggctgcgggtgccgcgccccaagctgtgcacggacaacggcgcgatggtcgccgccctcggcgccgagatggtcgcccggaaccgggccgcctccgactgggacctctccgcggactcctccctgccggtgacggagccgcacgtgccgggacagggccacccgcacggtcacccgcacggccacgaccacgtgcacgaggtcagcaaggagaacctctactcgtga

SEQ ID NO: 42411 - protein, 374 aa, Streptomyces coelicolor
MADSRDEPLVLGIETSCDETGVGVVRGTTLLADAVASSVDEHARFGGVVPEVASRAHLEAMVPTIDRALKEAGVSARDLDGIAVTAGPGLAGALLVGVSAAKAYAYALGKPLYGVNHLASHICVDQLEHGALPEPTMALLVSGGHSSLLLSTDITSDVRPLGATIDDAAGEAFDKIARVLNLGFPGGPVIDRYAREGDPNAIAFPRGLTGPRDAAYDFSFSGLKTAVARWIEAKRAAGEEVPVRDVSASFQEAVVDVLTRKAVRACKDEGVDHLMIGGGVAANSRLRALAQERCEAAGIRLRVPRPKLCTDNGAMVAALGAEMVARNRAASDWDLSADSSLPVTEPHVPGQGHPHGHPHGHDHVHEVSKENLYS

SEQ ID NO: 42412 - DNA, 1059 bp, Treponema pallidum
  CDS (1)..(1059): transl_table=11
gtgaatgtcctcggaattgagacctcttgtgatgagactgcagttgcaattgtaaaagatggcacgcacgtgtgcagcaatgttgtggctacgcaaattccttttcatgcgccgtatcgtggcattgtcccagaacttgcaagtcgcaagcacattgagtggattttgccaacggtgaaagaggcgcttgcacgcgctcagctgacgcttgctgatatcgatggcatcgccgtaacacatgcacctgggctgaccggatctctcctggtaggcctgacgtttgcgaaaacactcgcatggtcaatgcaccttcctttcattgcggttaatcaccttcatgcacacttttgtgccgcgcacgtggagcacgatctggcatatccctacgtgggcttgctggcgtctggaggacatgcgctcgtatgtgttgtgcacgattttgatcaggtagaagcgcttggcgcaacgatcgacgacgctcccggggaagcctttgataaggttgcagccttttatggctttggatatccgggaggcaaggtaattgaaacgttagcagaacagggtgacgcgcgtgccgcgcgttttccgcttcctcattttcacggaaaagggcatcggtatgatgtatcatattcaggattgaagacagcagttattcatcagctcgatcacttttggaacaaggaatacgagcgcactgcgcagaacattgctgcggcgtttcaagcgtgtgcaatcaacatcttgctccgtccgcttgcgcgcgcattacaggatacagggctgccaacggcagtagtgtgcggaggtgttgcagcaaacagtttgctcagaaaatctgtagcggactggaagcatgcgcggtgtgtgttcccttcgcgtgagtactgtacagacaacgcggtgatggttgctgcgctcgggtaccgctatttgatccgtggtgataggagtttctatggggtaacagagcgttcgcgcattgcgcacttcagtaagcgcgggggagatcgtctcgctgcacagagaagcgctgcttctcagcctcttttttga

SEQ ID NO: 42413 - protein, 352 aa, Treponema pallidum
MNVLGIETSCDETAVAIVKDGTHVCSNVVATQIPFHAPYRGIVPELASRKHIEWILPTVKEALARAQLTLADIDGIAVTHAPGLTGSLLVGLTFAKTLAWSMHLPFIAVNHLHAHFCAAHVEHDLAYPYVGLLASGGHALVCVVHDFDQVEALGATIDDAPGEAFDKVAAFYGFGYPGGKVIETLAEQGDARAARFPLPHFHGKGHRYDVSYSGLKTAVIHQLDHFWNKEYERTAQNIAAAFQACAINILLRPLARALQDTGLPTAVVCGGVAANSLLRKSVADWKHARCVFPSREYCTDNAVMVAALGYRYLIRGDRSFYGVTERSRIAHFSKRGGDRLAAQRSAASQPLF

SEQ ID NO: 42414 - DNA, 1158 bp, Ashbya gossypii
  CDS (1)..(1158)
atggtaaatttgaataaggtccaacctcggagtggcggggaccactatcttgccctaggtatcgagggatcggcgaataaactgggcgttggaatactgaaacatcccatgctgtcccagcataagcagggaagcctttctcatgactgccaagcggagatactctcgaacattagagatacatacataacgcccccgggggagggctttctgcctcgtgatactgcgcgacaccaccggaactgggtcgtgaggctagtccggcgtgcacttgttgaggcgggcattgaagatcccaggctcctggacgtgatatgttttaccaagggcccgggtatgggggcgccgctgcactcagtggtcgtagcagcacggacaatgtcgatgttgtgggatgtgccccttgtcgcagttaatcactgcattggacatatcgagatggggcgcgaaatcacgaaagctgagaatccagtggtgctctacgtgagtggtggcaacacccaggtaatcgcgtattcggaaaaccgctaccggatcttcggcgagacacttgatatcgcgatcggcaactgccttgacaggtttgcgcgcacactaaagatccccaatgatccctctccgggctacaacatcgagcagctcgctaaacagtgcaagaacaaggacaggctggtggaactgccttatactgtgaaggggatggacctctccatgagcggtattctcgcccacatcgactcgctcgcgaaggacctatttcgtcgaaacacgaagaactacaagctcttcgaccgcgagaccggcaagcagctcgtcaccgtagaggacctgtgctactccctacaggagcacctgtttgccatgctcgtggagattaccgagcgtgccatggcacatgtgaactctaaccaggtgttgattgtcggcggtgtgggctgcaatgtccgactgcagcagatgatggcgagtatgtgccagagcagggccgacggccaagttcatgcgacggacgagcgcttctgtattgacaacggtgtcatgattgcacaggctggtctacttcaatatcgcatgggcgatatagtaaaagacttctcagagaccgttgtcacgcagaggttccggactgatgaggtttacgtatcgtggcgcgactaa

SEQ ID NO: 42415 - protein, 385 aa, Ashbya gossypii
MVNLNKVQPRSGGDHYLALGIEGSANKLGVGILKHPMLSQHKQGSLSHDCQAEILSNIRDTYITPPGEGFLPRDTARHHRNWVVRLVRRALVEAGIEDPRLLDVICFTKGPGMGAPLHSVVVAARTMSMLWDVPLVAVNHCIGHIEMGREITKAENPVVLYVSGGNTQVIAYSENRYRIFGETLDIAIGNCLDRFARTLKIPNDPSPGYNIEQLAKQCKNKDRLVELPYTVKGMDLSMSGILAHIDSLAKDLFRRNTKNYKLFDRETGKQLVTVEDLCYSLQEHLFAMLVEITERAMAHVNSNQVLIVGGVGCNVRLQQMMASMCQSRADGQVHATDERFCIDNGVMIAQAGLLQYRMGDIVKDFSETVVTQRFRTDEVYVSWRD

SEQ ID NO: 42416 - DNA, 1059 bp, Aspergillus fumigatus
  CDS (1)..(1059)
atgattgccatcggactcgaaggctccgccaacaaacttggggtgggcattatgctccatcccgaggatggcagcaccccgcgggtccttgctaatatccgtcacacctatgtctcccctccaggtgagggatttcttcccaaggatactgcgcggcaccaccgctcttgggtagtgaagcttgtaaagagagcgctcagagaagctcgtatctcagtgcgtgatgtggactgcatctgctttaccaagggccctggcatgggtgctccgcttcagagcgtcgctgtggctgcccggatgctgagtttattatggggcaaagagttagttggtgtgaaccattgcgttggacatattgaaatgggcagactaatcactggctccaccaaccctgtcgttctatacgtctcaggaggtaacacacaggtgattgcctacagttcgcaaaggtaccggatcttcggcgaaaccctcgatatcgctgtgggcaactgcctggacagattcgcccggacattgcacatctccaatgatcccgcaccagggtacaacattgagcaactagcgaagaagggcaagcagctggtcgatttgccgtacacagtgaagggcatggactgctccttttcggggattctcgccgccattgacggattggctgcatcctacggcttgaacggcgaagagaaagaggaagaaggtgcaggagatgactccaaaccgacacgcgcggatctgtgcttctcgctccaggagactgtgttttccatgctcgtggagattaccgagcgcgccatggcgcatgtgggctcaaaggaagtcctcatagtcggcggcgtcgggtgcaatgaacgattacaagagatgatgggaatcatggctcgcgatcgcggtggtagtgtccatgcgacggatgagagattctgtattgacaatggaattatgatcgcacaggcaggtttgctcgcgtacaagactggtttccgcaccccgttgaaggagtcgacttgtacacagcggttccgaacggacgacgtgtttgtaaaatggagagattaa

SEQ ID NO: 42417 - protein, 352 aa, Aspergillus fumigatus
MIAIGLEGSANKLGVGIMLHPEDGSTPRVLANIRHTYVSPPGEGFLPKDTARHHRSWVVKLVKRALREARISVRDVDCICFTKGPGMGAPLQSVAVAARMLSLLWGKELVGVNHCVGHIEMGRLITGSTNPVVLYVSGGNTQVIAYSSQRYRIFGETLDIAVGNCLDRFARTLHISNDPAPGYNIEQLAKKGKQLVDLPYTVKGMDCSFSGILAAIDGLAASYGLNGEEKEEEGAGDDSKPTRADLCFSLQETVFSMLVEITERAMAHVGSKEVLIVGGVGCNERLQEMMGIMARDRGGSVHATDERFCIDNGIMIAQAGLLAYKTGFRTPLKESTCTQRFRTDDVFVKWRD

SEQ ID NO: 42418 - DNA, 1077 bp, Aspergillus oryzae
  CDS (1)..(1077)
atgatcgctatcggcctggagggctccgccaacaagcttggtgtgggcatcatgttgcaccccgataatggcaaccccccgcaggtactcgcgaacatccgtcacacctatgtctctcccccaggtgaaggttttcttcctaaagacactgctaggcaccatcgcgcatgggtggtaaagctggtgaaaaaagcactcaaggaagctcatgtgtccgtccaagatgtggattgtatttgtttcaccaagggccctggtatgggagctcccctccagagcgttgcagttgcggcacggatgttgagcctactatggggcaaagagttggtcggtgtaaatcactgtgtcggacatattgagatgggcaggctcattacaggctctaccaatccagttgtactctatgtttctggaggaaacacacaagtaatcgcatatagctcacaaaggtaccggattttcggcgagactcttgatattgcggtgggtaactgcttggaccggttcgcgcgaacgctacacatttccaatgacccggctccgggatataatattgaacaattagccaaaaagggcaagcaattagttgatctaccatacactgtaaagggaatggattgctccttctctggtatcttagccgcagtggatggcttggccacgacatatggactaggtggcgaagggaaggatgatgagaccgacacccctatacctgatgctgatggtaatggaaaacccacccgcgcggacttgtgcttctcactccaagagactatcttctccatgcttgttgaaaccaccgaacgcgcaatggcgcacgtcggctccaaagaagttctgattgtcggtggtgttggttgcaatgagaggttacaggagatgatggggatcatggctcgggatcgcggaggtagcgtccatgctacagacgaaagattctgtatcgataatggaataatgatcgcgcaggcaggcttgctcgcatactcgactggattccgtacgccattgaaggattccacatgtacgcaacggttccgaacggatgatgtgtttgtaaagtggagggattaa

SEQ ID NO: 42419 - protein, 358 aa, Aspergillus oryzae
MIAIGLEGSANKLGVGIMLHPDNGNPPQVLANIRHTYVSPPGEGFLPKDTARHHRAWVVKLVKKALKEAHVSVQDVDCICFTKGPGMGAPLQSVAVAARMLSLLWGKELVGVNHCVGHIEMGRLITGSTNPVVLYVSGGNTQVIAYSSQRYRIFGETLDIAVGNCLDRFARTLHISNDPAPGYNIEQLAKKGKQLVDLPYTVKGMDCSFSGILAAVDGLATTYGLGGEGKDDETDTPIPDADGNGKPTRADLCFSLQETIFSMLVETTERAMAHVGSKEVLIVGGVGCNERLQEMMGIMARDRGGSVHATDERFCIDNGIMIAQAGLLAYSTGFRTPLKDSTCTQRFRTDDVFVKWRD

SEQ ID NO: 42420 - DNA, 1119 bp, Candida albicans
  CDS (1)..(1119): transl_table=12
atggtcgttgatttggacaagtatcttaaaccaggaaaagaccattacttggctcttggattggaagggtcggcaaacaaacttggtgtgggagtaatcaaacacaacaagggcccattatcatcaacaaaccgtgcagaagtattatcaaacatcagagatacttatataaccccaccaggggaagggtttctaccacgagatacagcaagacaccatagaaactgggtggtaagaatcatcaagcaggcattagccacagcaaaaattgcaggaaaagatatagatgtaatttgttttactcaaggtccaggaatgggtgcaccactacagagtgtagtcattgcagcaaggactttggcacagttatggaatatcccaattgtcggtgttaatcattgtgttggtcacattgaaatgggcagagaaatcactggtgcagaaaaccctgtggtgttatacgttagtggagggaacacacaagtcattgcgtactcgaaacaaaggtatcgtatattcggtgaaactcttgacatagcaattggaaattgtttggataggtttgcacgtacattaaaaatccctaacgagccagcacctggttataacatagaacaaatggccaagaaggggaaacatttggttcccttgccatacacagtcaaagggatggatttatccatgtcaggtatattggcagccatagatagcatagccaaagaaatgtttggcaaacaacaaaaaaagctcattgatgaagagtctggcgagcctataaccgcagaggatttatgtttttctttacaggagactttatttagtatgttggtggagattactgaacgagctttagcccatgttgatagtaaccaagttttaattgttggaggtgtagggtccaaccagagattacaagaaatgatgaagctaatgatccaggatcgtaaaaacggacaaatatatgccactgacgaacgtttttgcatcgacaatggtattatgattgcacatgccggtttgttgagctatagaactggtcaaactaaccaattgaacaacaccgtttgtacccaaaggtttagaacagatgaagtgtttgttaaatggagagacgattaa

SEQ ID NO: 42421 - protein, 372 aa, Candida albicans
MVVDLDKYLKPGKDHYLALGLEGSANKLGVGVIKHNKGPLSSTNRAEVLSNIRDTYITPPGEGFLPRDTARHHRNWVVRIIKQALATAKIAGKDIDVICFTQGPGMGAPLQSVVIAARTLAQLWNIPIVGVNHCVGHIEMGREITGAENPVVLYVSGGNTQVIAYSKQRYRIFGETLDIAIGNCLDRFARTLKIPNEPAPGYNIEQMAKKGKHLVPLPYTVKGMDLSMSGILAAIDSIAKEMFGKQQKKLIDEESGEPITAEDLCFSLQETLFSMLVEITERALAHVDSNQVLIVGGVGSNQRLQEMMKLMIQDRKNGQIYATDERFCIDNGIMIAHAGLLSYRTGQTNQLNNTVCTQRFRTDEVFVKWRDD

SEQ ID NO: 42422 - DNA, 1122 bp, Candida glabrata
  CDS (1)..(1122)
atggtcgatttgaacggtatttctcccaagaacaaaggctattatgttgcattgggtctcgagggctctgctaacaagctaggtgttggtgtcatcaagcagttcgtcgatggctctcccactgaaatagtgtctaacatcagagacacatacatcacgccgccaggagaagggttcttgccccgtgacaccgctagacaccacaagaactggtgcgtgcggttagtgaagagggcgctggcagaggcaggtgtcactcccggacaactggatgctatatgcttcactaaaggcccaggtatgggtgcaccgctgcactccgtggttatcgtggccaggaccgtgtccttgctgtgggatgtgccattggtgccagtaaaccattgtatcgggcacatagagatgggtagagagatcacaggcgcccagaacccggtggtgttatacgtgagtggtggtaatactcaggttattgcgtacagtaatcagaaatacagaatatttggtgaaaccttggatatcgccataggaaactgtttggataggtttgcccgtaccttgaagataccgaatgacccatccccaggttacaacatagaacaaatggctctcaagtgtaagaataaagaaagattggtggaacttccgtacactgtgaaaggtatggatttgtcactaagtggtatactggcatacattgattctttagccaaggatctgtttaggaaaaactatagcaacaaactcctgtttgacaagaaaacccatgaacagctagtcacggttgaggacctttgctacgcgctgcaggaaacgttgttctcgatgctagtcgaaattacagaacgtgcaatggcccacgtcaattctgcacatgtattgatagtaggtggtgttggttgtaacttgagattacaagagatgatggagcagatgtgcatggatagagccaacggtcatgtatacgcaacggacgagagattctgtatagacaatggtgtcatgattgctcaggcaggtttgttgcagtatagaatgggagactacgttaaggacttcaaagaaactgttgtaacacaaaagttcagaactgatgaagtcttggtatcttggagggactag

SEQ ID NO: 42423 - protein, 373 aa, Candida glabrata
MVDLNGISPKNKGYYVALGLEGSANKLGVGVIKQFVDGSPTEIVSNIRDTYITPPGEGFLPRDTARHHKNWCVRLVKRALAEAGVTPGQLDAICFTKGPGMGAPLHSVVIVARTVSLLWDVPLVPVNHCIGHIEMGREITGAQNPVVLYVSGGNTQVIAYSNQKYRIFGETLDIAIGNCLDRFARTLKIPNDPSPGYNIEQMALKCKNKERLVELPYTVKGMDLSLSGILAYIDSLAKDLFRKNYSNKLLFDKKTHEQLVTVEDLCYALQETLFSMLVEITERAMAHVNSAHVLIVGGVGCNLRLQEMMEQMCMDRANGHVYATDERFCIDNGVMIAQAGLLQYRMGDYVKDFKETVVTQKFRTDEVLVSWRD

SEQ ID NO: 42424 - DNA, 1071 bp, Chaetomium globosum
  CDS (1)..(1071)
atgggtctcgacatcacccaaaagaagcggcgcatcgccctcggctgcgaagggtcggctaacaagctcggcatcggcgtgatcctccacgaaggcgacacctccaccgtgctgtccaacgtccgacataccttcgtctcccccgcaggaaccggcttcctgcccaaagacaccgcccaacaccaccgcgccttcttcgtgcgggtcgccaaacaagccctctcggacgccggcatccgcatcgccgacatcgactgcatctgctacacgcgggggccaggcatgggcgggccgctggcgtcggtggcggtggcggcgcgcacgctggcgctgctgtggggcaaggagctggtcggcgtcaaccactgcgtcggtcacatcgagatggggcgtaccatcacgggcgccgaccaccccgtggtgctgtacgtgtccggcggcaacacccaggtgattgcctacgcggagcagcggtaccggatttttggcgagacgctggatattgcggtggggaattgtctagatcggtttgcgcgggcgcttaatatcagtaatgatccggcgccggggtataatattgaggtgttggcgaggaaaggcgggcgggtgttgttggatttgccgtatgcggtgaaggggatggattgctcgtttagcggcatcttgacgagggcggaggagctggcggcgcagatgaaggcaaatgaggggaaggggaccgacggggagccgtttaccggggcggatctgtgcttcagcctgcaggagacggtgtttgcgatgctggtggagatcacggagcgggccatggcgcacgtcgggagcaaccaggtgttgattgtgggaggtgtggggtgcaacgagcggctacaggagatgatgggtctcatggcggcagaccgcggcgggagcgtctatgcgacggatgagcgcttctgcatagacaatggcattatgattgcccacgcaggcctcttggcatatgaaacggggttcaggacgcccatcgaagagagcacatgtacacagcgatttaggacagacgaggtcctcgtcaaatggaggaagtaa

SEQ ID NO: 42425 - protein, 356 aa, Chaetomium globosum
MGLDITQKKRRIALGCEGSANKLGIGVILHEGDTSTVLSNVRHTFVSPAGTGFLPKDTAQHHRAFFVRVAKQALSDAGIRIADIDCICYTRGPGMGGPLASVAVAARTLALLWGKELVGVNHCVGHIEMGRTITGADHPVVLYVSGGNTQVIAYAEQRYRIFGETLDIAVGNCLDRFARALNISNDPAPGYNIEVLARKGGRVLLDLPYAVKGMDCSFSGILTRAEELAAQMKANEGKGTDGEPFTGADLCFSLQETVFAMLVEITERAMAHVGSNQVLIVGGVGCNERLQEMMGLMAADRGGSVYATDERFCIDNGIMIAHAGLLAYETGFRTPIEESTCTQRFRTDEVLVKWRK

SEQ ID NO: 42426 - DNA, 1116 bp, Coccidioides immitis
  CDS (1)..(1116)
atgattgccatcggccttgaaggatcagctaacaagctaggggttggtattatcctccatccagataatggtggcgaaccgcgagtcctcgcgaacattcgtcacacttatgtctccccgcccggagaaggctttctacccaaggacacagcaaaacaccaccgcaaatgggtggtatctttagtcaaagccgcattgaaagaggcagaaattggtgttagtgatgttgattgcatctgctataccaagggacctgggatgggacccccgttacagagtgtagctctggccgcccgcacgctgagtttactctgggggaagcaattggtcggggttaatcactgcgtgggacatattgaaatgggccgttatatcactggggcccaaaatcccatcgtgctctacgtttccggtgggaacacccaggtgattgcatacagctcccagcgataccgcatctttggggaaacactcgacatcgccgtgggtaactgtctcgaccgctttgcgcgcacgctacatatctctaacgaccctgcgcccggatacaatatcgagcaattggcgaagaagggcaagagactggtggagctaccatataccgtgaagggaatggactgttctttctcgggaattctagccgctattgatgcattagcggcagcatatggattgagtggagaccaacaagcgaaggaaaatattggccttacagaggatgccctgaagctcaaagttgattcggtggacaagtacaataacgaaggcggaatccccactcgagaagacctctgtttctcgttgcaagaaaccgtcttctccatgctggttgagataacggagcgcgcgatggcacatgtcggctctagagaagttcttatcgtcggcggggtgggatgtaatgagcggttgcaagagatgatgggaataatggctcgcgatcgaggtgggaacgtttttgcgacagacgagcgattctgcattgataacgggatcatgatcgctcaggcaggaattttggcatataaaaccggattcacaaccaaactagaggattcaacttgtacacagagatttaggacggatgaggtatttgtacagtggagagatgattga

SEQ ID NO: 42427 - protein, 371 aa, Coccidioides immitis
MIAIGLEGSANKLGVGIILHPDNGGEPRVLANIRHTYVSPPGEGFLPKDTAKHHRKWVVSLVKAALKEAEIGVSDVDCICYTKGPGMGPPLQSVALAARTLSLLWGKQLVGVNHCVGHIEMGRYITGAQNPIVLYVSGGNTQVIAYSSQRYRIFGETLDIAVGNCLDRFARTLHISNDPAPGYNIEQLAKKGKRLVELPYTVKGMDCSFSGILAAIDALAAAYGLSGDQQAKENIGLTEDALKLKVDSVDKYNNEGGIPTREDLCFSLQETVFSMLVEITERAMAHVGSREVLIVGGVGCNERLQEMMGIMARDRGGNVFATDERFCIDNGIMIAQAGILAYKTGFTTKLEDSTCTQRFRTDEVFVQWRDD

SEQ ID NO: 42428 - DNA, 1197 bp, Cryptococcus neoformans
  CDS (1)..(1197)
atgcttgtacttttaattgtcttctttaatagttattatactcattgttctcaccattctctctattcgttccattgcactcccccggatccagccatgaagcaatcaccactccacagaccatcccgtcctctcctcgctctcggcatagaaggctcagcaaataagctcggatgcggcatcatatcacattctccttcacccacaggtggacctactttagtcatggtactctcaaacgttcggcatacgtacatcactcctcctggcgaaggtttcctgccatcagatacagccagacatcatagagaatgggttgttaaagtcatcgaagaggctgttcgaaaggcgggtgtcaggatgggcgatctcgattgcattgcctttaccaaaggcccgggcatgggtacccctctccaagtgggagcgctcgtcgcccgtacgctatctttacttcacaacatcccccttgtcggcgtcaatcactgtgttggccacattgaaatgggtcgccaaataacgtcttctcataaccccatcgtcctatatgtttcgggcggcaacacccaggtcatcgcgtactctcagcaacgctatcgcatcttcggcgagacattagatatagctatcgggaactgtctagatcgctttgccagagttatcggcctgagaaacgatccaagccctgggtataacattgaaaaagaggcaaaaaagggcaagcgtctagtccagctcccatacggtacgaagggtatggatgtatctttagcaggtatcttacactccgttgaggcctatacaaaagacaaacgctaccgctcttgggatcaagtcaacgatgtcgaagaagatataattacgccatacgatctttgtttttctctgcaggagaccacttttgcgatgctggtggagataactgaaagagcaatggctcatgtgggagcgaaggacgtcttgattgttggcggtgttggttgtaatttgagattacaggagatgatgggtatcatggccagtgaaaggggaggacgcgtattcgcaactgatgagagtttctgtatcgataacggaataatgattgcccaagcaggattactggccttcagaatggggaataccatgccattagaaaagacaggtgttactcagcgatatcggaccgacgccgtccacgtggcttggcgagcgtga

SEQ ID NO: 42429 - protein, 398 aa, Cryptococcus neoformans
MLVLLIVFFNSYYTHCSHHSLYSFHCTPPDPAMKQSPLHRPSRPLLALGIEGSANKLGCGIISHSPSPTGGPTLVMVLSNVRHTYITPPGEGFLPSDTARHHREWVVKVIEEAVRKAGVRMGDLDCIAFTKGPGMGTPLQVGALVARTLSLLHNIPLVGVNHCVGHIEMGRQITSSHNPIVLYVSGGNTQVIAYSQQRYRIFGETLDIAIGNCLDRFARVIGLRNDPSPGYNIEKEAKKGKRLVQLPYGTKGMDVSLAGILHSVEAYTKDKRYRSWDQVNDVEEDIITPYDLCFSLQETTFAMLVEITERAMAHVGAKDVLIVGGVGCNLRLQEMMGIMASERGGRVFATDESFCIDNGIMIAQAGLLAFRMGNTMPLEKTGVTQRYRTDAVHVAWRA

SEQ ID NO: 42430 - DNA, 1122 bp, Debaryomyces hansenii
  CDS (1)..(1122)
atgacggttgatttagaccaatatgccaaacctggtaaagattactatcttgctttaggtctcgaaggttctgccaataaactaggcgttggtgttataaaacacaacctaggacaactttcgttagataatagagctgaaatattgtccaacgttagggatacttacgtaactcctcctggagaaggatttttaccaagagatacagcacgtcatcatagaaattgggctgttcgtataatcaaaaaagcattaattgaagcaaaggtgaaaggtagcgaccttgattgtatttgctttactcaaggaccaggtatgggtgcacctctacagagtgtagttattgcagcaaggacattatcacaattatgggatttgccattggtgggtgtgaaccattgtgttggtcatattgaaatgggtagagaaataactggagctgataacccagtcgtattgtatgtgagtggaggaaatacccaagtcattgcatattccagacaaagatatagaatatttggcgaaactttggatattgctataggaaattgtctagatcgtttcgctagaactttacgaatccctaacgaaccagcaccagggtataatattgaacaaatggcaaaaaaggggaaacatttggtacctttgccttatactgttaaaggaatggatttatcaatgtctggtatcttagctcatgttgattctttagcaaaagatttatttgctgaaaataaaaacaaaaaattaatcgatgacgaaacaggagagcaaattacatctgaagatctttgcttttctcttcaagagacattattttcgatgctcgtagaaataacagagagagctatggcccatgtacaaagtaatcaagtattaatagttgggggtgtcggctccaatgaaagattacaacaaatgatggaattaatggttaatgacaggaaaaatgggtcaatttttgcaactgacgagagattttgtattgataatggtataatgattgctcatgctggtttgttaggttatagaatgggacaaactaatgaattatggaacactgtctgcactcagagattcagaactgatgaggtattcgttaaatggagggatgattaa

SEQ ID NO: 42431 - protein, 373 aa, Debaryomyces hansenii
MTVDLDQYAKPGKDYYLALGLEGSANKLGVGVIKHNLGQLSLDNRAEILSNVRDTYVTPPGEGFLPRDTARHHRNWAVRIIKKALIEAKVKGSDLDCICFTQGPGMGAPLQSVVIAARTLSQLWDLPLVGVNHCVGHIEMGREITGADNPVVLYVSGGNTQVIAYSRQRYRIFGETLDIAIGNCLDRFARTLRIPNEPAPGYNIEQMAKKGKHLVPLPYTVKGMDLSMSGILAHVDSLAKDLFAENKNKKLIDDETGEQITSEDLCFSLQETLFSMLVEITERAMAHVQSNQVLIVGGVGSNERLQQMMELMVNDRKNGSIFATDERFCIDNGIMIAHAGLLGYRMGQTNELWNTVCTQRFRTDEVFVKWRDD

SEQ ID NO: 42432 - DNA, 1092 bp, Emericella nidulans
  CDS (1)..(1092)
atgattgccatcggtcttgaaggttccgccaacaaactcggcgtgggtatcatgttacaccctaaggacggtagcaccccgcaagtcctcgccaacatccgccacacatatgtctcccctcccggcgagggatttctccccaaagatacagcaaggcaccaccggtcctgggtcgtcagtctcgtgaagaaagcactcaaggaagcgcgtatctccgttgacgatgtggactgtatatgctacaccaagggaccaggaatgggagctccccttcagagtgtggcagtggctgcacggacgctaagcttactatgggggaaggaactagttggtgttaaccactgtgttggacatatcgaaatgggtcgtctaattaccggcgcatcgaacccggtcgtcctatacgtgtctggagggaatacacaagtaatcgcttacagctcgcaacggtatcgcatcttcggtgagactctcgatatcgcggtgggcaactgtcttgaccgattcgcgcgaacgctacatatctctaatgacccggctccggggtacaatattgagcaactcgccaaaaagggcaagcaactggtcgatttgccatacacagtaaaaggcatggactgctctatgtcaggcattcttgcagccattgatgctctcgccgcaacgtacggactaaacggagaacaaccggatgaggaggaagacgtaacagatgttacgcccgtttcagacggggctttagaaagccggaaaccaacccgggcagatctgtgcttttcgctgcaggagacggtattctcgatgttggtggaaattacagagcgcgccatggcacatgttgggtcgaaggaagttttgattgttggcggagtcggatgtaatgagaggctgcaggagatgatggggatcatggcgcgggatcgcggaggcagtgtgcatgccacggatgagaggttttgtattgacaacgggattatgattgcccaggctggtatgctcgcatataagacaggcttccggacgccgctcaaggaatctacgtgcacgcagcgcttccggacggatgatgtatttgtgcaatggagagattag

SEQ ID NO: 42433 - protein, 363 aa, Emericella nidulans
MIAIGLEGSANKLGVGIMLHPKDGSTPQVLANIRHTYVSPPGEGFLPKDTARHHRSWVVSLVKKALKEARISVDDVDCICYTKGPGMGAPLQSVAVAARTLSLLWGKELVGVNHCVGHIEMGRLITGASNPVVLYVSGGNTQVIAYSSQRYRIFGETLDIAVGNCLDRFARTLHISNDPAPGYNIEQLAKKGKQLVDLPYTVKGMDCSMSGILAAIDALAATYGLNGEQPDEEEDVTDVTPVSDGALESRKPTRADLCFSLQETVFSMLVEITERAMAHVGSKEVLIVGGVGCNERLQEMMGIMARDRGGSVHATDERFCIDNGIMIAQAGMLAYKTGFRTPLKESTCTQRFRTDDVFVQWRD

SEQ ID NO: 42434 - DNA, 996 bp, Encephalitozoon cuniculi
  CDS (1)..(996)
atgatagcaatgggactggaaggaagtgccaacaaactaggtgtggggataatgcgcgatgatgagatactggcaaacgaaagactcacatatgcacctccacctggtgagggattcattccggtgaaaactgcagagcaccaccgctccagaattctgggcctcgttgccgtgtccctagagaaggctggagtagatcttgacgatgttgacatattctgctacacaaaaggtcccggaatggggctgcctttgtctgtggttgccaccgttgctcgcacactaagcctttactgtaacaagccccttgttcccgtaaaccattgtatagctcacatagaaatgggaaggttcataactaaagcaagcaatcccgtcatcctgtatgctagtggtggaaacacccaaatcatagcataccacaacagaagatacaaaattttcggggagaccctggacatagctgttggaaactgcatagacagatttgctagagcccttaagctgccgaactttcctgcacccgggcttagtgtagagagatatgcaaaactgggtaagaactacatagagctcccctatgttgtaaaggggatggatgtctcgttctccgggattttatcgaacataaagagaaaaatagcggaagatgagcaggtaaagcgcgacttgtgctactccctccaggaaacggttttttctgcactagttgaagttacagaaagagcgatggcatttagcagctctaaggaggttctgattgttggtggtgttggatgtaacctgagacttcaggagatgatgggtataatggctagagagcgtggtggggtctgctatgcaacagacgagaggttttgcatagacaatggggtgatgattgcgtatgtaggaatgctgatggctaagagcggtgctgccttcaaactgggcgagtgttttgttacacaaagatacaggacagattctgtagaggtgacttggagagattattaa

SEQ ID NO: 42435 - protein, 331 aa, Encephalitozoon cuniculi
MIAMGLEGSANKLGVGIMRDDEILANERLTYAPPPGEGFIPVKTAEHHRSRILGLVAVSLEKAGVDLDDVDIFCYTKGPGMGLPLSVVATVARTLSLYCNKPLVPVNHCIAHIEMGRFITKASNPVILYASGGNTQIIAYHNRRYKIFGETLDIAVGNCIDRFARALKLPNFPAPGLSVERYAKLGKNYIELPYVVKGMDVSFSGILSNIKRKIAEDEQVKRDLCYSLQETVFSALVEVTERAMAFSSSKEVLIVGGVGCNLRLQEMMGIMARERGGVCYATDERFCIDNGVMIAYVGMLMAKSGAAFKLGECFVTQRYRTDSVEVTWRDY

SEQ ID NO: 42436 - DNA, 1092 bp, Gibberella zeae
  CDS (1)..(1092)
atgacgcctgtcgaatttgactgtctaagcgagccgagggctacatgcatatgcaactcacctgtgcagtcctcatatatcgctcttggctgcgaaggctccgccaacaagctcggcatcggtgtcatcctccacacaccaaccgaaaccaagatcctctccaacctccgcgacacattcgtttcccctccaggcacagggttcctccccaaagacacagcagcccatcaccgcgcacacttcgtccgtcttgcacgcgaagccctcgccgaagcgaaaatcacacccgcagatgtcgactgcatctgctacacaaagggacccggtatgggcgccccgttgaactcggtcgccgtggccgccagagcgttgagtttgctctgggatagaccacttgtgggtgtgaatcactgcgtgggacacattgagatgggaagatatatcactggcgcggagaacccagttgtgctgtacgtttcgggtggtaactcgcaggttattgcatatgcggagcagcgatataggatatttggcgagacgctggatatagctgttggaaattgtctcgatcgatttgctcgtacgctcgagatcagtaacgaccctgcgccaggttacaatattgagcagctggccaagaagggaagtaaactactggacatcccttacgcagtcaagggaatggactgttcgttctccggcatcctagcgtctgctgacgccctcgctgcgcagatgaaagccggcgcggacttcacacccgaagatttgtgcttctcactacaagaaacagtatttgccatgttggtagagatcacagagcgagccatggcgcacgttggatcctcacaagtcctcattgtgggaggtgttggttgcaatgagagattgcaggagatgatgggacacatggcgcgcgagcgaggaggatccgtgtatgcgaccgacgagagattctgcatcgataatggaatcatgattgcgcatgctggattgttggcatatgagacaggattcagaacgtcattggaggagagtacctgtacgcagagatttaggaccgatgaggtattcatcaaatggagagattga

SEQ ID NO: 42437 - protein, 363 aa, Gibberella zeae
MTPVEFDCLSEPRATCICNSPVQSSYIALGCEGSANKLGIGVILHTPTETKILSNLRDTFVSPPGTGFLPKDTAAHHRAHFVRLAREALAEAKITPADVDCICYTKGPGMGAPLNSVAVAARALSLLWDRPLVGVNHCVGHIEMGRYITGAENPVVLYVSGGNSQVIAYAEQRYRIFGETLDIAVGNCLDRFARTLEISNDPAPGYNIEQLAKKGSKLLDIPYAVKGMDCSFSGILASADALAAQMKAGADFTPEDLCFSLQETVFAMLVEITERAMAHVGSSQVLIVGGVGCNERLQEMMGHMARERGGSVYATDERFCIDNGIMIAHAGLLAYETGFRTSLEESTCTQRFRTDEVFIKWRD

SEQ ID NO: 42438 - DNA, 1158 bp, Kluyveromyces lactis
  CDS (1)..(1158)
atggtgaatttaaacggcattccaccaagaggtaaaaggaactattatttggcaattggtcttgaaggatctgccaacaagttaggcgttggtattatcaagcacccagtgctagaaaaacatgaagatagtgacctttcgtatgagtgtgatgttgaaatattggctaatattagagatacatatgtgacaccgccaggagaagggtttttaccaagagatactgcaagacatcataggaattgggtggtacgaatcattagaaaggcattaacggaggccaagatcgatgatcccacaaagatcgatgtgatatgtttcactagaggacctggaatgggtgctcctttgcattgtgtggttatagctgcaaggactttgtcattgatgtgggacataccattagttggggttaaccactgtgtggggcatatcgagatggggagagagatcacaggagctaaaaatcctgtcgtgctctatgttagtggaggtaacactcaagttattgcttactccgagaaaagatatcgaatctttggtgaaacgttggacatcgccattgggaattgtttagacagatttgcaagaactttgaagataccgaatgcaccatcgcctggttacaacattgaacaactggctaaacagtgtaagaataaagaaaaattagtggtattaccatacactgttaagggaatggatctgtcaatgagtggtattttgcaatatattgacactttagcgaaagacctattcaaaaagaacttgaagaataaattattatttgattcaagaacaggagaacagcttgtgactgtagaagacctatgttactctttacaggaaaatttatttgccatgcttgtggagattaccgaacgtgcaatggcccatgtaaactcaaaccaagtgctaatagtgggtggtgttggatgcaacgttaggcttcaagagatgatggcccaaatgtgtaaagacaggtccaatggacaagtacacgcaactgatgacagattctgtattgataatggtgtgatgattgcccaggcaggcctattagagtacagaacaggccactttgttaaggatctttctgaaaccattgtcacgcagaagtttagaaccgatgaggtttatatcgcatggagagaataa

SEQ ID NO: 42439 - protein, 385 aa, Kluyveromyces lactis
MVNLNGIPPRGKRNYYLAIGLEGSANKLGVGIIKHPVLEKHEDSDLSYECDVEILANIRDTYVTPPGEGFLPRDTARHHRNWVVRIIRKALTEAKIDDPTKIDVICFTRGPGMGAPLHCVVIAARTLSLMWDIPLVGVNHCVGHIEMGREITGAKNPVVLYVSGGNTQVIAYSEKRYRIFGETLDIAIGNCLDRFARTLKIPNAPSPGYNIEQLAKQCKNKEKLVVLPYTVKGMDLSMSGILQYIDTLAKDLFKKNLKNKLLFDSRTGEQLVTVEDLCYSLQENLFAMLVEITERAMAHVNSNQVLIVGGVGCNVRLQEMMAQMCKDRSNGQVHATDDRFCIDNGVMIAQAGLLEYRTGHFVKDLSETIVTQKFRTDEVYIAWRE

SEQ ID NO: 42440 - DNA, 1041 bp, Schizosaccharomyces pombe
  CDS (1)..(1041)
atgggaaaacctttaattgcacttggattagagggttcagcaaacaaattaggcgttggtattattttgcatgataccaatggatcggctaaaatattagcaaatgtcagacacacttatatcactcctcccggacagggattcttgcccagcgatactgctaagcatcatcgtgcgtggataatccctttaattaagcaagcgtttgctgaggcaaaaatttcttttaaagatattgattgcatttgtttcacaaaggggccaggaatcggtgctcctctgaatagtgtagctctttgtgctaggatgttatcactaattcacaagaaacctttagtagcagttaatcattgtattggtcacattgaaatgggtcgtgaaattacgggtgcacaaaatcctgtcgtgctttatgtttctgggggaaacactcaagtaattgcatactcagagaagaagtataggatttttggtgaaacgcttgatattgctataggcaattgtttggatcgatttgccagaatcattggtttgtccaatgcaccttcacctggttacaatattatgcaagaagcaaaaaaaggcaaaagatttatagagttaccctatactgttaaaggtatggattgttcattttccggattgttgtcaggggttgaagcggcagctacagagctattagacccaaaaaatccgagttctgttacaaagcaagatctttgttactctttacaggaaactggctttgcaatgctagttgaaattacagaacgcgcgatggcacatatcagagctgattctgttttaattgttggaggtgttggatgcaatgaacgtctccaacaaatgatggctgaaatgagttcggatagaggcgctgatgttttttctacagatgaacgtttctgtattgataatggtataatgatagcccaagcagggttgttggcttataaaaccggggaccgatgtgccgtcgcagaatcgacgattactcaaagatatcgtactgacgatgtttatatatcatggagggattaa

SEQ ID NO: 42441 - protein, 346 aa, Schizosaccharomyces pombe
MGKPLIALGLEGSANKLGVGIILHDTNGSAKILANVRHTYITPPGQGFLPSDTAKHHRAWIIPLIKQAFAEAKISFKDIDCICFTKGPGIGAPLNSVALCARMLSLIHKKPLVAVNHCIGHIEMGREITGAQNPVVLYVSGGNTQVIAYSEKKYRIFGETLDIAIGNCLDRFARIIGLSNAPSPGYNIMQEAKKGKRFIELPYTVKGMDCSFSGLLSGVEAAATELLDPKNPSSVTKQDLCYSLQETGFAMLVEITERAMAHIRADSVLIVGGVGCNERLQQMMAEMSSDRGADVFSTDERFCIDNGIMIAQAGLLAYKTGDRCAVAESTITQRYRTDDVYISWRD

SEQ ID NO: 42442 - DNA, 1071 bp, Yarrowia lipolytica
  CDS (1)..(1071)
atgacgacttatctgagcttgggactggaaggcagcgccaacaaactgggggtgggcgtaatcaaacacacggtgacggatgccaacgccgaaaacggcttttccaccgacattctgtccaacattcgagacacctacatcactcctccaggcgagggattcttgccacgagacacagctcgtcaccaccgaaactgggtggttcgaatcatcaaacgggcactcgacgaggccaagatatccgaccctacaaaactgcattgcatttcgttcacccagggtcccggtatgggggctcctttgcagagcgtggtgattgctgcacgaaccattgctcaaatgtggggagttccgcttgtgggcgtcaaccattgcgtgggacacattgagatgggccgaactatcacgggcgccacaaaccccgtggttctgtacgtctctggaggaaatacacaagtgattgcgtactccaaacagcgatatcgaatctttggagagactcttgatattgctgtcggtaactgcttggatcggtttgcacgggtgctgaagatccccaacgccccctcaccaggatacaatatcgagcagctagccaagaagggcaaaaagtacgttccattgccatacaccgtcaagggcatggacctgagcatgtctggtgtgttgcagtttgtggagtctctggcaaagcggtttcaggcaggagatctggtggttgatggacatcaggtgaccgccgaagatctgtgcttttcgctacaagaaacgctctttgccatgctcgtcgaaatcactgaaagagccatggcccatgtcaactctcagcaagtacttattgtgggaggtgttgggtgcaacgagcgactccaggagatgatgggaatcatggcacgtgaccgaaacggctccgtctacgccaccgacgagcgtttctgcatcgataacggtatcatgattgcccatgctggtcttctggcatggagacagggctttgagacgaaaatggaaaagacccagtgcactcagagattcagaactgacgaggtactggtagattggagagtttaa

SEQ ID NO: 42443 - protein, 356 aa, Yarrowia lipolytica
MTTYLSLGLEGSANKLGVGVIKHTVTDANAENGFSTDILSNIRDTYITPPGEGFLPRDTARHHRNWVVRIIKRALDEAKISDPTKLHCISFTQGPGMGAPLQSVVIAARTIAQMWGVPLVGVNHCVGHIEMGRTITGATNPVVLYVSGGNTQVIAYSKQRYRIFGETLDIAVGNCLDRFARVLKIPNAPSPGYNIEQLAKKGKKYVPLPYTVKGMDLSMSGVLQFVESLAKRFQAGDLVVDGHQVTAEDLCFSLQETLFAMLVEITERAMAHVNSQQVLIVGGVGCNERLQEMMGIMARDRNGSVYATDERFCIDNGIMIAHAGLLAWRQGFETKMEKTQCTQRFRTDEVLVDWRV

SEQ ID NO: 42444 - DNA, 1266 bp, Saccharomyces cerevisiae
  CDS (106)..(1266)
atgatgagttcgagagtaaccatttttacttcgtgcaacgatgcatatatttatcttttacgtgaagggaattcccaagcgttccctaatgcagtcgggagcaaaatggtcaacttgaacactatcccacccaaaaatggcagggactactacattgcgcttggacttgaaggttctgcaaataaactgggcgttggtatagttaagcatccgcttctgcctaaacatgccaacagcgatctatcttatgattgcgaagctgagatgctttctaatattagagacacatatgtcacacctcctggggagggatttttgcctcgagacacggcaaggcatcacagaaattggtgcataagactcataaaacaagcactggccgaagctgacatcaaaagcccgacactagacattgatgtaatttgctttaccaaaggtcccggcatgggggcccctctgcattcagttgtcatcgccgccagaacgtgctccttactgtgggacgtgccactggtgggagtaaaccactgcattggtcacatcgaaatggggagagaaatcactaaagctcaaaatcctgtggtactgtatgtaagtggtggaaatacacaagttattgcatactcggaaaaaaggtaccgtatctttggtgaaacgcttgatattgctatcggtaattgtcttgatagatttgcaagaactctgaagatacctaatgagccctcgcctggctacaacatcgagcagttagctaaaaaagcccctcacaaagaaaacttggtagaacttccctatacagtaaaggggatggatctttcgatgagtggtatattggcttccatcgatttacttgccaaggatctatttaagggcaataagaaaaataagatcctattcgacaagacaacgggcgagcaaaaagtcactgtagaggatctttgctactctctgcaagagaacctattcgccatgctagttgaaataacagaaagagctatggctcacgttaactccaatcaagttttgatcgtaggcggtgttggttgtaacgtgcgattacaagaaatgatggcgcaaatgtgtaaagacagggccaatgggcaagtacatgctacagataataggttttgtatcgataacggagttatgattgcccaagcaggactactagagtatagaatgggtgggatcgtgaaggacttttctgaaactgttgttacgcagaaattcagaaccgatgaagtatacgcagcctggcgtgattaa

SEQ ID NO: 42445 - protein, 386 aa, Saccharomyces cerevisiae
MVNLNTIPPKNGRDYYIALGLEGSANKLGVGIVKHPLLPKHANSDLSYDCEAEMLSNIRDTYVTPPGEGFLPRDTARHHRNWCIRLIKQALAEADIKSPTLDIDVICFTKGPGMGAPLHSVVIAARTCSLLWDVPLVGVNHCIGHIEMGREITKAQNPVVLYVSGGNTQVIAYSEKRYRIFGETLDIAIGNCLDRFARTLKIPNEPSPGYNIEQLAKKAPHKENLVELPYTVKGMDLSMSGILASIDLLAKDLFKGNKKNKILFDKTTGEQKVTVEDLCYSLQENLFAMLVEITERAMAHVNSNQVLIVGGVGCNVRLQEMMAQMCKDRANGQVHATDNRFCIDNGVMIAQAGLLEYRMGGIVKDFSETVVTQKFRTDEVYAAWRD

SEQ ID NO: 42446 - DNA, 1239 bp, Schizosaccharomyces pombe
  CDS (1)..(1239)
atgctttgtctggtatataattctattttgtgcaagcaacgtcgaatttctttaaaagttttacaacagtttcgctgttggaacatctctaaaacttttctatcctatcgaacacttacagccttagctatcgagacgtcttgtgatgatacatcggtttctgtcgttcgaacctcagattcatcatcacattgccaaaacgagatcatttgcttaaatacacaccggacaatttcaaaatacgaggcttatggtggtatccatcctaccatagttattcatgagcatcaaaagaatttagcgaaagtaatccaaaggactatctcagatgccgcgcgtagtggtattactgattttgaccttattgctgtcacaagaggcccaggaatgattggtccccttgctgtgggtttaaatacagccaaaggcctcgcggttggccttcaaaaacctttacttgcggttcatcacatgcaagcacatgcccttgcagtgcaactagaaaagtctattgatttcccatatcttaatattcttgtctcaggtggacacactatgctagtgtattccaattctctgttaaatcacgagattattgtcacaaccagtgatattgctgtaggcgattatctggacaaatgtgcaaagtatttgggtattccttgggacaatgaaatgcctgctgctgctcttgaacagtttgcttctcctgaaataaatagtactagttattcattaaaaccgccaatcccactgaatactagagaaaaggtgcatagcgcgagcttctctttttcaggcttggagtcgtacgcctgtcgaataataaggaagacgcctttaaatctaagtgaaaaaaagttttttgcctatcaacttcaatatgctgcttttcaacatatatgtcaaaaaacgttgctagcgttgaaacgactggatttatcgaaagttaagtaccttgtatgcagtggtggtgtcgctagaaacgaattgttgaaaaagatgctgaatgatactttaatggtattgcagtttgaacatcaacctacagacatcaaattggtgtacccaagtccagatatatgcagtgataatgctgccatgataggctatactgctattcaaatgttcaaagcaggttatacatcttcatttgatgttgagcccataagaaaatggcccatcaatcagattttaaccgttgaaggttggcttacaaaaaaaaataaaaaagtataa

SEQ ID NO: 42447 - protein, 412 aa, Schizosaccharomyces pombe
MLCLVYNSILCKQRRISLKVLQQFRCWNISKTFLSYRTLTALAIETSCDDTSVSVVRTSDSSSHCQNEIICLNTHRTISKYEAYGGIHPTIVIHEHQKNLAKVIQRTISDAARSGITDFDLIAVTRGPGMIGPLAVGLNTAKGLAVGLQKPLLAVHHMQAHALAVQLEKSIDFPYLNILVSGGHTMLVYSNSLLNHEIIVTTSDIAVGDYLDKCAKYLGIPWDNEMPAAALEQFASPEINSTSYSLKPPIPLNTREKVHSASFSFSGLESYACRIIRKTPLNLSEKKFFAYQLQYAAFQHICQKTLLALKRLDLSKVKYLVCSGGVARNELLKKMLNDTLMVLQFEHQPTDIKLVYPSPDICSDNAAMIGYTAIQMFKAGYTSSFDVEPIRKWPINQILTVEGWLTKKNKKV

SEQ ID NO: 42448 - DNA, 1224 bp, Saccharomyces cerevisiae
  CDS (1)..(1224)
atgatatcaataaaaggaaccggaagatttctcctcgataactatagaatttggcagaggcgtgcattcaacagaccaatacagttaagaaaaggctataaagttttagccattgagacttcttgcgatgatacatgcgtttcagttttggacaggttctcaaaaagtgcagctcctaatgtgctagccaatttgaaagatactttagatagtattgacgaaggaggtattataccaacaaaggctcatatccatcaccaagctcggataggacccttaaccgaaagagccctgatagaaagcaatgcgagagaaggaattgatctcatatgtgttacaagaggccctggtatgcctggttcattatcaggaggattagattttgcaaaaggtttagctgttgcctggaacaaaccactgattggtgtgcatcacatgctgggacacttgctgataccaagaatgggtacaaatggaaaagtgcctcaatttccctttgttagcctgctggttagtggtggtcatactacgtttgttttgtcacgagcaattgacgatcacgaaatattatgtgatactatcgatattgcagtgggtgactcattagataaatgtggcagagagcttggattcaagggaacaatgatcgctagagaaatggagaaatttattaatcaagatattaacgaccaagattttgctttaaaactagaaatgcccagtccgttaaaaaacagcgctagtaaaagaaacatgctttcgttttcgttttcagcatttatcacagcattaagaactaatttgacaaaactaggtaaaacagaaatccaggaactgccagaacgcgaaatacggtcaattgcatatcaagtacaggaatctgttttcgaccatataataaataaactgaagcacgtgctcaagtcacaaccggaaaagtttaaaaacgtgcgtgaatttgtatgttctggtggagtgagtagtaatcaaaggttgagaacaaaattagaaacggaattggggacgttgaactccacaagcttttttaatttttattatcctcctatggacctttgtagtgacaactctattatgatcggctgggcaggtatcgagatatgggaaagcttacgattagttagtgatttagatatatgtccaattaggcaatggccattgaatgacctattaagtgttgatggttggagaacggaccagctatga

SEQ ID NO: 42449 - protein, 407 aa, Saccharomyces cerevisiae
MISIKGTGRFLLDNYRIWQRRAFNRPIQLRKGYKVLAIETSCDDTCVSVLDRFSKSAAPNVLANLKDTLDSIDEGGIIPTKAHIHHQARIGPLTERALIESNAREGIDLICVTRGPGMPGSLSGGLDFAKGLAVAWNKPLIGVHHMLGHLLIPRMGTNGKVPQFPFVSLLVSGGHTTFVLSRAIDDHEILCDTIDIAVGDSLDKCGRELGFKGTMIAREMEKFINQDINDQDFALKLEMPSPLKNSASKRNMLSFSFSAFITALRTNLTKLGKTEIQELPEREIRSIAYQVQESVFDHIINKLKHVLKSQPEKFKNVREFVCSGGVSSNQRLRTKLETELGTLNSTSFFNFYYPPMDLCSDNSIMIGWAGIEIWESLRLVSDLDICPIRQWPLNDLLSVDGWRTDQL

SEQ ID NO: 42450 - DNA, 1326 bp, Oryza sativa
  CDS (1)..(1326)
atgggctattgggccgataatattctgggcttctttttgggtcgagaatattttgggcttaagggcccaattcgttcttcgtttcggcccgcttttagtccgcagcttacacttgtttcgtctcatctctcgtgtcccctcacttcgctgcaaaaccctaccgtcgccgccgcccccgcagctatgacgtcatcgccggcggcgaggcgccggccgccgggtccgctggcgctggggctggagtcgtcggcgaacaagatcggcatcggcgtcgtctccctctcgggggagatcctctccaacccgcgtcacacctacgtcaccccgccggggcacggcttcctgccgcgggagacggcgcaccaccacctcgcccacctcctcccgctcctccgcgcggcgctgggcgaggccggggtgacccccgccgacctcgcctgcgtgtgctacaccaaggggcccgggatgggcgcgccgctccaggtcgccgccgccgcggcgcgcgcgctctcgctgctctgggggaagccgctcgtcggcgtgaaccactgcgtcgcgcacgtcgagatgggccgcgcggtcaccggcgccgtcgaccccgtcgtgctctacgtctccggcgggaacacgcaggtcatcgcgtacagcgaagggaggtacaggatcttcggcgagaccatcgacatcgcggtggggaactgcctcgatcgctttgccagggtgcttgagctgtccaatgatcctagccctgggtataacatcgagcagcttgcgaagaagggagagaagttcattgatctcccttatgttgtaaagggtatggacgtgtcatttagtggcatactgagcttcattgaagctacagcaattgagaagcttaaaaataatgagtgcacgcctgcagatctatgctactcattgcaggaaactctctttgctatgcttgttgaaatcactgagcgtgccatggcacattgtgattcgaaggatgttcttattgttggtggtgttgggtgcaatgaacgtttgcaagagatgatgaggataatgtgttcagaaagagggggtaggctgttcgcaaccgatgatcgatactgtattgacaacggggcaatgattgcatacactggtttactggcatacgcacatggcatgaccactcccctagaggagtccacttttactcaaagattccgaacggacgaagttcatgcaatctggagggagaaggagatgccagtgttaactaacatccgtgcccatgcaatggctgaagtatccaaagatgaagcttccgttccgactccaattgctgtagattcatga

SEQ ID NO: 42451 - protein, 441 aa, Oryza sativa
MGYWADNILGFFLGREYFGLKGPIRSSFRPAFSPQLTLVSSHLSCPLTSLQNPTVAAAPAAMTSSPAARRRPPGPLALGLESSANKIGIGVVSLSGEILSNPRHTYVTPPGHGFLPRETAHHHLAHLLPLLRAALGEAGVTPADLACVCYTKGPGMGAPLQVAAAAARALSLLWGKPLVGVNHCVAHVEMGRAVTGAVDPVVLYVSGGNTQVIAYSEGRYRIFGETIDIAVGNCLDRFARVLELSNDPSPGYNIEQLAKKGEKFIDLPYVVKGMDVSFSGILSFIEATAIEKLKNNECTPADLCYSLQETLFAMLVEITERAMAHCDSKDVLIVGGVGCNERLQEMMRIMCSERGGRLFATDDRYCIDNGAMIAYTGLLAYAHGMTTPLEESTFTQRFRTDEVHAIWREKEMPVLTNIRAHAMAEVSKDEASVPTPIAVDS

SEQ ID NO: 42452 - DNA, 1386 bp, Oryza sativa
  CDS (1)..(1386)
atggcggccactcttctccccaccttatcgccgccggcctcccgcgccgccgccgccctcctcctccggcgagccccaccgttcccctcaccccttcccgctcccctcctccgactcctcctcgcccccgccccctcccctccgctacggtcctctcctaccttccgctccctcgccacaatgccctccgccgccgccgccgcagacctcctcatgctcggcatcgagaccagctgcgacgacaccgccgccgccgtggttagaggcgatggcgagatcctaagccaggtggtatcttcccaagaagatttactcgtgaggtggggaggcgtcgctccgaagatggccgaggaagctcattctcttgcgattgatcaggttgttcagaaagcacttgatgatgcaaatgtgtcagaaaatgatctttcagcagtggctgtcaccgtaggaccaggacttagtttatgcctcagagttggtgttcacaaagctcgaaaaatagcgaaatcatttcgcctgcctattgttggagttcatcatatggaggcacatgcattagtttccaggttagtgaacaaggatcttgatttcccatttttggccctcctaatttcaggaggacacaatcttcttgttcttgctcatggacttggtcaatatgttcaactgggaactacaatagatgatgcaattggtgaggcttatgacaagtcagcgagatggttaggtcttgatatgcggaaaggtggcggtcctgctcttgaacagcttgccctagaaggtgatccaaatgctgttaagtttagtgttccaatgcgacaacacaaagattgcaatttctcttatgctggtctgaagactcaagttcgattggctattgaatccagaaacatatcaacagatgatattcctatttcatccgcgacaaaagatgacagacaaataagggcgaacattgctgcctcttttcagcgagttgctgttttacatttggaagaaagatgccagcgagcagttgaatgggcattgaagatggagccttctattaaatactttgttgtttcaggaggtgttgcatcaaaccagtatgtcagaactcatttgaatcagatcgctgagaagaatggcctacagctcgtatgccctcccccaaagctttgcactgacaatggtgtcatgattgcttggactggtattgagcatttcattgcaggcagatttgatgatcctcctgctgttgatgagcctgatgatatgcagtatgacctgcgtccaaggtggcctcttggtgaggaatattcagaaggaagaagtgcttctcggtcaatgaaaactgctcgagtccatccatcactcacatcgatgatacagggttctgttcattag

SEQ ID NO: 42453 - protein, 461 aa, Oryza sativa
MAATLLPTLSPPASRAAAALLLRRAPPFPSPLPAPLLRLLLAPAPSPPLRSSPTFRSLATMPSAAAAADLLMLGIETSCDDTAAAVVRGDGEILSQVVSSQEDLLVRWGGVAPKMAEEAHSLAIDQVVQKALDDANVSENDLSAVAVTVGPGLSLCLRVGVHKARKIAKSFRLPIVGVHHMEAHALVSRLVNKDLDFPFLALLISGGHNLLVLAHGLGQYVQLGTTIDDAIGEAYDKSARWLGLDMRKGGGPALEQLALEGDPNAVKFSVPMRQHKDCNFSYAGLKTQVRLAIESRNISTDDIPISSATKDDRQIRANIAASFQRVAVLHLEERCQRAVEWALKMEPSIKYFVVSGGVASNQYVRTHLNQIAEKNGLQLVCPPPKLCTDNGVMIAWTGIEHFIAGRFDDPPAVDEPDDMQYDLRPRWPLGEEYSEGRSASRSMKTARVHPSLTSMIQGSVH

SEQ ID NO: 42454 - DNA, 1200 bp, Oryza sativa
  CDS (1)..(1200)
atggcggccactcttctccccaccttatcgccgccggcctcccgcgccgccgccgccctcctcctccggcgagccccaccgttcccctcaccccttcccgctcccctcctccgactcctcctcgcccccgccccctcccctccgctacggtcctctcctaccttccgctccctcgccacaatgccctccgccgccgccgccgcagacctcctcatgctcggcatcgagaccagctgcgacgacaccgccgccgccgtggttagaggcgatggcgagatcctaagccaggtggtatcttcccaagaagatttactcgtgaggtggggaggcgtcgctccgaagatggccgaggaagctcattctcttgcgattgatcaggttgttcagaaagcacttgatgatgcaaatgtgtcagaaaatgatctttcagcagtggctgtcaccgtaggaccaggacttagtttatgcctcagagttggtgttcacaaagctcgaaaaatagcgaaatcatttcgcctgcctattgttggagttcatcatatggaggcacatgcattagtttccaggttagtgaacaaggatcttgatttcccatttttggccctcctaatttcaggaggacacaatcttcttgttcttgctcatggacttggtcaatatgttcaactgggaactacaatagatgatgcaattggtgaggcttatgacaagtcagcgagatggttaggtcttgatatgcggaaaggtggcggtcctgctcttgaacagcttgccctagaaggtgatccaaatgctgttaagtttagtgttccaatgcgacaacacaaagattgcaatttctcttatgctggtctgaagactcaagttcgattggctattgaatccagaaacatatcaacagatgatattcctatttcatccgcgacaaaagatgacagacaaataagggcgaacattgctgcctcttttcagcgagttgctgttttacatttggaagaaagatgccagcgagcagttgaatgggcattgaagatggagccttctattaaatactttgttgtttcaggaggtgttgcatcaaaccagtatgtcagaactcatttgaatcagatcgctgagaagaatggcctacagctcgtatgccctcccccaaagctttgcactgacaatggtaaaaagtttatttgcatgatcaattga

SEQ ID NO: 42455 - protein, 399 aa, Oryza sativa
MAATLLPTLSPPASRAAAALLLRRAPPFPSPLPAPLLRLLLAPAPSPPLRSSPTFRSLATMPSAAAAADLLMLGIETSCDDTAAAVVRGDGEILSQVVSSQEDLLVRWGGVAPKMAEEAHSLAIDQVVQKALDDANVSENDLSAVAVTVGPGLSLCLRVGVHKARKIAKSFRLPIVGVHHMEAHALVSRLVNKDLDFPFLALLISGGHNLLVLAHGLGQYVQLGTTIDDAIGEAYDKSARWLGLDMRKGGGPALEQLALEGDPNAVKFSVPMRQHKDCNFSYAGLKTQVRLAIESRNISTDDIPISSATKDDRQIRANIAASFQRVAVLHLEERCQRAVEWALKMEPSIKYFVVSGGVASNQYVRTHLNQIAEKNGLQLVCPPPKLCTDNGKKFICMIN

SEQ ID NO: 42456 - DNA, 1041 bp, Linum usitatissimum
  CDS (1)..(1041)
atgaagaaactaatcgctctaggattcgaaggctcggcgaacaagatcggagtcggcgtcgtcgctttagacggaacaatcctctcaaacccacgacacacctacatcactccgccaggccacggcttcctccctcgagaaaccgcccatcaccacctccgccacgtcctacccttagtccgaaccgcgctcgacgccgccggactgactcccgacgatgtcgattgcatctgctacaccaagggccccggaatgggagcgccgctgcaagtctccgccattgtcgtccgtgtcctgtccctgctctggaagaagccgattgtcgccgttaaccactgcgtcgcccatattgagatgggccgggtcgtcactggggcgcatgatccggttgtgctctacgttagcggcgggaacactcaggtgattgcttatagtgaaggaaagtataggattttcggggagactattgatatcgctgtggggaattgtttggatcggtttgctagggtcttgcagctgtccaatgatcctgcccctggctacaacattgagcagcttgccaagaaaggagagaaatttgtggaccttccttacgcagtcaaaggaatggatgtttctttcagtgggatattaagctacattgagactactgctgaggagaagctgaaaagcaatgagtgcactccagcagatttgtgctactctttgcaagagacggtgtttgcgatgcttgtggagatcacggaacgggcgatggctcactgcgacaagaaggatgttcttattgttggcggtgtgggctgtaacgagcggttgcaggagatgatgaggacgatgtgctccgaacggggagggacgctctatgctacggatgatcggtattgcatcgacaatggagcgatgattgcttataccggtctgctcgcgtttgctcatggggcgacgactccgttggaggattcgacgtttacacagaggttccgaactgatgaagtcgatgcaatttggagagagaaggagaaagagaaggattctgtctaa

SEQ ID NO: 42457 - protein, 346 aa, Linum usitatissimum
MKKLIALGFEGSANKIGVGVVALDGTILSNPRHTYITPPGHGFLPRETAHHHLRHVLPLVRTALDAAGLTPDDVDCICYTKGPGMGAPLQVSAIVVRVLSLLWKKPIVAVNHCVAHIEMGRVVTGAHDPVVLYVSGGNTQVIAYSEGKYRIFGETIDIAVGNCLDRFARVLQLSNDPAPGYNIEQLAKKGEKFVDLPYAVKGMDVSFSGILSYIETTAEEKLKSNECTPADLCYSLQETVFAMLVEITERAMAHCDKKDVLIVGGVGCNERLQEMMRTMCSERGGTLYATDDRYCIDNGAMIAYTGLLAFAHGATTPLEDSTFTQRFRTDEVDAIWREKEKEKDSV

SEQ ID NO: 42458 - DNA, 1146 bp, Zea mays
  CDS (1)..(1146)
atgtcctcgtctccgtccccggcgaaccgccgtccccggggcccgcttgcgctggggctggagtcctcggcgaacaagatcggcatcggcgtggtctccctctcgggtgacatcctctccaacccgcgccacacctacgtgacaccgccgggtcatggattccttccccgggagaccgcgcagcaccacctcgcgcacctcctccctctcctccgcgccgcgctcgctgagtccggtgtggcccccgctgacctcgcatgcgtctgctacactaaaggccccggcatgggcggccctctccaggtcgccgccgcagccgcccgcgcgctctccctgttatggaggaagcctctcgtggcggtcaaccactgcgttgcgcacatcgagatgggccgcgcggtcactggggccgtggaccccgttgtactctacgtctccggcggaaacacgcaggttatcgcctacagcgaggggcggtacaggatcttcggggaaacgattgatattgccgtcgggaactgccttgaccgattcgccagggtcctagagctctccaatgaccctagccccggctataacatcgagcagcttgcaaagaagggagaaaaattcattgatgtcccttatgttgtgaagggtatggatgtgtcattcagtggcatattgagctttattgaagctgcggcgattgaaaagcttaaaaataatgagtgcacacctgcggacctatgctactcattgcaggaaactatctttgccatgcttgtcgaaattactgaacgtgccatggcacactgtgattcaaaggacgttcttattgttggtggcgtcggttgcaacgaacgtttacaggagatgatgaagattatgtgctcagaaagagggggtaggctgtttgcaactgatgaccgctattgtatagacaatggggcaatgattgcatatactggtttactggcgtatgcacatggcatgaccactccccttgaggagtcgacatttacacaaagattccgaactgatgaagttcatgcaatttggagagagaaggagatgccggtgctaaataatacccattcagatgcaattgctgaagtttctaaagatgaagcctccatggcaacaccaatcgttatagattactga

SEQ ID NO: 42459 - protein, 381 aa, Zea mays
MSSSPSPANRRPRGPLALGLESSANKIGIGVVSLSGDILSNPRHTYVTPPGHGFLPRETAQHHLAHLLPLLRAALAESGVAPADLACVCYTKGPGMGGPLQVAAAAARALSLLWRKPLVAVNHCVAHIEMGRAVTGAVDPVVLYVSGGNTQVIAYSEGRYRIFGETIDIAVGNCLDRFARVLELSNDPSPGYNIEQLAKKGEKFIDVPYVVKGMDVSFSGILSFIEAAAIEKLKNNECTPADLCYSLQETIFAMLVEITERAMAHCDSKDVLIVGGVGCNERLQEMMKIMCSERGGRLFATDDRYCIDNGAMIAYTGLLAYAHGMTTPLEESTFTQRFRTDEVHAIWREKEMPVLNNTHSDAIAEVSKDEASMATPIVIDY

SEQ ID NO: 42460 - DNA, 1401 bp, Zea mays
  CDS (1)..(1401)
atggcggccactcttctcccgaccttatcgccgcccgtttcgcgcgccgccgccgctttcctcctccgacgagccccactgaagccctcccattatgtgcacccaccttctactctccgccgcttactcatctcctcctatccagcaatccctgccatgtgccccctctccaccatgtcgtccaccactgccgctcgcgccgtcccggtccgccgtgacctcctcatgctcggcatcgagaccagctgcgacgacactgcggctgctgtggtgagaggtgatggcgagatccttagtcaagtagtatcttcccaagcggatttgctcgcgaggtatggtggtgttgcccctaagatggccgaggaagcacacgcccttgtgattgaccaggttgttcaaaaggctcttgacgatgcaaaattgtcagaaagtgatctttctgcagtcgctgtgaccattggaccaggacttagtctatgccttagagttggtgttcataaagctagacaggtagcaaaagcatttggcttgcctattgttggagttcatcatatggaagcacacgcattagtttccaggctagcgaataaggaccttgatttcccatttctggctcttctaatttccggaggacacaaccttcttgttctcgctcatgatcttgggcattacattcaactggggactactatagatgatgcgattggtgaggcatatgacaaatcagcaagatggttgggccttgatatgcggaaaggtggtggtcctgctcttgaagagcttgctctagaaggtgatccaaatgctgttaagttcagagttccaatgcgacagcataaagattgcaatttttcttatgctggactgaagactcaagttcgattggcaattgaatctaagaacttatgtacagaggatattcccgtttcggctgcatcggaggaggacagacaatcaagggcgaacattgctgcctcttttcagcgagttgctgtgttacatttggaagaaaggtgtgagcgagcagtcgaatgggcattgaatatggaaccttccatcaaatactttgttgtttcaggaggtgtcgcatcaaacaagtatgttacgactcgcttgaatcatgttgctgggaataatggcctacaacttgtatctcctcctccaagcctttgtactgacaatggtgtcatgattgcttggactgggattgagcattttgttgccgggaggtttgaggacccacctgctgctgatgagtctgatgatatgcagtatgagctgcggccaagatggcctcttggtgaggaatattcaaaaggaagaagtgttgcacgatcattgaagactgctcgagtccatccatcactaacgtccatgatacagggctcccttcaaaagtag

SEQ ID NO: 42461 - protein, 466 aa, Zea mays
MAATLLPTLSPPVSRAAAAFLLRRAPLKPSHYVHPPSTLRRLLISSYPAIPAMCPLSTMSSTTAARAVPVRRDLLMLGIETSCDDTAAAVVRGDGEILSQVVSSQADLLARYGGVAPKMAEEAHALVIDQVVQKALDDAKLSESDLSAVAVTIGPGLSLCLRVGVHKARQVAKAFGLPIVGVHHMEAHALVSRLANKDLDFPFLALLISGGHNLLVLAHDLGHYIQLGTTIDDAIGEAYDKSARWLGLDMRKGGGPALEELALEGDPNAVKFRVPMRQHKDCNFSYAGLKTQVRLAIESKNLCTEDIPVSAASEEDRQSRANIAASFQRVAVLHLEERCERAVEWALNMEPSIKYFVVSGGVASNKYVTTRLNHVAGNNGLQLVSPPPSLCTDNGVMIAWTGIEHFVAGRFEDPPAADESDDMQYELRPRWPLGEEYSKGRSVARSLKTARVHPSLTSMIQGSLQK

SEQ ID NO: 42462 - DNA, 1401 bp, Zea mays
  CDS (1)..(1401)
atggcggccactcttctcccgaccttatcgccgcccgtttcgcgcgccgccgccgctttcctcctccgacgagccccactgaagccctcccattatgtgcacccaccttctactctccgccgcttactcatctcctcctatccagcaatccctgccatgtgccccctctccaccatgtcgtccaccactgccgctcgcgccgtcccggtccgccgtgacctcctcatgctcggcatcgagaccagctgcgacgacactgcggctgctgtggtgagaggtgatggcgagatccttagtcaagtagtatcttcccaagcggatttgctcgcgaggtatggtggtgttgcccctaagatggccgaggaagcacacgcccttgtgattgaccaggttgttcaaaaggctcttgacgatgcaaaattgtcagaaagtgatctttctgcagtcgctgtgaccattggaccaggacttagtctatgccttagagttggtgttcataaagctagacaggtagcaaaagcatttggcttgcctattgttggagttcatcatatggaagcacacgcattagtttccaggctagcgaataaggaccttgatttcccatttctggctcttctaatttccggaggacacaaccttcttgttctcgctcatggtcttgggcattacattcaactggggactactatagatgatgcgattggtgaggcatatgacaaatcagcaagatggttgggccttgatatgcggaaaggtggtggtcctgctcttgaagagcttgctctagaaggtgatccaaatgctgttaagttcagagttccaatgcgacagcataaagattgcaatttttcttatgctggactgaagactcaagttcgattggcaattgaatctaagaacttatgtacagaggatattcccgtttcggctgcatcggaggaggacagacaatcaagggcgaacattgctgcctcttttcagcgagttgctgtgttacatttggaagaaaggtgtgagcgagcagttgaatgggcattgaatatggaaccttccatcaaatactttgttgtttcaggaggtgtcgcatcaaacaagtatgttacgactcgcttgaatcatgttgctgggaataatggcctacaacttgtatctcctcctccaagcctttgtactgacaatggtgtcatgattgcttggactgggattgagcattttgttgccgggaggtttgaggacccacctgctgctgatgagtctgatgatatgcagtatgagctgcggccaagatggcctcttggtgaggaatattcaaaaggaagaagtgttgcacgatcattgaagactgctcgagtccatccatcactaacgtccatgatacagggctcccttcaaaagtag

SEQ ID NO: 42463 - protein, 466 aa, Zea mays
MAATLLPTLSPPVSRAAAAFLLRRAPLKPSHYVHPPSTLRRLLISSYPAIPAMCPLSTMSSTTAARAVPVRRDLLMLGIETSCDDTAAAVVRGDGEILSQVVSSQADLLARYGGVAPKMAEEAHALVIDQVVQKALDDAKLSESDLSAVAVTIGPGLSLCLRVGVHKARQVAKAFGLPIVGVHHMEAHALVSRLANKDLDFPFLALLISGGHNLLVLAHGLGHYIQLGTTIDDAIGEAYDKSARWLGLDMRKGGGPALEELALEGDPNAVKFRVPMRQHKDCNFSYAGLKTQVRLAIESKNLCTEDIPVSAASEEDRQSRANIAASFQRVAVLHLEERCERAVEWALNMEPSIKYFVVSGGVASNKYVTTRLNHVAGNNGLQLVSPPPSLCTDNGVMIAWTGIEHFVAGRFEDPPAADESDDMQYELRPRWPLGEEYSKGRSVARSLKTARVHPSLTSMIQGSLQK

SEQ ID NO: 42464 - DNA, 23 bp, Artificial sequence
  primer
atgcgtgtactgggtattgaaac

SEQ ID NO: 42465 - DNA, 21 bp, Artificial sequence
  primer
ttacgcagccggtaactccgc

SEQ ID NO: 42466 - protein, 468 aa, Artificial sequence
  consensus sequence
  Variant (3)..(3): Xaa in position 3 is any amino acid
  Variant (5)..(5): Xaa in position 5 is any amino acid
  Variant (9)..(33): Xaa in position 9 to 33 is any amino acid
  Variant (34)..(49): Xaa in position 34 to 49 is any or no amino acid
  Variant (52)..(53): Xaa in position 52 to 53 is any amino acid
  Variant (55)..(56): Xaa in position 55 to 56 is any amino acid
  Variant (58)..(60): Xaa in position 58 to 60 is any amino acid
  Variant (62)..(79): Xaa in position 62 to 79 is any amino acid
  Variant (80)..(101): Xaa in position 80 to 101 is any or no amino acid
  Variant (103)..(106): Xaa in position 103 to 106 is any amino acid
  Variant (108)..(108): Xaa in position 108 is any amino acid
  Variant (112)..(115): Xaa in position 112 to 115 is any amino acid
  Variant (117)..(118): Xaa in position 117 to 118 is any amino acid
  Variant (120)..(130): Xaa in position 120 to 130 is any amino acid
  Variant (131)..(133): Xaa in position 131 to 133 is any or no amino acid
  Variant (135)..(137): Xaa in position 135 to 137 is any amino acid
  Variant (139)..(139): Xaa in position 139 is any amino acid
  Variant (141)..(143): Xaa in position 141 to 143 is any amino acid
  Variant (145)..(158): Xaa in position 145 to 158 is any amino acid
  Variant (159)..(182): Xaa in position 159 to 182 is any or no amino acid
  Variant (184)..(184): Xaa in position 184 is any amino acid
  Variant (190)..(203): Xaa in position 190 to 203 is any amino acid
  Variant (204)..(207): Xaa in position 204 to 207 is any or no amino acid
  Variant (209)..(211): Xaa in position 209 to 211 is any amino acid
  Variant (213)..(213): Xaa in position 213 is any amino acid
  Variant (215)..(215): Xaa in position 215 is any amino acid
  Variant (217)..(219): Xaa in position 217 to 219 is any amino acid
  Variant (222)..(222): Xaa in position 222 is any amino acid
  Variant (224)..(227): Xaa in position 224 to 227 is any amino acid
  Variant (229)..(230): Xaa in position 229 to 230 is any amino acid
  Variant (231)..(239): Xaa in position 231 to 239 is any or no amino acid
  Variant (241)..(245): Xaa in position 241 to 245 is any amino acid
  Variant (246)..(246): Xaa in position 246 is any or no amino acid
  Variant (248)..(249): Xaa in position 248 to 249 is any amino acid
  Variant (251)..(256): Xaa in position 251 to 256 is any amino acid
  Variant (257)..(277): Xaa in position 257 to 277 is any or no amino acid
  Variant (279)..(284): Xaa in position 279 to 284 is any amino acid
  Variant (285)..(302): Xaa in position 285 to 302 is any or no amino acid
  Variant (307)..(320): Xaa in position 307 to 320 is any amino acid
  Variant (321)..(357): Xaa in position 321 to 357 is any or no amino acid
  Variant (359)..(370): Xaa in position 359 to 370 is any amino acid
  Variant (372)..(377): Xaa in position 372 to 377 is any amino acid
  Variant (379)..(390): Xaa in position 379 to 390 is any amino acid
  Variant (391)..(413): Xaa in position 391 to 413 is any or no amino acid
  Variant (417)..(418): Xaa in position 417 to 418 is any amino acid
  Variant (420)..(421): Xaa in position 420 to 421 is any amino acid
  Variant (423)..(440): Xaa in position 423 to 440 is any amino acid
  Variant (441)..(456): Xaa in position 441 to 456 is any or no amino acid
  Variant (458)..(458): Xaa in position 458 is any amino acid
  Variant (461)..(461): Xaa in position 461 is any amino acid
  Variant (462)..(462): Xaa in position 462 is any or no amino acid
  Variant (466)..(467): Xaa in position 466 to 467 is any amino acid
LGXEXSCDXXXXXXXXXXXXXXXXXXXXXXXXXXXXXXXXXXXXXXXXXGGXXPXXAXXXHXXXXXXXXXXXXXXXXXXXXXXXXXXXXXXXXXXXXXXXXDXXXXTXGPGXXXXLXXGXXXXXXXXXXXXXXPXXXVXHXXXHXXXXXXXXXXXXXXXXXXXXXXXXXXXXXXXXXXXXXXLXVSGGHXXXXXXXXXXXXXXXXXXGXXXDXAXGXXXDKXAXXXXLXXXXXXXXXXXGXXXXXXAXXGXXXXXXXXXXXXXXXXXXXXXXXXXXXPXXXXXXXXXXXXXXXXXXXXXXXXSFSGXXXXXXXXXXXXXXXXXXXXXXXXXXXXXXXXXXXXXXXXXXXXXXXXXXXDXXXXXXXXXXXXLXXXXXXAXXXXXXXXXXXXXXXXXXXXXXXXXXXXXXXXXXXGGVXXNXXLXXXXXXXXXXXXXXXXXXXXXXXXXXXXXXXXXXCXDNXXMIAXXG

SEQ ID NO: 42467 - protein, 21 aa, Artificial sequence
  protein pattern
  Variant (2)..(2): Xaa in position 2 is any amino acid
  Variant (3)..(4): Xaa in position 3 to 4 is any or no amino acid
  Variant (6)..(7): Xaa in position 6 to 7 is any amino acid
  Variant (8)..(8): Xaa in position 8 is any or no amino acid
  Variant (10)..(10): Xaa in position 10 is Glu or Asn
  Variant (11)..(11): Xaa in position 11 is Ala or Cys
  Variant (12)..(12): Xaa in position 12 is any amino acid
  Variant (14)..(14): Xaa in position 14 is Lys or Arg
  Variant (15)..(15): Xaa in position 15 is any amino acid
  Variant (16)..(16): Xaa in position 16 is Ala or Gly
  Variant (17)..(17): Xaa in position 17 is Lys or Arg
  Variant (18)..(18): Xaa in position 18 is any amino acid
  Variant (19)..(19): Xaa in position 19 is Ile, Leu or Met
  Variant (20)..(20): Xaa in position 20 is any amino acid
  Variant (21)..(21): Xaa in position 21 is Ile, Leu, Met or Val
GXXXDXXXGXXXDXXXXXXXX

SEQ ID NO: 42468 - protein, 9 aa, Artificial sequence
  protein pattern
  Variant (2)..(2): Xaa in position 2 is any amino acid
  Variant (5)..(5): Xaa in position 5 is Ala or Gly
  Variant (6)..(6): Xaa in position 6 is Ala, Ile or Val
  Variant (9)..(9): Xaa in position 9 is Ala or Gly
CXDNXXMIX

SEQ ID NO: 42469 - protein, 14 aa, Artificial sequence
  protein pattern
  Variant (2)..(2): Xaa in position 2 is Ala or Gly
  Variant (3)..(3): Xaa in position 3 is Phe, Ile, Leu or Val
  Variant (5)..(5): Xaa in position 5 is Gly, Ser or Thr
  Variant (7)..(7): Xaa in position 7 is Ala or Cys
  Variant (8)..(8): Xaa in position 8 is Asp or Asn
  Variant (9)..(9): Xaa in position 9 is Asp, Glu or Lys
  Variant (10)..(10): Xaa in position 10 is any amino acid
  Variant (11)..(11): Xaa in position 11 is Ala, Cys, Gly or Ser
  Variant (12)..(12): Xaa in position 12 is any amino acid
  Variant (13)..(13): Xaa in position 13 is Ala, Gly or Ser
  Variant (14)..(14): Xaa in position 14 is Ala, Ile, Leu or Val
LXXEXSXXXXXXXX

SEQ ID NO: 42470 - protein, 16 aa, Artificial sequence
  protein pattern
  Variant (2)..(3): Xaa in position 2 to 3 is any or no amino acid
  Variant (7)..(7): Xaa in position 7 is Ala, Gly or Ser
  Variant (8)..(8): Xaa in position 8 is Ala, Cys or Ser
  Variant (10)..(11): Xaa in position 10 to 11 is any amino acid
  Variant (12)..(12): Xaa in position 12 is Ile, Leu or Val
  Variant (13)..(15): Xaa in position 13 to 15 is any amino acid
  Variant (16)..(16): Xaa in position 16 is Phe, Ile, Leu, Met or Val
VXXGGVXXNXXXXXXX

SEQ ID NO: 42471 - DNA, 1188 bp, Escherichia coli
  CDS (1)..(1188): transl_table=11
atgttccctgtttcatcaattggtaatgatattagtagtgatttagtccgtcgaaaaatgaatgaccttcctgaaagcccaacaggaaataacctcgaagcactagcaccaggtatagaaaaactaaaacagacctctattgaaatggtcactttacttaacacgttacaacctggtggaaaatgcattatcactggtgattttcaaaaagaattagcgtacttacaaaatgtaattctttataatgtctcgtctcttcgtctggattttttaggttataacgcccaaattattcaacgatcggacaatacttgtgaacttaccattaatgaaccgttaaaaaaccaggaaatatccacaggtaatatcaatattaattgcccattaaaagatatttacaatgaaatcaggaggttaaacgtaatttttagttgtgggactggagatatcgttgatctatcctctctggacttacgtaatgtcgatttagattattatgatttcacagataaacatatggctaatactattttaaatccttttaaattgaattcaacaaattttactaatgccaacatgtttcaggttaattttgttagttcaacacaaaacgccacaatctcctgggattatttactaaaaataacgcctgttttaataagcattagcgatatgtattctgaagaaaaaatcaagtttgtcgaaagttgtttaaatgagcctggagacattaccgaagaacaattaaaaattatgagatttgcaattataaaatctataccaagggcaactcttacagataaattagaaaatgaattaacaaaagaaatatataaaagctcatcgaaaatcatcaattgcttgaacagaattaaattaacagagatgaaagaattctcatcagaaaaaatatatgattacatcgatataatcattgaagattatgaaaataccaaagaaaatgcttatctggtcgtcccccaaattaattatactatggatttaaacatagaagactctagctcagaagagttactttcagataataccctcgagaaagacgaaaattctccggacaatggctttgaggtcggggaatataacacatatgaagcatataactcagagaagcaatattttaccagagaggactatacgtatgattacgaccttttaaatgcaatataa

SEQ ID NO: 42472 - protein, 395 aa, Escherichia coli
MFPVSSIGNDISSDLVRRKMNDLPESPTGNNLEALAPGIEKLKQTSIEMVTLLNTLQPGGKCIITGDFQKELAYLQNVILYNVSSLRLDFLGYNAQIIQRSDNTCELTINEPLKNQEISTGNININCPLKDIYNEIRRLNVIFSCGTGDIVDLSSLDLRNVDLDYYDFTDKHMANTILNPFKLNSTNFTNANMFQVNFVSSTQNATISWDYLLKITPVLISISDMYSEEKIKFVESCLNEPGDITEEQLKIMRFAIIKSIPRATLTDKLENELTKEIYKSSSKIINCLNRIKLTEMKEFSSEKIYDYIDIIIEDYENTKENAYLVVPQINYTMDLNIEDSSSEELLSDNTLEKDENSPDNGFEVGEYNTYEAYNSEKQYFTREDYTYDYDLLNAI

SEQ ID NO: 42473 - DNA, 1188 bp, Escherichia coli O157:H7 EDL933
  CDS (1)..(1188): transl_table=11
atgttccctgtttcatcaattggtaatgatattagtagtgatttagtccgtcgaaaaatgaatgacctacctgaaagcccaacaggaaataacctcgaagcactagcaccaggtattgaaaaactaaaacagacctctattgaaatggtcactttacttaacacgttacaacctagtggaaaatgcattatcactggtgattttcaaaaagaattagcgtacttacaaaatgtaattctttataatgactcgtctcttcgtctggattttttaggttataacacccaaattattcaacgatcggacaatacttgtgaacttaccattaatgaaccgttaaaaaaccaggaaatatccacaggtaatatcaatattaattgcccattaaaagatatttacaatgaattcaggaggttaaacgtaatttttagttgtgggactggagatatcgttgatctatcctctctggacttacgtaatgtcgatttagattattatgatttcacagataaacatatggctaatactattttaaatccttttaaattgaattcaacaaattttactaatgccaacatgtttcaggttaattttgttagttcaacacaaaacgccaaaatctcctgggattatttactaaaaataacgcctgttttaacaagcattagcgatatgtattctgaagaaaaaattaagtttgtcgaaagttgtttaaatgagcttggagatattaccgaagaacaattaaaaattatgagatttgcaattataaaatctataccaagagcaactctcacagataaattagaaaatgatttaacaaaagaaatatataaaagctcatcgaaaatcaataattgcttgaacagaattaaattaccagagatgatagatttctcatcagaaaaaatacataattatatcgacataatcattgaagattatgaaaatatcaaagaaaatgcttatctggtcattccccaaattaattatactatggatttaaacatagaagactctagctcagaagagttattttcagataacaccctcgagaaagacgaaaattctccggacaatggttttgaggtcggggaatataacacatatgaagcatataactcagagaatcaatatcttaccagagagaactatacgtataattacgaccttttaaatgcaatatag

SEQ ID NO: 42474 - protein, 395 aa, Escherichia coli O157:H7 EDL933
MFPVSSIGNDISSDLVRRKMNDLPESPTGNNLEALAPGIEKLKQTSIEMVTLLNTLQPSGKCIITGDFQKELAYLQNVILYNDSSLRLDFLGYNTQIIQRSDNTCELTINEPLKNQEISTGNININCPLKDIYNEFRRLNVIFSCGTGDIVDLSSLDLRNVDLDYYDFTDKHMANTILNPFKLNSTNFTNANMFQVNFVSSTQNAKISWDYLLKITPVLTSISDMYSEEKIKFVESCLNELGDITEEQLKIMRFAIIKSIPRATLTDKLENDLTKEIYKSSSKINNCLNRIKLPEMIDFSSEKIHNYIDIIIEDYENIKENAYLVIPQINYTMDLNIEDSSSEELFSDNTLEKDENSPDNGFEVGEYNTYEAYNSENQYLTRENYTYNYDLLNAI

SEQ ID NO: 42475 - DNA, 25 bp, Artificial sequence
  primer
atgttccctgtttcatcaattggta

SEQ ID NO: 42476 - DNA, 28 bp, Artificial sequence
  primer
ttatattgcatttaaaaggtcgtaatca

SEQ ID NO: 42477 - DNA, 1041 bp, Escherichia coli
  CDS (1)..(1041): transl_table=11
atgactggtcagtcttcatctcaggcggcaacgcccattcagtggtggaaacccgcgcttttctttctcgttgtcattgccggtctctggtatgtgaaatgggaaccttactacggcaaagcgtttactgctgccgaaacccacagtatcggtaaatctatccttgcgcaggcggatgctaacccatggcaggcggcgttggattacgcgatgatctatttcctcgcggtatggaaagcggcggtgctgggggtgatcctcggttcgttgattcaggtgctgatcccgcgtgactggttgttgcgtacgcttgggcaatcgcgctttcgcggcacgctgctgggaacgctgttttcgttgccgggcatgatgtgtacctgctgtgcggctccggtcgcggcgggaatgcgtcgccaacaggtgtcgatgggcggtgcgctggcattctggatgggcaatccggtgttaaacccggcgacgctggtgtttatgggctttgtcctcggctggggttttgcggcgattcgtctggtggccgggctggtgatggtgttgctgattgcgacgctggtgcaaaaatgggtgcgtgaaacaccgcaaacgcaggcaccggtcgaaattgacataccggaagcacagggcgggttttttagccgctggggcagggcgctatggacgcttttctggagtacgatcccggtttacatccttgcagtactggtgttgggtgccgctcgcgtctggttattcccccatgccgatggtgctgtcgataacagcctgatgtgggtggtggcgatggcggtagcaggatgcttgtttgtcattcccacggcagcagaaattccgattgtacaaacgatgatgctggcaggtatgggaaccgctccggcgctggcattgttgatgacgctcccggcagtgagtttgccgtcactgattatgctgcgcaaagcgttcccggcgaaagccttatggctgacaggggcgatggtggcagtgtctggtgtgattgtcggcgggctggcgctgttgttctaa

SEQ ID NO: 42478 - protein, 346 aa, Escherichia coli
MTGQSSSQAATPIQWWKPALFFLVVIAGLWYVKWEPYYGKAFTAAETHSIGKSILAQADANPWQAALDYAMIYFLAVWKAAVLGVILGSLIQVLIPRDWLLRTLGQSRFRGTLLGTLFSLPGMMCTCCAAPVAAGMRRQQVSMGGALAFWMGNPVLNPATLVFMGFVLGWGFAAIRLVAGLVMVLLIATLVQKWVRETPQTQAPVEIDIPEAQGGFFSRWGRALWTLFWSTIPVYILAVLVLGAARVWLFPHADGAVDNSLMWVVAMAVAGCLFVIPTAAEIPIVQTMMLAGMGTAPALALLMTLPAVSLPSLIMLRKAFPAKALWLTGAMVAVSGVIVGGLALLF

SEQ ID NO: 42479 - DNA, 1062 bp, Burkholderia mallei ATCC 23344
  CDS (1)..(1062): transl_table=11
atgagcagctcccgttcctatacaccgcatccggcgctcggcctcgcgacgttcgtcgtgctggccgtcgcgggcctcttctacgtgaagtggtttccgtattatcacaaggcgttcgccgcggccgaacaccattcgatcggccagtcgatcctgatgggcgccgcggcgcacgcgccgcagccgtcgctgcaggcggcgctcgattacgcatgggcgtacggcaaggcgatctggcaggcgatggtgctgggcctgctgctcggttcggccgtgcaggcgctgctgcccgcgcactgggtcgcgcgcgcgctcggcggcacgggcttcggcagcgtcgcggcgggggggctgctggcgcttcccggcatgatgtgcacgtgctgcgcggcgcccgtcgtcgcgggcctgcgcgagcgcgacgcgtcgccgggcggcgcgctcgcgttctggctcagcaacaccgtgctcaatcccgccgcgctcgtgttcatgggcttcgtgctcggctggcactggagcgcgctgcggctcgtgctcggcgtcgcgatggtgttcggcgtcggttatctggtcaatcgtctggccggcgcgcagccgcgcgtcgtcgacgatgcgcttcgcgcgaagctcgtcgccgagcaggcggcggtcggcaacgcgttcgtgcggtggatgaagatcttcgcgcggatgaccgtgcgcctcgtgcccgaatacctggtgctcgtgctgctgctcggcgcggcgcgcgcatggctgtttccgcacatcgggccggacatcggcaacggggtcggctggatcgtcgcgttcgcgatcgccggcatgctgttcgtgattccgaccgcgggcgaggtgccgatcatccaggcgatgctctcgctcggcatgggcgttggtccggcgggcgcgctgctgatgacgctgccgcccgtcagcgtgccgtcgctcgcgatgctggcgcgttcgttcaagccggcgacgctcgcgctcgtcgcggcgctcgtcgtcgcgttcggcgtggtcggcgggctggccgccgtcgcgctggggttctga

SEQ ID NO: 42480 - protein, 353 aa, Burkholderia mallei ATCC 23344
MSSSRSYTPHPALGLATFVVLAVAGLFYVKWFPYYHKAFAAAEHHSIGQSILMGAAAHAPQPSLQAALDYAWAYGKAIWQAMVLGLLLGSAVQALLPAHWVARALGGTGFGSVAAGGLLALPGMMCTCCAAPVVAGLRERDASPGGALAFWLSNTVLNPAALVFMGFVLGWHWSALRLVLGVAMVFGVGYLVNRLAGAQPRVVDDALRAKLVAEQAAVGNAFVRWMKIFARMTVRLVPEYLVLVLLLGAARAWLFPHIGPDIGNGVGWIVAFAIAGMLFVIPTAGEVPIIQAMLSLGMGVGPAGALLMTLPPVSVPSLAMLARSFKPATLALVAALVVAFGVVGGLAAVALGF

SEQ ID NO: 42481 - DNA, 1062 bp, Burkholderia pseudomallei K96243
  CDS (1)..(1062): transl_table=11
atgagcagctcccgttcctatacaccgcatccggcgctcggcctcgcgacgttcgtcgtgctggccgtcgcgggcctcttctacgtgaagtggtttccgtattatcacaaggcgttcgccgcggccgaacaccattcgatcggccagtcgatcctgatgggcgccgcggcgcacgcgccgcagccgtcgctgcaggcggcgctcgattacgcatgggcgtacggcaaggcgatctggcaggcgatggtgctgggcctgctgctcggttcggccgtgcaggcgctgctgcccgcgcactgggtcgcgcgcgcgctcggcggcacgggcttcggcagcgtcgcggcgggggggctgctggcgcttcccggcatgatgtgcacgtgctgcgcggcgcccgtcgtcgcgggcctgcgcgagcgcgacgcgtcgccgggcggcgcgctcgcgttctggctcggcaacaccgtgctcaatcccgccgcgctcgtgttcatgggcttcgtgctcggctggcactggagcgcgctgcggctcgtgctcggcgtcgcgatggtgttcggcgtcggttatctggtcaatcgcctggccggcgcgcagccgcgcgtcgtcgacgatgcgcttcgcgcgaagctcgtcgccgagcaggcggcggtcggcaacgcgttcgtgcggtggatgaagatcttcgcgcggatgaccgtgcgcctcgtgcccgaatacctggtgctcgtgctgctgctcggcgcggcgcgcgcatggctgtttccgcacatcgggccggacatcggcaacggggtcggctggatcgtcgcgttcgcgatcgccggcatgctgttcgtgattccgaccgcgggcgaggtgccgatcatccaggcgatgctctcgctcggcatgggcgttggtccggcgggcgcgctgctgatgacgctgccgcccgtcagcgtgccgtcgctcgcgatgctggcgcgttcgttcaagccggcgacgctcgcgctcgtcgcggcgctcgtcgtcgcgttcggcgtggtcggcgggctggccgccgtcgcgctggggttctga

SEQ ID NO: 42482 - protein, 353 aa, Burkholderia pseudomallei K96243
MSSSRSYTPHPALGLATFVVLAVAGLFYVKWFPYYHKAFAAAEHHSIGQSILMGAAAHAPQPSLQAALDYAWAYGKAIWQAMVLGLLLGSAVQALLPAHWVARALGGTGFGSVAAGGLLALPGMMCTCCAAPVVAGLRERDASPGGALAFWLGNTVLNPAALVFMGFVLGWHWSALRLVLGVAMVFGVGYLVNRLAGAQPRVVDDALRAKLVAEQAAVGNAFVRWMKIFARMTVRLVPEYLVLVLLLGAARAWLFPHIGPDIGNGVGWIVAFAIAGMLFVIPTAGEVPIIQAMLSLGMGVGPAGALLMTLPPVSVPSLAMLARSFKPATLALVAALVVAFGVVGGLAAVALGF

SEQ ID NO: 42483 - DNA, 1470 bp, Pseudomonas fluorescens Pf-5
  CDS (1)..(1470): transl_table=11
ttgcgcagcctcgctgacgctcggcagcggctacagggccagtgccgatccaagattggtgtagccgctgccgcaggctcgggccgcgttcggacgaacggcccgcagggacgcagcgttctcaagcccgacagcgctccgacgggagatcgccaggcaaggccctgcgggcctttgcgcagcctcgctgacgctcggcagcggctacagggccagtgccgatcaaggttttgtgtagccgctgccgcaggctcgggccgcgttcggacgaacggctcgcagggacgcagcgttctcaaggccgatgagctcccgatgggggatcgccaggcaaggccggacgagatcggttcgcagcgcgccggcgccagcggctacaattcgcgcttattgtcctcgtgcggaatacctttcatgtccaacctcgcctccacccagcccaaccgcggctgggcgttctggtgcaaacccctgctgttcctgctggtcgccgccatcggcctgtattacgtgaagtggtcgccctactacctcaaggcctttgtcgccgccgacagccacagcatcggcgcctcgatcctcaacgatcagcagagctcgccctggagcgccgccctggcctattcccaggtgtacttcctggccatctggaaggctgcggtgctggcggtgatcctgggttccctgctgcaggtgctgattccccgggattggctgctgcgcctgttcggccgtgccggcttcagctcgaccctgcgcggcggcctgttcgccctgccgggcatgatgtgttcctgctgcgccgcgccggtggctgctggcctgcgccggcagaaggtttcggtgggtgcggccctggcgttctggatcgccaacccggtgctcaacccggccaccctggtgttcatgggctttgtcctgggctggggcttttccgccctgcgcctggtggcgggcattgtcctggtgctgggcgtttccctggtggcgcagcgtatcgccggccccgagcaactgcccgaagccgcggtggatgcggtggtggaagccagcacggtgaacgaccagccgttcctcagccgctggggcaagaccctgtggcaactgttctggagcaccattccgatctacgtactggcggtactggtgctgggcgcggcgcgggtctggctgtttccgcatatcgacggtgccatgggtgacagcctgtggtggctggtgccgctggcgatcgccgggaccctgttcgtgatccccacggcggcagagattcccatcgtccagaccatgatgaccctgggcctgggcaccgggccggcggtggccctgctgatgaccctgccgagcatcagcctgccgtcgctgctgatgctgcgcaaggatttcgatgcccgagtactggtgaccgtggccgtgctgaccatgctggtggggattgtctgcgggttgattggtgcggtgttgttgtag

SEQ ID NO: 42484 - protein, 489 aa, Pseudomonas fluorescens Pf-5
MRSLADARQRLQGQCRSKIGVAAAAGSGRVRTNGPQGRSVLKPDSAPTGDRQARPCGPLRSLADARQRLQGQCRSRFCVAAAAGSGRVRTNGSQGRSVLKADELPMGDRQARPDEIGSQRAGASGYNSRLLSSCGIPFMSNLASTQPNRGWAFWCKPLLFLLVAAIGLYYVKWSPYYLKAFVAADSHSIGASILNDQQSSPWSAALAYSQVYFLAIWKAAVLAVILGSLLQVLIPRDWLLRLFGRAGFSSTLRGGLFALPGMMCSCCAAPVAAGLRRQKVSVGAALAFWIANPVLNPATLVFMGFVLGWGFSALRLVAGIVLVLGVSLVAQRIAGPEQLPEAAVDAVVEASTVNDQPFLSRWGKTLWQLFWSTIPIYVLAVLVLGAARVWLFPHIDGAMGDSLWWLVPLAIAGTLFVIPTAAEIPIVQTMMTLGLGTGPAVALLMTLPSISLPSLLMLRKDFDARVLVTVAVLTMLVGIVCGLIGAVLL

SEQ ID NO: 42485 - DNA, 1059 bp, Burkholderia sp. 383
  CDS (1)..(1059): transl_table=11
atgacgaccacacgcgcccaacccagtccggccctcggctggatgaccttcctgctgattgcggtcgcgggcctgttctatgtgaaatggttcccgtactacaacaaggcgttcgttgccgccgagcatcattcgatcggccagtcgatcctgatgggcacgtcggcaaccgcgcccgagccgtcgctgaaggccgcgctcgactacgcgtgggcgtacggcaaggcgatctggcaggcgatggtgctgggcctgctgctcggttcggccgtgcaggcgctgctgcccgcacactgggtcgcgcgcgtgctcggccgcaccggcttcggcagcgttgccgcgggcggtttgctgtcgctgcccggcatgatgtgcacgtgctgtgcggcgccggtcgtcgcggggctgcgtgcgcgccatgcatcgccgggcggggcggtcgcgttctggctcggcaacacggtgctgaacccggcggcgctggtgttcatgggcttcgtgctcggctggcactggagcgcgctgcgcctcgtgctcggcgtcgcgatggtgttcgggatcggctatctgctgaaccgcatcgcacgccctgaagaccgcagcatcgacgatgcgcagctcgccgcgctggcggcagagcaggccgcggccggcaatccgttcgtccgctgggtgaagctgctggcgcgcatggccgtgcggctcgtgcccgaatacatcgtgctcgtgctgctgctcggcgccgcgcgtgcgtggctgttcccgcatatcggcccggacatcggcaatcatcttggctggatcgtcgcgttcgcggtcgcgggcatgctgttcgtgatcccgacggccggcgaggtgccgatcatccaggcgatgctgtcgctcggcatgggcgtcggcccggctgccgcgctgctgatgacgctgccgccgatcagcgtgccgtcgctcgcgatgctcgcgcgttcgttcaagccttacatgctggccatcgtcgcgatcctcgtcgtcgtgttcgggatcgcgagcggcctgctcgcgatcgcgctcgggttctga

SEQ ID NO: 42486 - protein, 352 aa, Burkholderia sp. 383
MTTTRAQPSPALGWMTFLLIAVAGLFYVKWFPYYNKAFVAAEHHSIGQSILMGTSATAPEPSLKAALDYAWAYGKAIWQAMVLGLLLGSAVQALLPAHWVARVLGRTGFGSVAAGGLLSLPGMMCTCCAAPVVAGLRARHASPGGAVAFWLGNTVLNPAALVFMGFVLGWHWSALRLVLGVAMVFGIGYLLNRIARPEDRSIDDAQLAALAAEQAAAGNPFVRWVKLLARMAVRLVPEYIVLVLLLGAARAWLFPHIGPDIGNHLGWIVAFAVAGMLFVIPTAGEVPIIQAMLSLGMGVGPAAALLMTLPPISVPSLAMLARSFKPYMLAIVAILVVVFGIASGLLAIALGF

SEQ ID NO: 42487 - DNA, 1131 bp, Burkholderia thailandensis E264
  CDS (1)..(1131): transl_table=11
atgcgtccgcttccggtttccgcttcgatgcgccataccattcaaacacacgcatacacggcgaccagcatgagcagctcccgttcctacaccccgcatccggcgctcggcctcgcgacgttcgtcgtgttggccgtcgcgggcctcttctatgtgaagtggtttccgtactatcacaaggcgttcgtcgcggccgagcaccactcgatcggccagtcgatcctgatgggcaccgcggctcacgcgccggagccgtcgctgcaggcggcgctcgactatgcgtgggcgtacggcaaggcgatctggcaggcgatggtgctcggcctgctgctcggctcggcggtgcaggcgctcctgcccgcgcactgggtcgcgcgcgcgctcggcggcacgggtttcggcagtgtcgcggcgggcggcctgctcgcgctgccgggcatgatgtgcacatgctgcgcggcgcccgtcgtcgcgggcctgcgcgagcgcgacgcgtcgccgggtggcgcgctcgcgttctggctcggcaacaccgtgctcaatcccgccgcgctcgtgttcatgggcttcgtgctcggctggcactggagcgcgctgcggctcgtgctcggcgttgcgatggtgttcggcgtcggttatctgatcaatcgtctcgctggcgcgcagacgcgcgtcgtcgacgatgcgttgcgcgcgaggctcgtcgctgagcaggcggcggccggcaacgcgttcgtgcggtggatgaggattttcgcgcgcatgacggtgcgcctcgtgcccgaatatctggtgctcgtgctgctgctcggcgcggcgcgcgcgtggctgtttccgcacatcgggccggacatcggcaacgggatcggctggatcgtcgcattcgcgatcgcgggcatgctgttcgtgattccgaccgcgggcgaagtgccgatcatccaggcgatgctgtcgctcggcatgggcgtcggccctgcgggcgcgctgctgatgacgctgccgcccgtcagcgtgccgtcgctcgcgatgctggcgcgctcgttcaagccgacgacgctcgcgcttgtcgcggcgcttgtcgtcgcattcggggtggtcggcgggctggcggcggtcgcgctcggattctga

SEQ ID NO: 42488 - protein, 376 aa, Burkholderia thailandensis E264
MRPLPVSASMRHTIQTHAYTATSMSSSRSYTPHPALGLATFVVLAVAGLFYVKWFPYYHKAFVAAEHHSIGQSILMGTAAHAPEPSLQAALDYAWAYGKAIWQAMVLGLLLGSAVQALLPAHWVARALGGTGFGSVAAGGLLALPGMMCTCCAAPVVAGLRERDASPGGALAFWLGNTVLNPAALVFMGFVLGWHWSALRLVLGVAMVFGVGYLINRLAGAQTRVVDDALRARLVAEQAAAGNAFVRWMRIFARMTVRLVPEYLVLVLLLGAARAWLFPHIGPDIGNGIGWIVAFAIAGMLFVIPTAGEVPIIQAMLSLGMGVGPAGALLMTLPPVSVPSLAMLARSFKPTTLALVAALVVAFGVVGGLAAVALGF

SEQ ID NO: 42489 - DNA, 1056 bp, Burkholderia xenovorans LB400
  CDS (1)..(1056): transl_table=11
atgcaatcaacccttcgacaaccgcgtgtcgctctcggctggatcgtgttcctgctgattgccgtcgtcggcctcttctatgtgaagtggttcccgtactacaaccgcgccttcgtcgccgcgagccagcactccatcggcaaatccattctgatggggacgtcggcgagcgcgccggcggcgtcgtggcaggccgcgatcgactacgccctcgcctacggcaaggcgatctggcaagcgatggtgctggggctgctgctcggctcggcggtgcaggcgctgattccgccgcaatgggtcgcgcgtgcgctcggccggagcgatttcagcagcgtggtgaaaggcggcctgatgtcgctgccgggcatgatgtgcacctgctgcgcggcgccggtcgtggcgggcctgcgcgcgcgtcaggcggcgccgggcgcggcgatcgcgttctggctcggcaataccgccctgaatccggccacgttgatcttcatgggcttcgtgctcggctggcaatggatgggcctgcggctcgccttgggcatcgtgatggtattcggcctcgggtatctggtgaatcgcatggtcacgccgaaagaagccgaagcgtcgcgcgaagcgatggcgcaactgatcaccagcgacgtgcccggcactgcgttcacacgctgggtgaaaatcctcggcacgatgacgctgcggctcattcccgaatacatcgtgctggtgctgattcttggcgcggcgcgcacgtggctgtttccgcatgtcggaccggatatcgacaacagtttgctgtggatcgtcgcgctgtccatcgccggcacgctgttcgtgattccgaccgcgggcgaagtgccgatcatccaggccatgctctcgttcggcatggccgccggcccggcgggcgccttgctgatgacgctgccgctcattagcgtaccgtcgatggccatgctcgcccgctcgtttccgcgccgcgtgctgacggtggtggcgctcgccgtggtggtctgcggcgtggtcagcggattactggctgtcgccttggggttttaa

SEQ ID NO: 42490 - protein, 351 aa, Burkholderia xenovorans LB400
MQSTLRQPRVALGWIVFLLIAVVGLFYVKWFPYYNRAFVAASQHSIGKSILMGTSASAPAASWQAAIDYALAYGKAIWQAMVLGLLLGSAVQALIPPQWVARALGRSDFSSVVKGGLMSLPGMMCTCCAAPVVAGLRARQAAPGAAIAFWLGNTALNPATLIFMGFVLGWQWMGLRLALGIVMVFGLGYLVNRMVTPKEAEASREAMAQLITSDVPGTAFTRWVKILGTMTLRLIPEYIVLVLILGAARTWLFPHVGPDIDNSLLWIVALSIAGTLFVIPTAGEVPIIQAMLSFGMAAGPAGALLMTLPLISVPSMAMLARSFPRRVLTVVALAVVVCGVVSGLLAVALGF

SEQ ID NO: 42491 - DNA, 1059 bp, Burkholderia vietnamiensis G4
  CDS (1)..(1059): transl_table=11
atgacgaccacacgctcccaacccagtccggcgctcggctggatgaccttcctgctgatcgcagtggcgggcctgttctacgtgaaatggttcccgtactacaacaaggcgttcgtcgccgccgagcatcactcgatcggcaactcgatcctgatgggcacgtcggcgagcgcgcccgaaccgtcgctgaaggcggcgctcgactacgcatgggcgtacggcaaggcgatctggcaggcgatggtgctcggcctgctgctcggttcggccgtgcaggcgctgttgcccgcgcactgggtcgcgcgcgtgctcggtcgcagcggcttcggcagcgtcgccgcgggcggcctgctgtcgctgccgggcatgatgtgcacctgctgcgcggcgccggtcgtcgcgggcctgcgcgcgcgacatgcgtcgccgggcggtgcggtcgcgttctggctcggcaacacggtgctcaatccggccgcgctggtgttcatgggcttcgtgctcggctggcaatggagcgcgctgcgcctcgtgctcggcgtcgcgatggtgttcgggatcggctatctgctgaaccgcatcgcgcgccccgaggatcgcagcatcgacgacgcgcagctcgccgcgctggcggccgagcaggccgccgccggcaatccgttcgtccgctgggtgaagctgctcgcgcgcatggccgtgcggctcgtgcccgaatacatcgtgctcgtgctgctgctcggcgcggcgcgcgcgtggctgttcccgcacatcggtccggacatcggcaaccatctcggctggatcgtcgcgttcgcggtcgccggcacgttgttcgtgatcccgaccgccggcgaggtgccgatcatccaggcgatgctgtcgctcggcatgggcgtcggcccggccgctgcgctgctgatgacgctgccgccgatcagcgtgccgtcgctcgcgatgctcgcgcgctcgttcaagccgtacatgctggcgatcgtctcggtgctcgtcgtcgtgttcggggtcgtgagcgggctgctcgcgatcgcgttcgggttctga

SEQ ID NO: 42492 - protein, 352 aa, Burkholderia vietnamiensis G4
MTTTRSQPSPALGWMTFLLIAVAGLFYVKWFPYYNKAFVAAEHHSIGNSILMGTSASAPEPSLKAALDYAWAYGKAIWQAMVLGLLLGSAVQALLPAHWVARVLGRSGFGSVAAGGLLSLPGMMCTCCAAPVVAGLRARHASPGGAVAFWLGNTVLNPAALVFMGFVLGWQWSALRLVLGVAMVFGIGYLLNRIARPEDRSIDDAQLAALAAEQAAAGNPFVRWVKLLARMAVRLVPEYIVLVLLLGAARAWLFPHIGPDIGNHLGWIVAFAVAGTLFVIPTAGEVPIIQAMLSLGMGVGPAAALLMTLPPISVPSLAMLARSFKPYMLAIVSVLVVVFGVVSGLLAIAFGF

SEQ ID NO: 42493 - DNA, 24 bp, Artificial sequence
  primer
atgactggtcagtcttcatctcag

SEQ ID NO: 42494 - DNA, 23 bp, Artificial sequence
  primer
ttagaacaacagcgccagcccgc

SEQ ID NO: 42495 - protein, 352 aa, Artificial sequence
  consensus sequence
  Variant (2)..(7): Xaa in position 2 to 7 is any amino acid
  Variant (8)..(8): Xaa in position 8 is any or no amino acid
  Variant (10)..(17): Xaa in position 10 to 17 is any amino acid
  Variant (18)..(21): Xaa in position 18 to 21 is any or no amino acid
  Variant (23)..(25): Xaa in position 23 to 25 is any amino acid
  Variant (27)..(28): Xaa in position 27 to 28 is any amino acid
  Variant (31)..(31): Xaa in position 31 is any amino acid
  Variant (36)..(36): Xaa in position 36 is any amino acid
  Variant (40)..(40): Xaa in position 40 is any amino acid
  Variant (44)..(44): Xaa in position 44 is any amino acid
  Variant (47)..(48): Xaa in position 47 to 48 is any amino acid
  Variant (53)..(53): Xaa in position 53 is any amino acid
  Variant (57)..(60): Xaa in position 57 to 60 is any amino acid
  Variant (62)..(65): Xaa in position 62 to 65 is any amino acid
  Variant (66)..(69): Xaa in position 66 to 69 is any or no amino acid
  Variant (76)..(77): Xaa in position 76 to 77 is any amino acid
  Variant (79)..(80): Xaa in position 79 to 80 is any amino acid
  Variant (84)..(84): Xaa in position 84 is any amino acid
  Variant (86)..(86): Xaa in position 86 is any amino acid
  Variant (90)..(91): Xaa in position 90 to 91 is any amino acid
  Variant (95)..(96): Xaa in position 95 to 96 is any amino acid
  Variant (98)..(98): Xaa in position 98 is any amino acid
  Variant (100)..(100): Xaa in position 100 is any amino acid
  Variant (102)..(103): Xaa in position 102 to 103 is any amino acid
  Variant (105)..(106): Xaa in position 105 to 106 is any amino acid
  Variant (108)..(108): Xaa in position 108 is any amino acid
  Variant (111)..(113): Xaa in position 111 to 113 is any amino acid
  Variant (115)..(115): Xaa in position 115 is any amino acid
  Variant (117)..(119): Xaa in position 117 to 119 is any amino acid
  Variant (123)..(124): Xaa in position 123 to 124 is any amino acid
  Variant (138)..(138): Xaa in position 138 is any amino acid
  Variant (143)..(146): Xaa in position 143 to 146 is any amino acid
  Variant (148)..(148): Xaa in position 148 is any amino acid
  Variant (150)..(150): Xaa in position 150 is any amino acid
  Variant (152)..(152): Xaa in position 152 is any amino acid
  Variant (156)..(157): Xaa in position 156 to 157 is any amino acid
  Variant (159)..(159): Xaa in position 159 is any amino acid
  Variant (165)..(165): Xaa in position 165 is any amino acid
  Variant (176)..(178): Xaa in position 176 to 178 is any amino acid
  Variant (184)..(184): Xaa in position 184 is any amino acid
  Variant (186)..(187): Xaa in position 186 to 187 is any amino acid
  Variant (190)..(190): Xaa in position 190 is any amino acid
  Variant (192)..(194): Xaa in position 192 to 194 is any amino acid
  Variant (196)..(197): Xaa in position 196 to 197 is any amino acid
  Variant (199)..(211): Xaa in position 199 to 211 is any amino acid
  Variant (212)..(212): Xaa in position 212 is any or no amino acid
  Variant (214)..(222): Xaa in position 214 to 222 is any amino acid
  Variant (223)..(225): Xaa in position 223 to 225 is any or no amino acid
  Variant (227)..(227): Xaa in position 227 is any amino acid
  Variant (230)..(241): Xaa in position 230 to 241 is any amino acid
  Variant (243)..(243): Xaa in position 243 is any amino acid
  Variant (245)..(247): Xaa in position 245 to 247 is any amino acid
  Variant (250)..(250): Xaa in position 250 is any amino acid
  Variant (256)..(256): Xaa in position 256 is any amino acid
  Variant (262)..(267): Xaa in position 262 to 267 is any amino acid
  Variant (269)..(271): Xaa in position 269 to 271 is any amino acid
  Variant (273)..(273): Xaa in position 273 is any amino acid
  Variant (276)..(276): Xaa in position 276 is any amino acid
  Variant (278)..(278): Xaa in position 278 is any amino acid
  Variant (281)..(281): Xaa in position 281 is any amino acid
  Variant (289)..(289): Xaa in position 289 is any amino acid
  Variant (291)..(291): Xaa in position 291 is any amino acid
  Variant (294)..(294): Xaa in position 294 is any amino acid
  Variant (296)..(296): Xaa in position 296 is any amino acid
  Variant (298)..(300): Xaa in position 298 to 300 is any amino acid
  Variant (304)..(304): Xaa in position 304 is any amino acid
  Variant (308)..(308): Xaa in position 308 is any amino acid
  Variant (316)..(317): Xaa in position 316 to 317 is any amino acid
  Variant (319)..(319): Xaa in position 319 is any amino acid
  Variant (323)..(323): Xaa in position 323 is any amino acid
  Variant (326)..(328): Xaa in position 326 to 328 is any amino acid
  Variant (330)..(333): Xaa in position 330 to 333 is any amino acid
  Variant (335)..(336): Xaa in position 335 to 336 is any amino acid
  Variant (338)..(340): Xaa in position 338 to 340 is any amino acid
  Variant (342)..(344): Xaa in position 342 to 344 is any amino acid
  Variant (346)..(348): Xaa in position 346 to 348 is any amino acid
  Variant (351)..(351): Xaa in position 351 is any amino acid
MXXXXXXXPXXXXXXXXXXXXFXXXAXXGLXYVKWXPYYXKAFXAAXXHSIGXSILXXXXAXXXXXXXXAALDYAXXYXXAIWXAXVLGXXLGSXXQXLXPXXWXXRXLGXXXFXSXXXGGLXXLPGMMCTCCAAPVXAGLRXXXXSXGXAXAFWXXNXVLNPAXLVFMGFVLGWXXXALRLVXGXXMVXGXXXLXXRXXXXXXXXXXXXXXAXXXXXXXXXXXXFXRWXXXXXXXXXXXXPXYXXXVLXLGAARXWLFPHXXXXXXNXXXWXVAXAXAGXLFVIPTAXEXPIXQXMXXXGMGXGPAXALLMTLPXXSXPSLXMLXXXFXXXXLXXVXXXVXXXGXXXGLXA

SEQ ID NO: 42496 - protein, 58 aa, Artificial sequence
  protein pattern
  Variant (14)..(14): Xaa in position 14 is Ala or Val
  Variant (17)..(17): Xaa in position 17 is Leu or Met
  Variant (19)..(19): Xaa in position 19 is any or no amino acid
  Variant (21)..(24): Xaa in position 21 to 24 is any amino acid
  Variant (25)..(25): Xaa in position 25 is any or no amino acid
  Variant (27)..(27): Xaa in position 27 is Ala or Gly
  Variant (29)..(29): Xaa in position 29 is Ile, Leu or Val
  Variant (33)..(33): Xaa in position 33 is Leu or Met
  Variant (34)..(34): Xaa in position 34 is Gly or Ser
  Variant (36)..(36): Xaa in position 36 is Pro or Thr
  Variant (37)..(37): Xaa in position 37 is Ala or Val
  Variant (42)..(42): Xaa in position 42 is Ala or Thr
  Variant (44)..(44): Xaa in position 44 is Ile or Val
  Variant (53)..(53): Xaa in position 53 is any amino acid
  Variant (54)..(54): Xaa in position 54 is Phe or Trp
  Variant (55)..(55): Xaa in position 55 is any amino acid
  Variant (56)..(56): Xaa in position 56 is Ala or Gly
  Variant (57)..(57): Xaa in position 57 is Ile or Leu
LPGMMCTCCAAPVXAGXRXRXXXXXGXAXAFWXXNXXLNPAXLXFMGFVLGWXXXXXR

SEQ ID NO: 42497 - protein, 41 aa, Artificial sequence
  protein pattern
  Variant (3)..(3): Xaa in position 3 is Phe, Trp or Tyr
  Variant (8)..(8): Xaa in position 8 is any amino acid
  Variant (12)..(12): Xaa in position 12 is any amino acid
  Variant (16)..(16): Xaa in position 16 is Ala, Thr or Val
  Variant (19)..(19): Xaa in position 19 is any amino acid
  Variant (20)..(20): Xaa in position 20 is any or no amino acid
  Variant (22)..(22): Xaa in position 22 is any or no amino acid
  Variant (26)..(26): Xaa in position 26 is any amino acid
  Variant (30)..(35): Xaa in position 30 to 35 is any amino acid
  Variant (36)..(36): Xaa in position 36 is any or no amino acid
  Variant (38)..(38): Xaa in position 38 is any amino acid
  Variant (39)..(39): Xaa in position 39 is Pro, Gln or Ser
  Variant (40)..(40): Xaa in position 40 is Ala or Ser
  Variant (41)..(41): Xaa in position 41 is Ala or Leu
GLXYVKWXPYYXKAFXAAXXHXSIGXSILXXXXXXXPXXXX

SEQ ID NO: 42498 - protein, 40 aa, Artificial sequence
  protein pattern
  Variant (2)..(3): Xaa in position 2 to 3 is any amino acid
  Variant (5)..(6): Xaa in position 5 to 6 is any amino acid
  Variant (8)..(8): Xaa in position 8 is Ile or Val
  Variant (10)..(10): Xaa in position 10 is any amino acid
  Variant (12)..(12): Xaa in position 12 is any amino acid
  Variant (16)..(16): Xaa in position 16 is Leu or Val
  Variant (17)..(17): Xaa in position 17 is Ile or Leu
  Variant (21)..(21): Xaa in position 21 is Ala or Leu
  Variant (22)..(22): Xaa in position 22 is Ile or Val
  Variant (24)..(24): Xaa in position 24 is Ala or Val
  Variant (26)..(26): Xaa in position 26 is Ile or Leu
  Variant (28)..(29): Xaa in position 28 to 29 is any amino acid
  Variant (31)..(31): Xaa in position 31 is Leu or Val
  Variant (32)..(32): Xaa in position 32 is Ala or Leu
  Variant (34)..(34): Xaa in position 34 is Ala, Thr or Val
  Variant (37)..(37): Xaa in position 37 is any amino acid
  Variant (38)..(38): Xaa in position 38 is Ser or Thr
  Variant (39)..(39): Xaa in position 39 is any amino acid
AXXYXXAXWXAXVLGXXLGSXXQXLXPXXWXXRXLGXXXF

SEQ ID NO: 42499 - protein, 57 aa, Artificial sequence
  protein pattern
  Variant (2)..(2): Xaa in position 2 is any or no amino acid
  Variant (4)..(4): Xaa in position 4 is Leu or Met
  Variant (6)..(6): Xaa in position 6 is Thr or Val
  Variant (7)..(7): Xaa in position 7 is Ala or Gly
  Variant (10)..(10): Xaa in position 10 is Ala, Gly, Leu or Val
  Variant (18)..(18): Xaa in position 18 is Ala, Pro or Ser
  Variant (19)..(19): Xaa in position 19 is Ile or Val
  Variant (21)..(21): Xaa in position 21 is Leu or Val
  Variant (25)..(25): Xaa in position 25 is Ala, Ile or Leu
  Variant (28)..(28): Xaa in position 28 is any amino acid
  Variant (29)..(29): Xaa in position 29 is Lys or Arg
  Variant (30)..(30): Xaa in position 30 is Ala, Asp or Ser
  Variant (32)..(32): Xaa in position 32 is any amino acid
  Variant (33)..(33): Xaa in position 33 is Ala or Pro
  Variant (34)..(35): Xaa in position 34 to 35 is any amino acid
  Variant (37)..(38): Xaa in position 37 to 38 is any amino acid
  Variant (39)..(39): Xaa in position 39 is Thr or Val
  Variant (40)..(40): Xaa in position 40 is Ala, Gly or Ser
  Variant (41)..(41): Xaa in position 41 is Ala, Ile or Val
  Variant (42)..(42): Xaa in position 42 is Leu or Met
  Variant (43)..(43): Xaa in position 43 is Thr or Val
  Variant (44)..(44): Xaa in position 44 is any amino acid
  Variant (45)..(45): Xaa in position 45 is Ala, Leu or Val
  Variant (46)..(46): Xaa in position 46 is any amino acid
  Variant (48)..(48): Xaa in position 48 is Ile or Val
  Variant (49)..(49): Xaa in position 49 is Ala, Ile or Val
  Variant (50)..(50): Xaa in position 50 is Cys, Gly, Ser or Val
  Variant (52)..(52): Xaa in position 52 is Gly or Leu
  Variant (53)..(53): Xaa in position 53 is Ala, Ile or Leu
  Variant (54)..(54): Xaa in position 54 is Ala or Gly
  Variant (55)..(55): Xaa in position 55 is Ala, Ile, Leu or Val
  Variant (56)..(56): Xaa in position 56 is Ala, Leu or Val
  Variant (57)..(57): Xaa in position 57 is Phe or Leu
LXGXGXXPAXALLMTLPXXSXPSLXMLXXXFXXXXLXXXXXXXXXXGXXXGXXXXXX

SEQ ID NO: 42500 - protein, 14 aa, Artificial sequence
  protein pattern
  Variant (2)..(2): Xaa in position 2 is Gly, Asn or Thr
  Variant (3)..(3): Xaa in position 3 is any amino acid
  Variant (5)..(5): Xaa in position 5 is Ser, Thr or Val
  Variant (8)..(8): Xaa in position 8 is any amino acid
  Variant (9)..(9): Xaa in position 9 is Lys or Arg
  Variant (10)..(10): Xaa in position 10 is Ala, Ile or Leu
  Variant (11)..(11): Xaa in position 11 is Phe or Leu
  Variant (12)..(13): Xaa in position 12 to 13 is any amino acid
  Variant (14)..(14): Xaa in position 14 is Leu or Met
GXXFXRWXXXXXXX

SEQ ID NO: 42501 - protein, 28 aa, Artificial sequence
  protein pattern
  Variant (2)..(2): Xaa in position 2 is Ala or Val
  Variant (3)..(3): Xaa in position 3 is Ala or Leu
  Variant (5)..(5): Xaa in position 5 is any or no amino acid
  Variant (7)..(7): Xaa in position 7 is any or no amino acid
  Variant (10)..(10): Xaa in position 10 is Phe or Leu
  Variant (11)..(11): Xaa in position 11 is Gly or Leu
  Variant (12)..(12): Xaa in position 12 is Ile, Leu or Val
  Variant (13)..(13): Xaa in position 13 is Ala or Gly
  Variant (14)..(14): Xaa in position 14 is any amino acid
  Variant (16)..(16): Xaa in position 16 is Ile, Leu or Val
  Variant (17)..(17): Xaa in position 17 is Asn or Gln
  Variant (18)..(18): Xaa in position 18 is Lys or Arg
  Variant (19)..(19): Xaa in position 19 is any amino acid
  Variant (20)..(20): Xaa in position 20 is Ala or Val
  Variant (21)..(23): Xaa in position 21 to 23 is any amino acid
  Variant (24)..(24): Xaa in position 24 is Asp, Glu, Pro or Thr
  Variant (25)..(27): Xaa in position 25 to 27 is any amino acid
  Variant (28)..(28): Xaa in position 28 is Ala, Asp or Ser
LXXGXVXMVXXXXXLXXXXXXXXXXXXX

SEQ ID NO: 42502 - DNA, 891 bp, Escherichia coli
  CDS (1)..(891): transl_table=11
atgaccatgagaacaggatgtgaaccgacccggtttggtaatgaagctaagaccattattcacggtgatgcgcttgccgaacttaaaaagatccccgccgaaagtgtcgatctgatctttgccgacccaccatataacatcggtaaaaattttgatggtctgatcgaagcctggaaagaagatctgtttatcgactggctgtttgaagtgattgcagagtgccaccgcgttctgaaaaagcagggcagcatgtacatcatgaacagtacggaaaacatgccctttatcgatctccagtgccgcaagctttttaccatcaaaagtcgcatcgtctggtcatatgacagttctggagtgcaggcgaaaaaacactacggctccatgtacgaacccatcctgatgatggtgaaagacgcaaagaactacacattcaacggtgatgctattctggtagaagccaaaaccggatcgcagcgcgcgttgatcgattatcgcaaaaatcctccacagccttacaatcatcaaaaagtaccgggtaacgtttgggattttccgcgcgtgcgttatttgatggatgaatatgaaaaccacccgacgcaaaaaccggaagccttactgaaacgcattattctcgcctcttccaacccaggcgatatcgttctcgacccgtttgctggtagctttactaccggtgccgtagccatcgccagcggacgaaaattcattggtattgagatcaacagcgagtacatcaaaatggggcttcgacggctggatgtcgcgtcgcattactctgcggaagaactggcgaaagtgaaaaaaagaaagaccggcaacctgtcaaaacgaagccggttaagcgaagttgaccccgatctcattacaaagtaa

SEQ ID NO: 42503 - protein, 296 aa, Escherichia coli
MTMRTGCEPTRFGNEAKTIIHGDALAELKKIPAESVDLIFADPPYNIGKNFDGLIEAWKEDLFIDWLFEVIAECHRVLKKQGSMYIMNSTENMPFIDLQCRKLFTIKSRIVWSYDSSGVQAKKHYGSMYEPILMMVKDAKNYTFNGDAILVEAKTGSQRALIDYRKNPPQPYNHQKVPGNVWDFPRVRYLMDEYENHPTQKPEALLKRIILASSNPGDIVLDPFAGSFTTGAVAIASGRKFIGIEINSEYIKMGLRRLDVASHYSAEELAKVKKRKTGNLSKRSRLSEVDPDLITK

SEQ ID NO: 42504 - DNA, 1134 bp, Mesorhizobium loti MAFF303099
  CDS (1)..(1134): transl_table=11
atgtctgccgtgcgtcttctccacgagttgtcccacgctccccagcaatccgaatggctggacacgatcctcaagggcgactgcgtcgcggccctcgaccgcctgccggaaaagtcggtcgacgtcatcttcgccgatccgccctacaatctgcagcttgacggcgatctgcaccggcccgaccagtccaaggtcgacgcggtcgacgatcactgggaccagttcgagaattttgaggcctatgacgccttcacccgcgcctggcttttggcggcgcgccgcgtgctgaagcccaacggcaccatctgggtcatcggctcctatcacaacatcttccgggtcggcgccaagatgcaggatctgggcttctggatcctcaacgacgtggtctggcgcaagaccaatccgatgccgaatttccgtggccgccgtttccagaacgcgcatgagacgatgatctgggcttctcgcgaccagaagggcaagggctacaccttcaactacgaggcgctgaaggcgtccaacgacgatatccagatgcgttcggactggctgttcccgatctgcaccggtggcgaacggctgaagaacgacaacggcgacaagctgcacccgacacagaagccggaagcgttgctcgcccgcatcatgatggcctcgaccaagcccggcgacatcgtgctcgaccctttcttcggctctggcacgacaggtgcggtcgccaaacgcctcggccgtcatttcgtcggcatcgagcgcgagcaggcctatatcgacgccgccaacgagcgtatcgatgcggtgcggccgctggaggatgccgatctgacggtattgaccggcaagcgcgccgagccgcgcgtcgccttcgtcagcctgatcgacaccgggttgatgacgcccggcgtcacgctttacgacgccaagaagcgctgggccgtcaaggtgcgcgccgacggcacggtcgcgatcggcgacagcgccggctcgatccacaagatcggcgccgaagtgcaggggctggacgcctgcaatggctggaccttctggcattatgagcgcagcggcgggctgaccccgatcgacgaactgcgccgcatcgcccgtctcggcatggagcgggcagggggctga

SEQ ID NO: 42505 - protein, 377 aa, Mesorhizobium loti MAFF303099
MSAVRLLHELSHAPQQSEWLDTILKGDCVAALDRLPEKSVDVIFADPPYNLQLDGDLHRPDQSKVDAVDDHWDQFENFEAYDAFTRAWLLAARRVLKPNGTIWVIGSYHNIFRVGAKMQDLGFWILNDVVWRKTNPMPNFRGRRFQNAHETMIWASRDQKGKGYTFNYEALKASNDDIQMRSDWLFPICTGGERLKNDNGDKLHPTQKPEALLARIMMASTKPGDIVLDPFFGSGTTGAVAKRLGRHFVGIEREQAYIDAANERIDAVRPLEDADLTVLTGKRAEPRVAFVSLIDTGLMTPGVTLYDAKKRWAVKVRADGTVAIGDSAGSIHKIGAEVQGLDACNGWTFWHYERSGGLTPIDELRRIARLGMERAGG

SEQ ID NO: 42506 - DNA, 1080 bp, Helicobacter pylori 26695
  CDS (1)..(1080): transl_table=11
atggattttttaaaagaaaacttaaacactatcatagagggggattgtttagaaaaattgaaagactttcctaacagaagcgttgattttatctttgctgaccccccatattttatgcaaacagagggggaattgaagcgttttgaaggcacaaaatttcaaggcgttgaggattattgggataaatttggctcttttaaggaatacgatgccttttgtttgggttggttgaaagaatgccaaaggattttaaaagataatggcagtatttgtgtgatagggagttttcaaaatatttttagaattggttttcatttgcaaaatttagggttttggatactcaatgatattatttggcacaagagtaatccggtgcctaattttgctggcaagagattatgcaacgcccatgagacgcttatttggtgtgctaaacacaaaaacagcaaagttgcctttaattataaaacaatgaagtacctcaataacgacaaacaagaaaaatcggtttggcaaatccctatttgcatgggtaacgaaagactaaaagatgcgcaaggtaaaaaagtgcattccacgcaaaaaccagaagcgcttttaaaaaaaatcattttaagcgcgactaaacctaaagatattattttagatcccttttttggcacaggcacaacaggggctgtggctaaatccatgaacaggtattttattggtattgaaaaagattctttttatattaaagaagcggcaaaacgcctgaataacactagggataaaagcgattttatcactaatttagatttagaaactaaacccccaaaaatacctatgagtcttttaatttctaaacaattattaaaaatcggggattttttatactcacctaacaaagaaaaaatttgtcaagttttagaaaacggacaagtgagggataatgaaaactatgaaacttctattcataagatgagcgctaaatatttgaataaaaccaaccataatggctggaaatttttttatgcgtattaccaaaatcaatttttattgctagatgaattgcgttatatctgccaaaaggactcttaa

SEQ ID NO: 42507 - protein, 359 aa, Helicobacter pylori 26695
MDFLKENLNTIIEGDCLEKLKDFPNRSVDFIFADPPYFMQTEGELKRFEGTKFQGVEDYWDKFGSFKEYDAFCLGWLKECQRILKDNGSICVIGSFQNIFRIGFHLQNLGFWILNDIIWHKSNPVPNFAGKRLCNAHETLIWCAKHKNSKVAFNYKTMKYLNNDKQEKSVWQIPICMGNERLKDAQGKKVHSTQKPEALLKKIILSATKPKDIILDPFFGTGTTGAVAKSMNRYFIGIEKDSFYIKEAAKRLNNTRDKSDFITNLDLETKPPKIPMSLLISKQLLKIGDFLYSPNKEKICQVLENGQVRDNENYETSIHKMSAKYLNKTNHNGWKFFYAYYQNQFLLLDELRYICQKDS

SEQ ID NO: 42508 - DNA, 1080 bp, Helicobacter pylori J99
  CDS (1)..(1080): transl_table=11
atggattttttaaaagaaaacttaaacactatcatagagggggattgtttagaaaaattgaaagattttcctaataaaagcgttgattttatctttgctgaccccccatattttatgcaaacagagggggaattgaagcgttttgaaggcacaaaatttcaaggcgttgaggatcattgggataaatttggctcttttgaagaatacgataccttttgtttgggttggttaaaagaatgccaaaggattttaaaagataatggcagtatttgtgtgatagggagttttcaaaatatttttagaattggttttcatttgcaaaatttagggttttggatactcaatgatattgtttggcacaagagcaatccggtgcctaattttgctggcaagagactatgcaacgcccatgaaacgcttatttggtgcgctaaacacaaaaatagcaaagttacctttaattataaaacaatgaagtacctcaataacgacaaacaagaaaaatcggtttggcaaatccctatttgcatgggtaacgaaaggctaaaagacgtgcaaggtaaaaaagtgcattccacgcaaaaaccagaagcactcttaaaaaaaatcattttaagcgcgactaaacctaaagacattattttagatcccttttttggcacaggcacaacaggggctgtggctaaatctatggataggtattttattggcattgaaaaagattctttttatattaaagaagcggcaaaacgccttaatagcactagggataaaagcgattttatcactaatttagaattagaaactaaacccccaaaaatccctatgagtcttttaatttctaaacaattattaaaaatcggggattttttatactcatctaacaaagaaaaaatttgtcaagttttagaaaacggacaagtgagggataatgaaaattatgaaacttctattcataaaatgagcgctaaatatttgaataaaaccaaccataatggctggaaatttttttatgcgtattatcaaaatcaatttttgttgctagatgaattgcgttatatctgccaaagggactcttaa

SEQ ID NO: 42509 - protein, 359 aa, Helicobacter pylori J99
MDFLKENLNTIIEGDCLEKLKDFPNKSVDFIFADPPYFMQTEGELKRFEGTKFQGVEDHWDKFGSFEEYDTFCLGWLKECQRILKDNGSICVIGSFQNIFRIGFHLQNLGFWILNDIVWHKSNPVPNFAGKRLCNAHETLIWCAKHKNSKVTFNYKTMKYLNNDKQEKSVWQIPICMGNERLKDVQGKKVHSTQKPEALLKKIILSATKPKDIILDPFFGTGTTGAVAKSMDRYFIGIEKDSFYIKEAAKRLNSTRDKSDFITNLELETKPPKIPMSLLISKQLLKIGDFLYSSNKEKICQVLENGQVRDNENYETSIHKMSAKYLNKTNHNGWKFFYAYYQNQFLLLDELRYICQRDS

SEQ ID NO: 42510 - DNA, 891 bp, Escherichia coli O157:H7 EDL933
  CDS (1)..(891): transl_table=11
gtgaccatgagaacaggatgtgaaccgacccggtttggtaatgaagctaagaccattattcacggtgatgcccttgccgaacttaaaaagctacctactgaaagcgtcgatctgatctttgccgacccaccgtataacatcggtaaaaattttgatggtctgatcgaagcctggaaagaagatctgtttatcgactggctgttagaagtgattgcagagtgccaccgcgttctgaaaaagcagggcagcatgtacatcatgaacagtacggaaaacatgccctttatcgatctccagtgccgcaagctttttaccatcaaaagtcgcatcgtctggtcatatgacagttctggagtgcaggcgaaaaaacactacggctccatgtacgaacccatcctgatgatggtgaaagacgcaaagaactacacattcaacggtgatgctattctggtagaagccaaaaccggatcgcagcgcgcgttgatcgattatcgcaaaaatcctccacagccttacaatcatcaaaaagtaccgggtaacgtctgggattttccgcgcgtgcgttatttgatggatgaatatgaaaaccacccgacgcaaaaaccggaagccttactgaaacgcattattctcgcctcttccaacccaggcgatatcgttctcgacccgtttgctggtagctttactaccggtgccgtagccatcgccagcggacgaaaattcattggtattgagatcaacagcgagtacatcaaaatggggcttcgacggctggatgtcgcgtcgcattactctgcggaagaactggcgaaagtgaaaaaaagaaagaccggcaacctgtcaaaacgaagccggttaagcgaagttgaccccgatctcattacaaagtaa

SEQ ID NO: 42511 - protein, 296 aa, Escherichia coli O157:H7 EDL933
MTMRTGCEPTRFGNEAKTIIHGDALAELKKLPTESVDLIFADPPYNIGKNFDGLIEAWKEDLFIDWLLEVIAECHRVLKKQGSMYIMNSTENMPFIDLQCRKLFTIKSRIVWSYDSSGVQAKKHYGSMYEPILMMVKDAKNYTFNGDAILVEAKTGSQRALIDYRKNPPQPYNHQKVPGNVWDFPRVRYLMDEYENHPTQKPEALLKRIILASSNPGDIVLDPFAGSFTTGAVAIASGRKFIGIEINSEYIKMGLRRLDVASHYSAEELAKVKKRKTGNLSKRSRLSEVDPDLITK

SEQ ID NO: 42512 - DNA, 1146 bp, Thermoplasma acidophilum DSM 1728
  CDS (1)..(1146): transl_table=11
atgcacttgagacatatgagtggcaggatgataggggatcagaagacggttttaaaattcgaaactatgctgaataatgtcatttcaggagattctatcgaaattatgaagcagatacctgacaatagtgttgacctgatctttgcagatccgccatataatctgcaattggaaaacgaactgtacaggccaaacgaaacaaaggtcaatggagtaagcgaagactgggataaattcaggtcattccaggattatgatgatttcacccttaactggttaagtcaatgcaagaggattctgaaagagtcaggaacaatatgggttataggcacataccataacattttcagagttggtaagataatgcaggatctaggattttggatattgaacgatattgtgtggattaaaaccaaccctatgccgaattttaaaggaacacgctttaacaatgcccatgagacgttgatttgggcttcgaaagataaggaatcgaaatatacgtttaactacaaaacaatgaaggcatacaacgatgatctgcagatgaggagcgattggtacatacctatttgtcaaggagatgagagaataaagattaatgggcaaaaacttcatcccactcaaaaaccggaggcattactatatagaataattaccgcaacatctaaacctggtgatatagtgttggatccctttgctggaacaggaactactttagtagtggcaaagaagttgggcagatccttcattggcattgagaaagaaccgctttatgtcgatgcatgcagggagaggttgaaaaataccgcatcgtatcaacaaaaactactggattatcccttggaaatcaggcctaaaagagtaccttttggcagtctgatagagaatggctatgtcaaagccggagaatatttatattctccagatggagaagccagggcattggttttagccaacggaaccttatcatatgaagataaatatgggtccatacataagataagtgctatgatattaaataaacccgcaaacaacggctgggcattttggtatgtcaaaagggatggtaagcttgtaagcataaatgatttaaggcaaaaattgttgaaggatcaatatgccaaccatcatggaatacagtaa

SEQ ID NO: 42513 - protein, 381 aa, Thermoplasma acidophilum DSM 1728
MHLRHMSGRMIGDQKTVLKFETMLNNVISGDSIEIMKQIPDNSVDLIFADPPYNLQLENELYRPNETKVNGVSEDWDKFRSFQDYDDFTLNWLSQCKRILKESGTIWVIGTYHNIFRVGKIMQDLGFWILNDIVWIKTNPMPNFKGTRFNNAHETLIWASKDKESKYTFNYKTMKAYNDDLQMRSDWYIPICQGDERIKINGQKLHPTQKPEALLYRIITATSKPGDIVLDPFAGTGTTLVVAKKLGRSFIGIEKEPLYVDACRERLKNTASYQQKLLDYPLEIRPKRVPFGSLIENGYVKAGEYLYSPDGEARALVLANGTLSYEDKYGSIHKISAMILNKPANNGWAFWYVKRDGKLVSINDLRQKLLKDQYANHHGIQ

SEQ ID NO: 42514 - DNA, 885 bp, Salmonella typhimurium LT2
  CDS (1)..(885): transl_table=11
atgaaagcggaatgtgaacctcagtactttggcgatgaatcgaagaagattattcacggtgacgcgctaacagaacttaaaaaactgccttctgaaagcattgacttaatttttgccgatccgccttacaatatcggaaaagatttcgacggtatggtggagtcctgggacgaagcgtcttttctggcctggctgtatgaatgcattgatgagtgccaccgcgtactgaagaaacacggcaccatgtacatcatgaatagcacagaaaatatgccgtatatcgatctcaaatgccgaacgctttttaccatcaaaagccgtatcgtctggtcctatgatagttccggggtgcaggcgaaaaaatactttggttctatgtatgaaccgatcctgatgatggtaaaaaacccgaaaagctatacctttaaccgtgatgcgattctggtcgaaaccactacgggcgctaagcgcgcgctaatcgattatcgaaaaaacccgccccaaccatacaatcagaaaaaagtgccgggcaacgtctggtcatttcctcgcgtacgttatctgatggatgaatatgaaaaccatcctacgcaaaagcccagcgcgctgttaaaacggatcatactggcctcttctaacccgagcgataccgtattggaccctttcgcgggcagtttcaccacaggcgctgtcgcagcggcgtcaggtcgtaagtttatcggtattgaactcaataatgagtacgtaaaaatggggctcagaagattgagcgtcacttcgcattattcagaaaatgaacttgcaaaagtcaaaaagagaaaaacacaaaacctgtccaaaaagcagcgaaatgtcgggataaacgcgctatcttcagagaagtaa

SEQ ID NO: 42515 - protein, 294 aa, Salmonella typhimurium LT2
MKAECEPQYFGDESKKIIHGDALTELKKLPSESIDLIFADPPYNIGKDFDGMVESWDEASFLAWLYECIDECHRVLKKHGTMYIMNSTENMPYIDLKCRTLFTIKSRIVWSYDSSGVQAKKYFGSMYEPILMMVKNPKSYTFNRDAILVETTTGAKRALIDYRKNPPQPYNQKKVPGNVWSFPRVRYLMDEYENHPTQKPSALLKRIILASSNPSDTVLDPFAGSFTTGAVAAASGRKFIGIELNNEYVKMGLRRLSVTSHYSENELAKVKKRKTQNLSKKQRNVGINALSSEK

SEQ ID NO: 42516 - DNA, 888 bp, Nostoc sp. PCC 7120
  CDS (1)..(888): transl_table=11
atgtttgaaacatatgaagacgaagcacacatcttatttcatggagatgccttaaatattttgtcaagtaacattccaagtgaatctgtagatcttatttttatagaccccccgtacaacataggaaaacatttctctaactttcatgataaatgggaatctgaggaagaatatgcaaactgggcttataaatggctagatgagtgcattcgggtgctaaaatctcacggaactatttatgttatgaccagtacacaagccatgccatattttgatatttatttgcggcagaaattaacaattctgagtcgaatagtatggcattatgatagttctggagttcaagcaactaagtatttcggttctatgtatgaaccgatacttcattgtgttaagaacaaaagtaattatatttttaattcagaagaaatcaaaattgaagcgaaaactggcgcacaacgaaaattaattgattatagaaaggcagttccagcaccatacaatacagagaaagtgcctggcaatgtttggtatttttctcgtgtgagatatcggatgccagaatatgaaaatcatccttcacagaaaccagaatcattaatagaaagaattattttgtccagtagcaatgaagatagtttggtattagatccctttgcggggacgtttacagttgcttctgtagcaaagcgtttagggagaaaatcaattagtatagagtctcaagaagaatatttgaaaataggtttaagacgtgtattaggttgggaagaatataagggagaacaactttcaccaccaattaaaacacatattagcagaaataaaagtcatcagagtttagattcattacagcagagcctttttaatgccgataccacagcatga

SEQ ID NO: 42517 - protein, 295 aa, Nostoc sp. PCC 7120
MFETYEDEAHILFHGDALNILSSNIPSESVDLIFIDPPYNIGKHFSNFHDKWESEEEYANWAYKWLDECIRVLKSHGTIYVMTSTQAMPYFDIYLRQKLTILSRIVWHYDSSGVQATKYFGSMYEPILHCVKNKSNYIFNSEEIKIEAKTGAQRKLIDYRKAVPAPYNTEKVPGNVWYFSRVRYRMPEYENHPSQKPESLIERIILSSSNEDSLVLDPFAGTFTVASVAKRLGRKSISIESQEEYLKIGLRRVLGWEEYKGEQLSPPIKTHISRNKSHQSLDSLQQSLFNADTTA

SEQ ID NO: 42518 - DNA, 1212 bp, Brucella melitensis 16M
  CDS (1)..(1212): transl_table=11
ttggcgttaacggcatatttaccctacgcagtaaccataggaacaagttttttgcgttcacaggtaatcgagtatcccatgtccctagtacgtcttgcgcatgagttgcccatcgaggccccgcgtaccgcctggctcgactccatcatcaaaggtgattgcgtttccgcgctggagcgcctgtcggatcattccgtagacgtcatctttgccgatccgccctataatctccagcttggcggcgatctgcaccgtccggatcagtccatggtcagcgccgtggacgatcattgggaccagtttgaaagcttccaggcctatgacgccttcacccgcgcctggctgctcgcctgccgccgtgtgctgaagccgaatggcaccatctgggtcatcggttcctatcacaatattttccgcgtcggcacgcagttgcaggatctgggcttctggctcctcaacgacattgtctggcgcaagaccaatcccatgccgaatttccgtggccgccgtttccagaatgcgcatgaaacgctgatctgggcttcgcgtgaccagaagggcaagggatatactttcaattacgaggccatgaaagcggccaatgacgatgtgcagatgcgttcggactggctgttcccgatctgcaccggcagtgaacgcctgaaggacgagaacggcgacaaggtccacccgacccagaagccggaagcacttctcgcgcgcatcatgatggcttcaagcaagccgggcgacgttattctcgacccattcttcggttccggcacgaccggcgcggtcgccaagcggcttggccgccatttcgtcggcatcgagcgtgaacagccctatatcgacgccgcaaccgcccgcatcaatgccgtggagccgcttggcaaggcggaactcacggtgatgaccggcaagcgcgcagagccgcgcgtggccttcacgagcgtaatggaagcgggccttttgcgtccgggaaccgtgctttgtgatgaacgccgccgttttgccgccattgttcgcgccgatgggacgctgacggccaacggcgaagccggttcaatccatcgtattggcgccagggttcaagggttcgatgcctgcaatggctggaccttctggcactttgaggaaaacggcgtactgaagcctatcgatgccctgcgcaagatcatccgcgaacagatggctgcggcaggtgcataa

SEQ ID NO: 42519 - protein, 403 aa, Brucella melitensis 16M
MALTAYLPYAVTIGTSFLRSQVIEYPMSLVRLAHELPIEAPRTAWLDSIIKGDCVSALERLSDHSVDVIFADPPYNLQLGGDLHRPDQSMVSAVDDHWDQFESFQAYDAFTRAWLLACRRVLKPNGTIWVIGSYHNIFRVGTQLQDLGFWLLNDIVWRKTNPMPNFRGRRFQNAHETLIWASRDQKGKGYTFNYEAMKAANDDVQMRSDWLFPICTGSERLKDENGDKVHPTQKPEALLARIMMASSKPGDVILDPFFGSGTTGAVAKRLGRHFVGIEREQPYIDAATARINAVEPLGKAELTVMTGKRAEPRVAFTSVMEAGLLRPGTVLCDERRRFAAIVRADGTLTANGEAGSIHRIGARVQGFDACNGWTFWHFEENGVLKPIDALRKIIREQMAAAGA

SEQ ID NO: 42520 - DNA, 1134 bp, Brucella suis 1330
  CDS (1)..(1134): transl_table=11
atgtccctagtacgtcttgcgcatgagttgcccatcgaggccccgcgtaccgcctggctcgactccatcatcaaaggtgattgcgtttccgcgctggagcgcctgccggatcattccgtggacgtcatctttgccgatccgccctataatctccagcttggcggcgatctgcaccgtccggatcagtccatggtcagcgccgtggacgatcattgggaccagtttgaaagcttccaggcctatgacgccttcacccgcgcctggctgctcgcctgccgccgtgtgctgaagccgaatggcaccatctgggtcatcggttcctatcacaatattttccgcgtcggcacgcagttgcaggatctgggcttctggctcctcaacgacattgtctggcgcaagaccaatcccatgccgaatttccgtggccgccgtttccagaatgcgcatgaaacgctgatctgggcttcgcgtgaccagaagggcaagggatatactttcaattacgaggccatgaaagcggccaatgacgatgtgcagatgcgttcggactggctgttcccgatctgcaccggcagtgaacgcctgaaggacgagaacggcgacaaggtccacccgacccagaagccggaagcacttctcgcgcgcatcatgatggcttcaagcaagccgggcgacgttattctcgacccattcttcggttccggcacgaccggcgcggtcgccaagcggcttggccgccatttcgtcggcatcgagcgtgaacagccctatatcgacgccgcaaccgcccgcatcaatgccgtggagccgcttggcaaggcggaactcacggtgatgaccggcaagcgcgcagagccgcgcgtggccttcacgagcgtaatggaagcgggccttttgcgtccgggaaccgtgctttgtgatgaacgccgccgttttgccgccattgttcgcgccgatgggacgctgacggccaacggcgaagccggttcaatccatcgtattggcgccagggttcaagggttcgatgcctgcaatggctggaccttctggcactttgaggaaaacggcgtactgaagcctatcgatgccctgcgcaagatcatccgcgaacagatggctgcggcaggtgcataa

SEQ ID NO: 42521 - protein, 377 aa, Brucella suis 1330
MSLVRLAHELPIEAPRTAWLDSIIKGDCVSALERLPDHSVDVIFADPPYNLQLGGDLHRPDQSMVSAVDDHWDQFESFQAYDAFTRAWLLACRRVLKPNGTIWVIGSYHNIFRVGTQLQDLGFWLLNDIVWRKTNPMPNFRGRRFQNAHETLIWASRDQKGKGYTFNYEAMKAANDDVQMRSDWLFPICTGSERLKDENGDKVHPTQKPEALLARIMMASSKPGDVILDPFFGSGTTGAVAKRLGRHFVGIEREQPYIDAATARINAVEPLGKAELTVMTGKRAEPRVAFTSVMEAGLLRPGTVLCDERRRFAAIVRADGTLTANGEAGSIHRIGARVQGFDACNGWTFWHFEENGVLKPIDALRKIIREQMAAAGA

SEQ ID NO: 42522 - DNA, 1827 bp, Rhodopirellula baltica SH 1
  CDS (1)..(1827): transl_table=11
atggatccgaatgttttgaagactcacccagcgttcggacaaattcacgtttcagattgcatcgatggcatggctgaattgcccgccggctgcatcgatcttgcgttcgccgacccgccgttcaacatcggctacacctacgacgtctacgacgactcgttggaatccgatgaatacatccagtggtccgagagctggattcgcggcgtgcaccgcgtgctggccgatgacggagctttctggttggcaatcggcgacgagtacgccgctgaactaaaggtgctcgcacagcagatcggctttcagtgccgaagctgggtcatctggtactacacctttggcgtgcactgcaaatacaagttcacgcgatctcacgctcacctgtttcatttcgtcaaagacgaaaaacacttcaagttcaacgcagacgatccatccgtgcgggtgccttcggctcggcagttggtctacaacgaccgccgcgccaacagcaaaggccggatgcctgatgacacttggatcctgcgtcctcaggatctgccctacggcttcacggccgacgaagacatctggtacttcccccgagtcgcaggcacgttcaaagagcgtgctggattccacggctgccaaatgcccgaacaattgctcggccgcatcattcgggcctgcagtgatcccggtgacaaagtgctggatcccttcagcggaagtgccaccacggtcgccgttgccaaaaagctcggtcgcgaattcatcagctttgagatgagcgaagaatacgtttccctcggaaccgaacgtctcgaacaaattcgcgttggcgacccgctcactggtgccgcagacccgcttcgcagtgcccccgccaccaacggaaagaagaacgaatccaaggcggaaaagctggctcgcgaggaggaagaacgacaacgctgggcaacccaacaggtcggacctcagttggaattccagtttgaaaccatgcgtgccatgacggatggcgaactgatcaacgcctttcgcgaaattcatgatggccactccgtcgatcgggtgctgctcgatccggtcctcagtgatcgtctggaatccgcctgtcgccgaatctccgaacgcgagcccgcttcgtcccgacgccagcgactgatcgaacttcgcgcgtctggtgcgttgaccgcggaaggcattcacaccgagcgtcccacgacgatcccaacgaccacactggaacggttcagctatgccgctgaattggcgtgggcgatcctggtgcaacgttatcccgaacacagcttggacgatattttcaccgatccgaagttgctggaagagttcgatcgcgaagcgttgctgcatgcggcggatgccgatcctttgactcttcgttggtgtgcgacccagctacgatcgtgggcgaccactgcccgagagcaccaacccggcgcggacgaacccgagccatcgaccccaaagttctcagccgcaaaaaactggacgaccacatctgggccgacttcgaaaagcggctccgccaaaggtggcttgtaccaggtgctcgcccaagacggttccgtgttgttcgtgggcgaaacttccgacttcaccgttcgttttggcgaccacctcgccagcgaatcggcagcacgcttttggcgaaacgaggccggcggccaacccaaaatccgcactgcgtcgatccaggacgcaaccggccccgaacgacgcctcgcgatgtgccaatggctgcaagagaacccagctgcatcacggaacctcgtttccctatggagcaccgacattccactgggcgcaagcaccccttcttaa

SEQ ID NO: 42523 - protein, 608 aa, Rhodopirellula baltica SH 1
MDPNVLKTHPAFGQIHVSDCIDGMAELPAGCIDLAFADPPFNIGYTYDVYDDSLESDEYIQWSESWIRGVHRVLADDGAFWLAIGDEYAAELKVLAQQIGFQCRSWVIWYYTFGVHCKYKFTRSHAHLFHFVKDEKHFKFNADDPSVRVPSARQLVYNDRRANSKGRMPDDTWILRPQDLPYGFTADEDIWYFPRVAGTFKERAGFHGCQMPEQLLGRIIRACSDPGDKVLDPFSGSATTVAVAKKLGREFISFEMSEEYVSLGTERLEQIRVGDPLTGAADPLRSAPATNGKKNESKAEKLAREEEERQRWATQQVGPQLEFQFETMRAMTDGELINAFREIHDGHSVDRVLLDPVLSDRLESACRRISEREPASSRRQRLIELRASGALTAEGIHTERPTTIPTTTLERFSYAAELAWAILVQRYPEHSLDDIFTDPKLLEEFDREALLHAADADPLTLRWCATQLRSWATTAREHQPGADEPEPSTPKFSAAKNWTTTSGPTSKSGSAKGGLYQVLAQDGSVLFVGETSDFTVRFGDHLASESAARFWRNEAGGQPKIRTASIQDATGPERRLAMCQWLQENPAASRNLVSLWSTDIPLGASTPS

SEQ ID NO: 42524 - DNA, 1137 bp, Bartonella quintana str. Toulouse
  CDS (1)..(1137): transl_table=11
atgtcagttattcagcttcaaaaagatttcattcggacttcttctcagacgtcgtggcgtaataaaattttaaaaggagattgtgttgcagtgctggaaaaactgcccaaacattctgttgatgtgatttttgcagatcctccttataatttacaattggatggtgctttataccgtccggatcattcgcttgttgatgccgttgatgatgcctgggatcaatttgagagttttgctgcctatgatgcctttacacgtgcatggctgctcgcgtgtcgtcgtgtattaaaaccccatgggacgctttgggttattggatcttaccataatatttttcgggttggtacggcattacaagacttaggtttttggatgcttaatgatatcatttggcgcaaaaataatcccatgcctaattttcgcgggcgtcgctttcaaaatgctcatgagacacttatttgggctgtccgagatcaaaaggataaaaaatacacatttaattatgatgccttaaaagccgggaatgaagatgtacaaatgcgttcagattggctttttcctctctgtacgggtgctgaacgtttaaaagatgaggcagggcgtaaattacatccaacgcaaaaaccacaaactttattaacacgtattattatggcttctagtaagccgggtgatattattcttgatccgttttttggttcgggaacgacaggcgctgttgccaaacttttggggcgtgattttgtgggtattgaacgcgagcagcaatacattgatgctgcatatgaaaggatcgctgcagttgaacctttaaataaaccagaattagcgattttggatagaaaaaaagcagaaccgcgtgtagcattcaacagcctgcttgaagcaggtttactctgtcctggagaagttctttatgatcggaagaagcgcgtatctgctattgtaagagctgatggcactctcatgtatagtggtgaagctggttctattcatgcaatggggcgaaaggctcaagattcgcaaagctgtaatggttggacattttggtattacgaggaaaacggacggttgaaatcaatagatggtttaagaatgataatacgttcacgaatgttaaaaactggtatttcgtga

SEQ ID NO: 42525 - protein, 378 aa, Bartonella quintana str. Toulouse
MSVIQLQKDFIRTSSQTSWRNKILKGDCVAVLEKLPKHSVDVIFADPPYNLQLDGALYRPDHSLVDAVDDAWDQFESFAAYDAFTRAWLLACRRVLKPHGTLWVIGSYHNIFRVGTALQDLGFWMLNDIIWRKNNPMPNFRGRRFQNAHETLIWAVRDQKDKKYTFNYDALKAGNEDVQMRSDWLFPLCTGAERLKDEAGRKLHPTQKPQTLLTRIIMASSKPGDIILDPFFGSGTTGAVAKLLGRDFVGIEREQQYIDAAYERIAAVEPLNKPELAILDRKKAEPRVAFNSLLEAGLLCPGEVLYDRKKRVSAIVRADGTLMYSGEAGSIHAMGRKAQDSQSCNGWTFWYYEENGRLKSIDGLRMIIRSRMLKTGIS

SEQ ID NO: 42526 - DNA, 1137 bp, Bartonella henselae str. Houston-1
  CDS (1)..(1137): transl_table=11
atgtcagttattcagcttcaaaaagattttgttcagacttctgcacagatgtcatggcgtaataaaattttaaaaggagattgtgttgcagtattggaaaaactgcccaaacattctgttgatatgatttttgccgatcctccttataacttacaattagagggtgctttataccgtccagatcattcgcttgttgacgcagttgatgatgcgtgggaccagtttgagaattttgctgcttatgatgcatttacgcgtgcatggcttcttgcgtgtcgtcgtgtattaaaacccaatgggacattgtgggttattggatcttaccataatatttttcgggttggtacggccttacaagatttaggtttttggatactgaatgatataatttggcgtaaaaataatcccatgcctaattttcgtgggcgtcgctttcaaaatgctcatgagacgcttatttgggctgttcgagatcaaaaggataaaaaatacacatttaattatgatgccttaaaagctgccaatgaagatatacaaatgcgttcagattggctttttcctctctgtacaggtgctgaacgtttaaaagatgaagcagggcgtaaattacatccgacacaaaaaccacaacctttattagcgcgtattattatagcgtctagtaagcctggtgacattattcttgatccattttttggctcgggaacaacaggtgctgttgctaaacttttggggcgtgattttgtgggtattgaacgtgagcaacaatatattgatgcagcatatgaaaggattgctaagattaaacctttaaacgaaccagaattagcaattttggatagaaaaaaagcagaaccgcgtgttgccttcaatagtttacttgaagcgggtttaatctgtcctggagaagttctttatgatcggaagaagcaagtatctgctattgtaagagctgacggcactctcatgtatggtggtgaagctggttctattcatgcaatggggcgaaaggctcaagatctgcaaagctgtaacggttggacattttggtattacgaagaagacggacaattgaaatcaataaatgagttaagaatggtaatacgttcacagatgttaaaaactggtattttataa

SEQ ID NO: 42527 - protein, 378 aa, Bartonella henselae str. Houston-1
MSVIQLQKDFVQTSAQMSWRNKILKGDCVAVLEKLPKHSVDMIFADPPYNLQLEGALYRPDHSLVDAVDDAWDQFENFAAYDAFTRAWLLACRRVLKPNGTLWVIGSYHNIFRVGTALQDLGFWILNDIIWRKNNPMPNFRGRRFQNAHETLIWAVRDQKDKKYTFNYDALKAANEDIQMRSDWLFPLCTGAERLKDEAGRKLHPTQKPQPLLARIIIASSKPGDIILDPFFGSGTTGAVAKLLGRDFVGIEREQQYIDAAYERIAKIKPLNEPELAILDRKKAEPRVAFNSLLEAGLICPGEVLYDRKKQVSAIVRADGTLMYGGEAGSIHAMGRKAQDLQSCNGWTFWYYEEDGQLKSINELRMVIRSQMLKTGIL

SEQ ID NO: 42528 - DNA, 861 bp, Bacteroides fragilis NCTC 9343
  CDS (1)..(861): transl_table=11
atgaatttactgggaactaatagttataagattatacatggggatgccattgaagcattgaaaaatgaaatagaagataattctgtagatttgatttttgcagatcctccatacaatataggcaagaactttgctggttgtatagataaatgggagactgatgataaatatttatcatggtgttatcaatggttagatttatgtattcgtaaattgaagccatcaggtgctttttatgtaatgacctccactcagtttatgcctttttttgatctttatcttagagaaaagttaacgatcctgtcacgtctgatatggtattatgatagttccggagttcaagcaaaaaattattttggttcgatgtatgaacctatacttttttgtgtgaaagataagaataactatacattcaattctgaagctattttagtagaagctaaaactggtgctaaaagaggtttgatcgattataggaaaaacccacctcagccatatagtactgagaaagtaccaggtaatgtctgggaatttgctagagtacgatatcggatggatgaatatgaaaatcatccaacacagaaacctgttgcattgttagaacgtatcattaaagccagttcaaatgaaggtgacttaatattagatcctttctcaggaacattcactacagcttttgttgcaaaaactttaaacagaagggccataggtatagagctacaagaagattatgtaaaaataggattgagaaggctcgaattagcatctgaatataacggggaagccatccagagagagttaaaaacctatcaaagacaagctatagatggagacaaacaaacaacattaaattttatgtaa

SEQ ID NO: 42529 - protein, 286 aa, Bacteroides fragilis NCTC 9343
MNLLGTNSYKIIHGDAIEALKNEIEDNSVDLIFADPPYNIGKNFAGCIDKWETDDKYLSWCYQWLDLCIRKLKPSGAFYVMTSTQFMPFFDLYLREKLTILSRLIWYYDSSGVQAKNYFGSMYEPILFCVKDKNNYTFNSEAILVEAKTGAKRGLIDYRKNPPQPYSTEKVPGNVWEFARVRYRMDEYENHPTQKPVALLERIIKASSNEGDLILDPFSGTFTTAFVAKTLNRRAIGIELQEDYVKIGLRRLELASEYNGEAIQRELKTYQRQAIDGDKQTTLNFM

SEQ ID NO: 42530 - DNA, 1119 bp, Mesorhizobium sp. BNC1
  CDS (1)..(1119): transl_table=11
atgtccgctgtgcgtccgcttgaggagctttccccgcttcccgccaaggccgattggctggacgatatcctgaaaggcgactgtgtcgccgctcttgagcggcttcccgaaaagtcggtggacgtgatcttcgccgatccgccctacaacctccagctcgaaggggcgctccatcgtcccgaccagtccctggtcgatgcggtcgacgacgagtgggaccagttcgaaagcttcgccgcctatgacgctttcacgcgagcatggcttctggcggcccgccgcgtgcttaagccgaacggaaccgtctgggtcatcggctcctaccacaacatcttccgggttggcgcgatcatgcaggatctgggcttctggatcctgaacgacatcgtctggcgcaagaccaatccgatgccgaatttccgcggccgccgcttccagaacgcccatgagacgatgatctgggcctcgcgcgaccgcaacgcgaagggctacaccttcaattacgaggccatgaaagccgccaatgacgacctgcagatgcggtcggactggctgtttccgatctgcaccggcaaggagcggctcaaagacgctgacggtaacaaggtccatccgacgcagaagccggaagcgctgcttgcgcgcgtgctcctgtcttcaacgaagccaggcgatgtggtcctcgacccattcttcggctcaggcaccaccggggcggttgccaagcgccttggccgccactttgtcggcatcgagcgggacccggattatatcgcagcggcccgagagcgcattgcggcggtggagcctttggatcaagccgcgctcgcgccgatggcggcaaaacgtgaggagccgcgcatcgcctttgcgagcctgctggactctggcctcgtgaagcccggtatgcagctttacgacagcaaaaggcgctgggcggcgcatgtgcgggccgacggcacgctcgcagttggcccggagacgggctcgatccaccggctcggcgcccgcgtccagggcctggacgcctgcaacggctggaccttttggcattatgaggaaaaaggggcgctcaagcccatcgacgaattgcggcaggtggcgcgccgcggcctgtag

SEQ ID NO: 42531 - protein, 372 aa, Mesorhizobium sp. BNC1
MSAVRPLEELSPLPAKADWLDDILKGDCVAALERLPEKSVDVIFADPPYNLQLEGALHRPDQSLVDAVDDEWDQFESFAAYDAFTRAWLLAARRVLKPNGTVWVIGSYHNIFRVGAIMQDLGFWILNDIVWRKTNPMPNFRGRRFQNAHETMIWASRDRNAKGYTFNYEAMKAANDDLQMRSDWLFPICTGKERLKDADGNKVHPTQKPEALLARVLLSSTKPGDVVLDPFFGSGTTGAVAKRLGRHFVGIERDPDYIAAARERIAAVEPLDQAALAPMAAKREEPRIAFASLLDSGLVKPGMQLYDSKRRWAAHVRADGTLAVGPETGSIHRLGARVQGLDACNGWTFWHYEEKGALKPIDELRQVARRGL

SEQ ID NO: 42532 - DNA, 1143 bp, Rhizobium leguminosarum bv. viciae 3841
  CDS (1)..(1143): transl_table=11
atggcatcagtttttccgcttgccgacctcaaggcttccgtcaagtcggattcccggccggcttcttgggtcgacacgatcatcaagggcgactgcgtcagcgcccttgaagccttgcccagccactccgtcgatatcatctttgccgatccgccgtataatctccagctcggcggaacgctgcatcgtcccgaccagtcgctggtcgatgcggtcgacgacgattgggatcagttcgcctccttcgaggcctatgacgccttcacccgtgcctggctgctggcctgccggcgggtgctgaagccgacgggctctatctgggtaatcggctcctatcacaatatcttccgcgtcggcgccacgctgcaggatctgaatttctggatcctcaacgacatcatctggcgcaagaccaacccgatgccgaatttcaagggccgccgtttccagaacgcccatgagacgatgatctgggcaagccccagcgccaaggccaagggctataccttcaattacgatgcgctgaaggccgccaatgacgacgtgcagatgcgctccgactggctgttcccgatctgcaacggcagcgaacggctgaagggcgaggacggcaagaaggcgcatccgacgcagaagccggaagcgctgctcgcccgcgtcatcatggcctcgaccaagcccggcgatatcgtgctcgatcctttcttcggctcgggaacgacgggtgccgtcgccaagcgtctcggccgtcacttcgtcggcatcgagcgcgaacaggattatatcgatgcggcctcggcccgcatcgccgccgtcgagccgctcggcaaggcggaactgaccgtcatgaccggcaagaaggccgaggtccgcgtcgccttcaacgtgcttgttgaaagcggcctgatcaagcccggccaggtgctgaccgacgccaggcgccgctatagcgcgattgtccgcgccgacggcacagtagcttcaggcggcgaggccggctccattcatcgtctcggcgccaaggtgcagggtctcgatgcatgcaacggatggaccttctggcatttcgaagacgggcagtccctgcgcccgatcgacgatctcaggtccgtcatccgcagtgatctggcaaaggcggagtga

SEQ ID NO: 42533 - protein, 380 aa, Rhizobium leguminosarum bv. viciae 3841
MASVFPLADLKASVKSDSRPASWVDTIIKGDCVSALEALPSHSVDIIFADPPYNLQLGGTLHRPDQSLVDAVDDDWDQFASFEAYDAFTRAWLLACRRVLKPTGSIWVIGSYHNIFRVGATLQDLNFWILNDIIWRKTNPMPNFKGRRFQNAHETMIWASPSAKAKGYTFNYDALKAANDDVQMRSDWLFPICNGSERLKGEDGKKAHPTQKPEALLARVIMASTKPGDIVLDPFFGSGTTGAVAKRLGRHFVGIEREQDYIDAASARIAAVEPLGKAELTVMTGKKAEVRVAFNVLVESGLIKPGQVLTDARRRYSAIVRADGTVASGGEAGSIHRLGAKVQGLDACNGWTFWHFEDGQSLRPIDDLRSVIRSDLAKAE

SEQ ID NO: 42534 - DNA, 780 bp, Moraxella cuniculi
  CDS (1)..(780): transl_table=11
atggatattaataaaatttatcacatgaattgctttgattttttagaaaaaatacaaaataaaagcattcaattggccgtcattgacccaccttataatcttaataaggcagattgggatagctttgatgatcacaatgaatttctggcatttacctaccgttggattgataaagttttagataaattagataaaaatggttccatctatatatttaatacaccatttaattgtgcatttatttgccaatatttagtgagcaaaggtatgattttccaaaattggattacatgggacaagcgagatggtatgggtagtgctaaaaggcgtttttccacaggacaagaaacaattttatttttttcaaaatccaaaaatcatactttcaattatgatgaagtacgagtaccatatgaaagcactgatagaataaagcatgctagtgaaaaaggtattttaaaaaatggtcaacgctggttccccaatccaaatggaagattatgcggagaagtttggcatttttcgagccaacgccataaagaaaaagttaatggaaaaaccgtcaaattatctcatattaccccaaaaccacacgacttaatagaacgcattattaaagcaagttccaatcctaatgatttggtactggattgctttatgggaagtggcacaacagcaatagttgccaaaaaattggggcgtaattttattgggtgtgatataaatactgaatatgtggagcaagccaacttaatattaaatcaactggaaataaattaa

SEQ ID NO: 42535 - protein, 259 aa, Moraxella cuniculi
MDINKIYHMNCFDFLEKIQNKSIQLAVIDPPYNLNKADWDSFDDHNEFLAFTYRWIDKVLDKLDKNGSIYIFNTPFNCAFICQYLVSKGMIFQNWITWDKRDGMGSAKRRFSTGQETILFFSKSKNHTFNYDEVRVPYESTDRIKHASEKGILKNGQRWFPNPNGRLCGEVWHFSSQRHKEKVNGKTVKLSHITPKPHDLIERIIKASSNPNDLVLDCFMGSGTTAIVAKKLGRNFIGCDINTEYVEQANLILNQLEIN

SEQ ID NO: 42536 - DNA, 915 bp, Escherichia coli
  CDS (1)..(915): transl_table=11
atgttaaacaagatccaattacctgatgaaataaaaaagaataccgttaccaatggtaactcgatatcattaataaaaaaactcccatcacaatatgcacatttaatactcagtgatatcccttatgggataggagcagaagactgggatgtgctacataataactcaaataacgcatacctaggttcaagccctgcgcagaaaaacgcaggtgctatttttaaaaaaagaggaaaaccaataaatggatggtcagaggctgataagaaaataccattagaatatcagcaatggtgtgaagaatgggctactgaatggttcagagtattaaaaccaggtgccagtgcaattatttttgcaggcagaagattttctcatcgatgcatatgtgcaatggaagatgctggattcaatcttcgcgatataattgcatggatgagagtaaaagcccctcacagagcccaaaggttgagttgcgtttacgaaaggcgcggggatacattaaacgcagaaaaatggaatggatggcgagttggaaatctacaaccaacctttgaacccatactatggttctctaaaccatataaaattggcggcacaattgcagataatgcaattattcatggtgtcggtgcttataatcaagatgcatttgtagcaagaaatggcaaacctgaaaatgtcattacagctggattttccagcaatgaaagtggattacacccaacacaaaaacctgtagccttaatgaaaacacttatagaattaacaacacaaaaaggtcaattagtcattgacccttttagtggcagtggttctacattggtagcagcgaaagatttaggtagggattatattggtttcgaaataaaccctacatatgtagagaccagtataaagagattaaacaaataa

SEQ ID NO: 42537 - protein, 304 aa, Escherichia coli
MLNKIQLPDEIKKNTVTNGNSISLIKKLPSQYAHLILSDIPYGIGAEDWDVLHNNSNNAYLGSSPAQKNAGAIFKKRGKPINGWSEADKKIPLEYQQWCEEWATEWFRVLKPGASAIIFAGRRFSHRCICAMEDAGFNLRDIIAWMRVKAPHRAQRLSCVYERRGDTLNAEKWNGWRVGNLQPTFEPILWFSKPYKIGGTIADNAIIHGVGAYNQDAFVARNGKPENVITAGFSSNESGLHPTQKPVALMKTLIELTTQKGQLVIDPFSGSGSTLVAAKDLGRDYIGFEINPTYVETSIKRLNK

SEQ ID NO: 42538 - DNA, 828 bp, Bacillus stearothermophilus
  CDS (1)..(828): transl_table=11
atgctttcagaatggattaataccatccaaaatacagaatgtatacaatcaatgaaaaaattaccggataactcaattgacttagtaattgctgatcccccatataatttgtcaaaaggaggtaaatggaaatgggataatagtaaaaagttggttggtatgggtggtaattggaataaagtaatggaaaattgggatgatatgacattcgaagagtattgggaattcacggagtcttggctattggaggtaaagcgtattttaaaaccaacgggttctctatggatatttggtacttatcataatatgggaataataaatgtcgtttgtcagaagcttggaatagaaattataaatgagattatatggtataagagaaatgcatttccaaatttatcgggtcgtagattcactgctagtcatgaaacaattctttggtgtcatgttggccagaaaaaaagggaatattattttaactatgagtatgtgaaaaatgcttctttccctgaggatatgctaaaatcccctggaaaacaaatgagaactgtttgggatatccctaataacaaacaaaaagacgagttaaagtttggaaaacatccaactcaaaaacctcttagattacttcatagaataatattagcaacaagtaaagagggcgatatttgtctggcaccgtttagtggagttggtagtgaatgcgttgcggctaaggaactagggcggaattttataggttttgaaattaacaaggaatattacgatatttctcttaaacgtatagaatctactcagaaaaaaattgagcaaatttgtatgaatttataa

SEQ ID NO: 42539 - protein, 275 aa, Bacillus stearothermophilus
MLSEWINTIQNTECIQSMKKLPDNSIDLVIADPPYNLSKGGKWKWDNSKKLVGMGGNWNKVMENWDDMTFEEYWEFTESWLLEVKRILKPTGSLWIFGTYHNMGIINVVCQKLGIEIINEIIWYKRNAFPNLSGRRFTASHETILWCHVGQKKREYYFNYEYVKNASFPEDMLKSPGKQMRTVWDIPNNKQKDELKFGKHPTQKPLRLLHRIILATSKEGDICLAPFSGVGSECVAAKELGRNFIGFEINKEYYDISLKRIESTQKKIEQICMNL

SEQ ID NO: 42540 - DNA, 2019 bp, Streptococcus pneumoniae
  CDS (798)..(1988): transl_table=11
ctaataagttgaataacatatttggaaaaatgagaaatagcaatattactagaacttttagaaacaatcaatatttaaaaagaaaaaagctcaaagaatttattaaaccatgttataatagatatagctataattttatttataacaagaggatagaaatgaccgaattagaaagaaaaaatcgaaaaattagctaagaaatattctgataacttaaacatcaaagttcaagagagagttcgtgaaatggcaaatgataataagagccattatttgatatacagagttttaggtatttcatttgaagaaggagaaaatatcgatttgtatcaaaataaaggtcgttttttatacaaatatgctggttcatttttagaagaagctgcagtactatcctttaacgaaaaatttggtacagaaaatacttaaaaagttaacattcctaattctgaaagtacaaaacctaagacttttgaaattgattgtttagtcggagaaaaacacgcatacgaaataaaatggtgggatgcaactacagatggagaccatataactaaagaacacactagaataaaagttattcataacaaaggatatataccaattcggttaatgttctactatccaaatagaactcaagctataaaaattcagcaaactttagaaacattgtataacggtattggagggaaatattatggagattctgcctgggaacatttaagagcagtgaccggtattgatttacttagtattctaacagatattgcaaataaaaaaacaggggtaaaatcaaaatgacagtattaaaaggagataacttagaaatattaaaaactattgaatcctcaagtattgatttaatctatatggaccctcctttctttacacagaaaacccaaaaattatctaataacaaaaatattatgtattcattcgaagatacgtggacttcgattgaggattacaaagaatttttgtctgtaagattagaagaatgcaaaagagtgctaaaaaatagtggcagtattttcgttcattgtgataaaattgcaaatcatcatattagattaattttagataatatctttggagcagatatgtttcaaagcgaaattatatggaactataagcggtggtctaattcaaaaaagggattattgaacaatcatcaaaacatttacttttattcaaagtcaaaagattttaaatttaatacaatttttacagagtattcttctactacaaatatcgaccaaatactagtggaacgaaaacgagatggaaactctaaaactatatataaagttgataataatggtaactatattctagcaaaagagaaaaatggagttcccctttcagatgtttggaatataccatttcttaatccaaaagctaaagaaagagtaggttatcctacacaaaaacctattctgttattagaacaaattataaagattgctactgataaaaatgatatagttttagacccgttctgtggaagtggaactactttagtagcctccaagattttgaatagaaattatatggggattgatttatctgaggaagctatcaatataactcagcaacgtctggaaaatgttataaaaacaagttcaaatttattgaataaaggaatcgaagcatatagaaccaaaactgaggaagaggaaaacattcttaaattattacaggcaaaaattgttcaaagaaataaaggaattgatggttttttacctaaacattttcaaaaaaaaccgatacctataaaaattcaaaaaaataatgaatgtctgaatgagagtatctctttattacagaatgctataaactccaaaaaacttgattttggagtagttataaaaactcattcagataatttattatttgattttgatacgattcctgaaaatataatagtagttgaccattttgaacttacaatcgaaaaatggttaagtaaaagtcaacagttactatagtttgcaaattatttacagaaagaacaaaaaa

SEQ ID NO: 42541 - protein, 396 aa, Streptococcus pneumoniae
MTVLKGDNLEILKTIESSSIDLIYMDPPFFTQKTQKLSNNKNIMYSFEDTWTSIEDYKEFLSVRLEECKRVLKNSGSIFVHCDKIANHHIRLILDNIFGADMFQSEIIWNYKRWSNSKKGLLNNHQNIYFYSKSKDFKFNTIFTEYSSTTNIDQILVERKRDGNSKTIYKVDNNGNYILAKEKNGVPLSDVWNIPFLNPKAKERVGYPTQKPILLLEQIIKIATDKNDIVLDPFCGSGTTLVASKILNRNYMGIDLSEEAINITQQRLENVIKTSSNLLNKGIEAYRTKTEEEENILKLLQAKIVQRNKGIDGFLPKHFQKKPIPIKIQKNNECLNESISLLQNAINSKKLDFGVVIKTHSDNLLFDFDTIPENIIVVDHFELTIEKWLSKSQQLL

SEQ ID NO: 42542 - DNA, 1500 bp, Agrobacterium tumefaciens
  CDS (170)..(1315): transl_table=11
gtgcacaacgtttttgccgcacttcaggttccccgcctgccgccgtaaatccggccggcgcgctgcaacagccatttatttcgcattttccgtgacttgttcaggctttgataaccatcttcggtaaccataagcgtcagtagagagtaagcgtatggagcgagtaccaatggcagcagtttttccgctggccgattttcggcgtgccggttttgatcgtgcgggcgagagtgacgcctggaaagacagcatcatcaaaggtgattgtgtcgctgccttggatgccctcccgagccagtcggtggatgcgattttcgccgatccgccctataatctccagcttggcggcacgctgcaccggcccgatcagtcgctggtcgatgccgttgatgacgaatgggaccagttcgcctccttcgacgcctatgacgccttcacccgcgcctggctgctcgcctgccgccgtgtgctgaaaccgaacggcaccatctgggtcatcggctcctatcacaatatcttccgcgtcggcgccatgctccagaacctcgatttctggatcctcaacgatatcgtctggcgcaagaccaaccccatgcccaatttcaagggccgccgtttccagaacgcccatgagacgatgatctgggcaagtcgcgatccgaaagccaagagctataccttcaattacgacgcgctgaaggcctccaacgacgatgtccagatgcgctcggactggctgttcccgatttgcagcggccatgagcggctgaaaggcgacgacggcaagaaggtgcatcccacacagaagccggaagccctgctggcgcgcatcatcatggcatcgaccaagccgggcgatatcgtgcttgacccgttcttcggttccggcaccacgggtgccgttgcaaaacgccttggccgccatttcgtcggcatcgagcgcgaacaggattatatcgatgcggcatccgcccgcatcaccgccgtcgagccgctcggcaaggcggaactgaccgtcatgaccggcaagaaggccgagccgcgcgtggcctttaacacgctggtggaaagcggcttcgtccgccccggccaggtgctgacggatgcacgacgtcgctatagcgccattattcgtgccgatggtacgctcgcatccggcgggaccgccggctccattcaccgcctcggcgcgaaggtgcagggtctcgatgcatgcaatggatggacgttctggcatttcgaggacggcgacgcgctgaagccgatcgatgatctcagaaccatcatccgcagtgaaatggcaaaggctgaatagtcgagagccgtagaggctggagacggacgatccaccgcccgcccttgtcagaatacgtctctgtccggtttagtaccttcagtcccggatagagaaacgaccaacgcccggcaccctggtgtcgggcgttggtattttcgaatataaaactttagctagacaagtttcgcgcaagagacgcgcag

SEQ ID NO: 42543 - protein, 381 aa, Agrobacterium tumefaciens
MAAVFPLADFRRAGFDRAGESDAWKDSIIKGDCVAALDALPSQSVDAIFADPPYNLQLGGTLHRPDQSLVDAVDDEWDQFASFDAYDAFTRAWLLACRRVLKPNGTIWVIGSYHNIFRVGAMLQNLDFWILNDIVWRKTNPMPNFKGRRFQNAHETMIWASRDPKAKSYTFNYDALKASNDDVQMRSDWLFPICSGHERLKGDDGKKVHPTQKPEALLARIIMASTKPGDIVLDPFFGSGTTGAVAKRLGRHFVGIEREQDYIDAASARITAVEPLGKAELTVMTGKKAEPRVAFNTLVESGFVRPGQVLTDARRRYSAIIRADGTLASGGTAGSIHRLGAKVQGLDACNGWTFWHFEDGDALKPIDDLRTIIRSEMAKAE

SEQ ID NO: 42544 - DNA, 1077 bp, Caulobacter crescentus
  CDS (1)..(1077): transl_table=11
atgaagttcgggccggaaaccatcatccacggcgactgcatcgagcagatgaacgccctgcccgagaagtcggtcgacctgatcttcgccgatccgccctataatctgcagctgggcggggacctcctgcgtcccgacaattccaaggtcgacgcggtcgacgaccactgggaccagttcgaaagcttcgccgcctacgacaagttcacccgcgagtggctgaaggccgcccgtcgcgttctgaaggacgacggcgcgatctgggtgatcggcagctatcacaacatcttccgcgtcggcgtggcggtgcaggacctgggcttctggatcctcaacgacatcgtctggcgcaagtccaacccgatgcccaacttcaagggcacccgcttcgccaacgcccacgagaccctgatctgggcctccaagagccagaacgccaagcgctacaccttcaactacgacgccctgaagatggccaatgacgaggtgcagatgcgctcggactggaccatcccgctgtgcaccggcgaggagcgcatcaagggcgccgacggccagaaagcccacccgacccagaagcccgaggccctgctctaccgcgtcatcctgtcgacgacgaagccgggcgacgtgatcctggatccgttcttcggcgtcggcaccaccggcgcggccgccaagcgcctaggccgtaagttcatcggcatcgagcgcgaggccgaatacctcgagcacgccaaggcccgcatcgccaaggtcgtgccgatcgcgcccgaagacctggacgtcatgggctccaagcgcgccgagccgcgcgtgccgttcggcaccatcgtcgaggccggcctactgtcgccgggcgacacgctttactgcagcaagggcacgcacgtggccaaggtccgtccggacggctcgatcacggtcggcgacctctcgggctcgatccacaagatcggggctctcgttcagagcgcgccggcctgcaacggctggacctactggcacttcaagaccgacgcgggtctggcgccgattgatgtgctgcgagcgcaggtgcgggcggggatgaactga

SEQ ID NO: 42545 - protein, 358 aa, Caulobacter crescentus
MKFGPETIIHGDCIEQMNALPEKSVDLIFADPPYNLQLGGDLLRPDNSKVDAVDDHWDQFESFAAYDKFTREWLKAARRVLKDDGAIWVIGSYHNIFRVGVAVQDLGFWILNDIVWRKSNPMPNFKGTRFANAHETLIWASKSQNAKRYTFNYDALKMANDEVQMRSDWTIPLCTGEERIKGADGQKAHPTQKPEALLYRVILSTTKPGDVILDPFFGVGTTGAAAKRLGRKFIGIEREAEYLEHAKARIAKVVPIAPEDLDVMGSKRAEPRVPFGTIVEAGLLSPGDTLYCSKGTHVAKVRPDGSITVGDLSGSIHKIGALVQSAPACNGWTYWHFKTDAGLAPIDVLRAQVRAGMN

SEQ ID NO: 42546 - DNA, 1080 bp, Haemophilus influenzae
  CDS (1)..(1080): transl_table=11
atgatgaaagaaaatattaatgattttctcaataccattttaaaaggtgattgtattgagaaattaaaaacaattccgaatgaaagtattgatttaatctttgcggatccaccttattttatgcagacagaaggcaaattattacgaactaacggagatgaattttcaggtgttgatgatgagtgggataaattcaatgattttgtagaatatgactccttttgtgaattatggttaaaagaatgcaaaagaatccttaaatcaaccgggtctatttgggttatcggttcgtttcagaatatttatagaatcggctatattatgcaaaatttggatttttggattttaaatgatgtgatttggaataaaacgaatccagtaccaaactttggcggtacaaggttttgtaatgctcacgagactatgctatggtgttcgaaatgtaaaaaaaataaatttacttttaattataaaacaatgaagcatttaaaccaagaaaagcaagaacggagtgtttggtcgttatcattgtgtacaggtaaagagagaattaaagacgaagaaggcaaaaaagcccattctactcaaaagccagagtcgttgctttacaaggtaattttatcatcttcaaagccaaatgatgtagtgttagacccattttttgggactggtacaactggggcggtggcgaaagcattgggacggaattatataggaatcgagcgagaacaaaaatacattgatgtagccgaaaaaagactccgagaaatcaagccaaaccctaatgatattgaattactttctttggaaataaagcccccaaaagtgccaatgaaaacgcttattgaagccgattttttgagagtggggcaaactttgtttgataaaaatgaaaatgcaatttgtattgttacacaagacggcaatgtaaaagacaatgaagaaaccttatcaatacataaaatgagtgccaaatacctaaataaaacgaataataatggctgggattatttttatttatttagaaataataattttattacccttgatagtttaagatatgaatacactaaccaataa

SEQ ID NO: 42547 - protein, 359 aa, Haemophilus influenzae
MMKENINDFLNTILKGDCIEKLKTIPNESIDLIFADPPYFMQTEGKLLRTNGDEFSGVDDEWDKFNDFVEYDSFCELWLKECKRILKSTGSIWVIGSFQNIYRIGYIMQNLDFWILNDVIWNKTNPVPNFGGTRFCNAHETMLWCSKCKKNKFTFNYKTMKHLNQEKQERSVWSLSLCTGKERIKDEEGKKAHSTQKPESLLYKVILSSSKPNDVVLDPFFGTGTTGAVAKALGRNYIGIEREQKYIDVAEKRLREIKPNPNDIELLSLEIKPPKVPMKTLIEADFLRVGQTLFDKNENAICIVTQDGNVKDNEETLSIHKMSAKYLNKTNNNGWDYFYLFRNNNFITLDSLRYEYTNQ

SEQ ID NO: 42548 - DNA, 945 bp, Haemophilus parainfluenzae
  CDS (1)..(945): transl_table=11
atggatcaaagattaatttgcagcaatgctataaaagcattaaaaaatttagaagaaaattctatagatttaattataacagatcctccatataatttggggaaagactatgggactactgacgataatttaaattttaataaatacttagaatttagtcatgaatggctagaagaatgttatagagttctaaaaccacatggaacaatatatatatttatgggaatgaaatatatatcttatatatataaaatattagagcaagatttaggtatgtacttcaatagttggatcacttggtattacacgcaaggaatcggaaaaactagaggatattctcctaggcatgatgatattctaatgtttacaaaacatcctaaaaaatttactttcaatttggatcgtattagagttcctcaaaagtattatagaagtgtaaataatatgagaggtgcaaatcctagtaatgtttgggaattttctcacgtccattattgcaataaaaatcgaaagcctcatccaactcaaaaaccagaggctttatatgaaagaatgatactcgcttcatcaaatgaaggagacattgtattggaccctttcgttggttctggaacactaaattttgtttgtaaacatctcaaccgttcgggaatcggtattgatataaataaagaatatattgaaatggccaaagaacggctagattctgaatttaatggttttgatagtatagacgaaagaatgaagcgatgtcctaatgacttaagtgatccagtaataagaaaacaatatattataaatcatattaattggtttctaaaaaatcatgaaaacgctagagaagaatttttaaatgaagtaaagacgaaatattataaaaaaatgactcaagaagaaaaaaggctacttgataaagaaaataacttatcttttgatttttcttaa

SEQ ID NO: 42549 - protein, 314 aa, Haemophilus parainfluenzae
MDQRLICSNAIKALKNLEENSIDLIITDPPYNLGKDYGTTDDNLNFNKYLEFSHEWLEECYRVLKPHGTIYIFMGMKYISYIYKILEQDLGMYFNSWITWYYTQGIGKTRGYSPRHDDILMFTKHPKKFTFNLDRIRVPQKYYRSVNNMRGANPSNVWEFSHVHYCNKNRKPHPTQKPEALYERMILASSNEGDIVLDPFVGSGTLNFVCKHLNRSGIGIDINKEYIEMAKERLDSEFNGFDSIDERMKRCPNDLSDPVIRKQYIINHINWFLKNHENAREEFLNEVKTKYYKKMTQEEKRLLDKENNLSFDFS

SEQ ID NO: 42550 - DNA, 1131 bp, Rhizobium meliloti
  CDS (1)..(1131): transl_table=11
atgtcatcagttgtttcgcttgccgaaatctcccgtgccgcccgtccgctgaactggctggacagcatcatcaagggagattgcgtggccgcgctgaacgcgcttcccgatcattcggtcgatgtcgtcttcgccgacccgccctataatcttcagctcggcggcacgttgcaccggcccgatcagtcgctggtcgatgcagtggacgacgattgggaccagtttgcttccttcgaagcctatgacgctttcacccgcgcctggctgcttgcctgccggcgtgtcctgaagcccaccggcacgctctgggtcatcggttcctaccacaatatcttccgggtcggcgcgatcctccaggacctgcacttctgggtcttgaacgatatcatctggcgcaagaccaacccgatgccgaacttcaagggccgccgcttccagaacgcgcatgaaacgctgatctgggcgacgccgaacgccaaggccaagggttataccttcaactacgaagcgatgaaggcggcgaacgacgacgttcagatgcgctccgactggctgttccccatctgctccggttccgagcggctgaagggcgacgacggcaagaaagtacacccgacgcaaaagccggaagcgctgcttgcccgcatcctgatggcctcgaccaagcccggggacgtcgtgcttgatccgttcttcggctccggcaccaccggggcggtcgccaagcgcctcggccggcacttcgtcgggatcgagcgcgagcaggactatatcgatgccgccgccgaacgtatcgcggccgtggagccgctcggcaaggccacgctctcggtcatgaccggcaagaaggcggagccgcgcgtcgccttcaacactctggtggaaagcgggctcatcaagcccggcacggttctgacggatgcgaagcgccgctacagcgcgatcgtccgcgccgacggcacgctggcgtccggcggcgaggctggatccattcaccgcctcggcgcaaaagtgcagggcctcgacgcctgcaacggctggaccttctggcacttcgaggagggaagcgtattgaaaccgatcgacgagctcagatccgtcattcgaaacgacctggcaaaactgaactga

SEQ ID NO: 42551 - protein, 376 aa, Rhizobium meliloti
MSSVVSLAEISRAARPLNWLDSIIKGDCVAALNALPDHSVDVVFADPPYNLQLGGTLHRPDQSLVDAVDDDWDQFASFEAYDAFTRAWLLACRRVLKPTGTLWVIGSYHNIFRVGAILQDLHFWVLNDIIWRKTNPMPNFKGRRFQNAHETLIWATPNAKAKGYTFNYEAMKAANDDVQMRSDWLFPICSGSERLKGDDGKKVHPTQKPEALLARILMASTKPGDVVLDPFFGSGTTGAVAKRLGRHFVGIEREQDYIDAAAERIAAVEPLGKATLSVMTGKKAEPRVAFNTLVESGLIKPGTVLTDAKRRYSAIVRADGTLASGGEAGSIHRLGAKVQGLDACNGWTFWHFEEGSVLKPIDELRSVIRNDLAKLN

SEQ ID NO: 42552 - DNA, 915 bp, Streptomyces caespitosus
  CDS (1)..(915): transl_table=11
atgtccgggcgggactttggatatgtgatacagtcgtccgctgcactatggaatcgactctctacattctcacagagaggaaaagccttggacaccaggcttgcagacatcaagaaggccctggggaagccgtactacgaaacctcggatgtccttctttaccacggcgacagtcttgagctgctcaagtcaatgcctcagcagattttcgaccttaccgtaactagtccaccttacaatattggcaaagagtacgagggtgtactgtcgatcgaggaatacatttcctggtgcgagacatggatgtcgcgcgttcatagggcgaccagcgcaggcggcgcattttggctcaatgttgggtacgtccctgtcccgaaccaaggaaaagcagtcccgattccttacctcttgtgggacaagagtccgttctacatgatccaggaagttgtctggaattacggggcgggagtggcgtctcgaaaatcgttttccccgcgcaatgaaaagtttctctggtatgtgcgcgacccgctgaattattacttcgacctcgattcggtgcgcgacccaaatgtgaaataccccaaccagaaaaagaatgggaagctcaaatgcaacccgttggggaaaaatcccactgacgtttggcagttccccaaggttacgtcgggcgcgaagagatcaagcgtggagcgcaccgcccatccggcacaattcccgtctgcagtcattgaacgggtcatcaaggcgtgcagcccttccgacggcgtcatcctggacccattcctcggttccggaacgacctcgctgaccgccagaaagcaaggccggtgcagcgtcggtatcgaaatccgcgaagactacctcgacatcgcggtgggacgcctggaggcggaggcgcaatccctcttctag

SEQ ID NO: 42553 - protein, 304 aa, Streptomyces caespitosus
MSGRDFGYVIQSSAALWNRLSTFSQRGKALDTRLADIKKALGKPYYETSDVLLYHGDSLELLKSMPQQIFDLTVTSPPYNIGKEYEGVLSIEEYISWCETWMSRVHRATSAGGAFWLNVGYVPVPNQGKAVPIPYLLWDKSPFYMIQEVVWNYGAGVASRKSFSPRNEKFLWYVRDPLNYYFDLDSVRDPNVKYPNQKKNGKLKCNPLGKNPTDVWQFPKVTSGAKRSSVERTAHPAQFPSAVIERVIKACSPSDGVILDPFLGSGTTSLTARKQGRCSVGIEIREDYLDIAVGRLEAEAQSLF

SEQ ID NO: 42554 - DNA, 25 bp, Artificial sequence
  primer
atgaccatgagaacaggatgtgaac

SEQ ID NO: 42555 - DNA, 24 bp, Artificial sequence
  primer
ttactttgtaatgagatcggggtc

SEQ ID NO: 42556 - protein, 299 aa, Artificial sequence
  consensus sequence
  Variant (3)..(6): Xaa in position 3 to 6 is any amino acid
  Variant (8)..(10): Xaa in position 8 to 10 is any amino acid
  Variant (11)..(11): Xaa in position 11 is any or no amino acid
  Variant (13)..(14): Xaa in position 13 to 14 is any amino acid
  Variant (16)..(16): Xaa in position 16 is any amino acid
  Variant (18)..(18): Xaa in position 18 is any amino acid
  Variant (20)..(21): Xaa in position 20 to 21 is any amino acid
  Variant (27)..(39): Xaa in position 27 to 39 is any amino acid
  Variant (40)..(77): Xaa in position 40 to 77 is any or no amino acid
  Variant (79)..(84): Xaa in position 79 to 84 is any amino acid
  Variant (86)..(90): Xaa in position 86 to 90 is any amino acid
  Variant (92)..(92): Xaa in position 92 is any amino acid
  Variant (95)..(96): Xaa in position 95 to 96 is any amino acid
  Variant (98)..(126): Xaa in position 98 to 126 is any amino acid
  Variant (127)..(134): Xaa in position 127 to 134 is any or no amino acid
  Variant (136)..(151): Xaa in position 136 to 151 is any amino acid
  Variant (152)..(153): Xaa in position 152 to 153 is any or no amino acid
  Variant (155)..(192): Xaa in position 155 to 192 is any amino acid
  Variant (193)..(215): Xaa in position 193 to 215 is any or no amino acid
  Variant (217)..(227): Xaa in position 217 to 227 is any amino acid
  Variant (228)..(238): Xaa in position 228 to 238 is any or no amino acid
  Variant (245)..(246): Xaa in position 245 to 246 is any amino acid
  Variant (249)..(249): Xaa in position 249 is any amino acid
  Variant (251)..(251): Xaa in position 251 is any amino acid
  Variant (253)..(259): Xaa in position 253 to 259 is any amino acid
  Variant (261)..(262): Xaa in position 261 to 262 is any amino acid
  Variant (267)..(267): Xaa in position 267 is any amino acid
  Variant (269)..(270): Xaa in position 269 to 270 is any amino acid
  Variant (273)..(274): Xaa in position 273 to 274 is any amino acid
  Variant (278)..(279): Xaa in position 278 to 279 is any amino acid
  Variant (282)..(284): Xaa in position 282 to 284 is any amino acid
  Variant (288)..(291): Xaa in position 288 to 291 is any amino acid
  Variant (293)..(298): Xaa in position 293 to 298 is any amino acid
GDXXXXLXXXXPXXSXDXIXXDPPYNXXXXXXXXXXXXXXXXXXXXXXXXXXXXXXXXXXXXXXXXXXXXXXXXXXXYXXXXXXWXXXXXRXLKXXGXXXXXXXXXXXXXXXXXXXXXXXXXXXXXXXXXXXXXWXXXXXXXXXXXXXXXXXXEXXXXXXXXXXXXXXXXXXXXXXXXXXXXXXXXXXXXXXXXXXXXXXXXXXXXXXXXXXXXXGXXXXXXXXXXXXXXXXXXXXXXHPTQKPXXLLXRXIXXXXXXXDXXLDPFXGXXTTXXVAKXXGRXXXGIEXXXXYXXXXXXR

SEQ ID NO: 42557 - protein, 58 aa, Artificial sequence
  protein pattern
  Variant (2)..(2): Xaa in position 2 is Gly, Pro or Ser
  Variant (3)..(3): Xaa in position 3 is Ala, Cys, Ser or Thr
  Variant (5)..(5): Xaa in position 5 is any amino acid
  Variant (7)..(8): Xaa in position 7 to 8 is any amino acid
  Variant (9)..(9): Xaa in position 9 is Leu or Val
  Variant (10)..(10): Xaa in position 10 is Ile or Leu
  Variant (11)..(11): Xaa in position 11 is any amino acid
  Variant (12)..(12): Xaa in position 12 is Lys or Arg
  Variant (13)..(13): Xaa in position 13 is Ile or Val
  Variant (14)..(14): Xaa in position 14 is Ile, Leu or Met
  Variant (15)..(15): Xaa in position 15 is any amino acid
  Variant (16)..(16): Xaa in position 16 is Ala or Ser
  Variant (17)..(17): Xaa in position 17 is Ala, Cys, Ser or Thr
  Variant (18)..(18): Xaa in position 18 is Ser or Thr
  Variant (19)..(19): Xaa in position 19 is any amino acid
  Variant (20)..(20): Xaa in position 20 is Glu, Pro or Ser
  Variant (21)..(21): Xaa in position 21 is any amino acid
  Variant (22)..(22): Xaa in position 22 is Asp, Gly or Ser
  Variant (23)..(23): Xaa in position 23 is any amino acid
  Variant (24)..(24): Xaa in position 24 is Ile or Val
  Variant (29)..(29): Xaa in position 29 is any amino acid
  Variant (31)..(31): Xaa in position 31 is Ser, Thr or Val
  Variant (32)..(32): Xaa in position 32 is any amino acid
  Variant (34)..(35): Xaa in position 34 to 35 is any amino acid
  Variant (36)..(37): Xaa in position 36 to 37 is any or no amino acid
  Variant (39)..(41): Xaa in position 39 to 41 is any amino acid
  Variant (42)..(42): Xaa in position 42 is any or no amino acid
  Variant (44)..(45): Xaa in position 44 to 45 is any amino acid
  Variant (46)..(46): Xaa in position 46 is Ile or Val
  Variant (47)..(47): Xaa in position 47 is Gly or Ser
  Variant (48)..(48): Xaa in position 48 is Phe or Ile
  Variant (50)..(50): Xaa in position 50 is any amino acid
  Variant (51)..(51): Xaa in position 51 is Asp, Glu, Asn, Gln, Arg or Ser
  Variant (52)..(53): Xaa in position 52 to 53 is any amino acid
  Variant (55)..(55): Xaa in position 55 is Ile, Leu or Val
  Variant (56)..(57): Xaa in position 56 to 57 is any amino acid
  Variant (58)..(58): Xaa in position 58 is Ala, Cys or Gly
HXXQXPXXXXXXXXXXXXXXXXXXLDPFXGXXTXXXXAXXXXRXXXXXEXXXXYXXXX

SEQ ID NO: 42558 - protein, 14 aa, Artificial sequence
  protein pattern
  Variant (2)..(2): Xaa in position 2 is Ile or Val
  Variant (4)..(4): Xaa in position 4 is any amino acid
  Variant (5)..(5): Xaa in position 5 is Ile or Val
  Variant (6)..(6): Xaa in position 6 is Phe or Ile
  Variant (7)..(7): Xaa in position 7 is any amino acid
  Variant (12)..(12): Xaa in position 12 is any amino acid
  Variant (13)..(13): Xaa in position 13 is Ile, Leu or Met
  Variant (14)..(14): Xaa in position 14 is Gly, Gln or Ser
SXDXXXXDPPYXXX

SEQ ID NO: 42559 - DNA, 237 bp, Escherichia coli
  CDS (1)..(237): transl_table=11
atggcttcacttattcaggtgcgcgatttgctggcgttacggggccgtatggaagcggcccagataagccagacattgaacactccacagccaatgattaacgccatgctgcaacaactggaaagtatgggcaaagccgtgcggattcaggaagaacctgacggctgcctctctggcagttgtaaaagctgcccggaaggaaaagcctgtctgcgcgagtggtgggcgctgcgttaa

SEQ ID NO: 42560 - protein, 78 aa, Escherichia coli
MASLIQVRDLLALRGRMEAAQISQTLNTPQPMINAMLQQLESMGKAVRIQEEPDGCLSGSCKSCPEGKACLREWWALR

SEQ ID NO: 42561 - DNA, 243 bp, Pseudomonas aeruginosa PAO1
  CDS (1)..(243): transl_table=11
atggcgacactcatgcagctccgcgccgccctggaagacggccaggcgcgtgggctgaaacagctcagccgccaggtggacgcgccgccggcgctggtggaggcgatcctggagcggctgatcgcgctcggcaaggtcgagcgggtggctgcgcaaagctcgggcggttgcggcggcggttgcaagggctgcgcccagcgcgatccgtgcgcggagccggagccgtatttccgcctgcgctag

SEQ ID NO: 42562 - protein, 80 aa, Pseudomonas aeruginosa PAO1
MATLMQLRAALEDGQARGLKQLSRQVDAPPALVEAILERLIALGKVERVAAQSSGGCGGGCKGCAQRDPCAEPEPYFRLR

SEQ ID NO: 42563 - DNA, 246 bp, Escherichia coli CFT073
  CDS (1)..(246): transl_table=11
ttgccattaatggcttcacttattcaggtgcgtgatttgctggcgttacggggccgtatggaagcggcccagattagccagacactgaacactccgcagccaatgattaacgccatgctgaaacagctagaaagtatgggaaaagcagtgcggattcaggaagaacctgacggctgtctttccggcagttgtaaaagctgcccggaaggaaaagcctgtctgcacgaatggtgggcgttgcgttaa

SEQ ID NO: 42564 - protein, 81 aa, Escherichia coli CFT073
MPLMASLIQVRDLLALRGRMEAAQISQTLNTPQPMINAMLKQLESMGKAVRIQEEPDGCLSGSCKSCPEGKACLHEWWALR

SEQ ID NO: 42565 - DNA, 240 bp, Photorhabdus luminescens subsp. laumondii TTO1
  CDS (1)..(240): transl_table=11
atgattagcctattacaagtaagggatgccgtcgctctgaatgggcgagcagatgctaagttgttaagccaccagctttctgcttcattatcgatggtagaagcgatgcttgaacaactcaccgtaatgggcaaactggaaaagctcaatgcaactgcctgcctgagtggcagttgcaaacagtgcccggaagtacagcaatgtgacacggtggtttatcggatcgctgggggatactga

SEQ ID NO: 42566 - protein, 79 aa, Photorhabdus luminescens subsp. laumondii TTO1
MISLLQVRDAVALNGRADAKLLSHQLSASLSMVEAMLEQLTVMGKLEKLNATACLSGSCKQCPEVQQCDTVVYRIAGGY

SEQ ID NO: 42567 - DNA, 258 bp, Yersinia pseudotuberculosis IP 32953
  CDS (1)..(258): transl_table=11
atggccagcctactgcaactacgtgatgcgattgccctcaacggcagcgctgaagccagccagctaagccggcagttggcaataccgttgcccttggtcaacgccatgctggagaagttaaccgccatggggaagatagaacgtattgagttggatcatagcggctgcctgacaggcagttgcaaaagctgccccgaaggccatcagcactgtaatactgtgatctatcagttaaaagaacctcacgcacaccaataa

SEQ ID NO: 42568 - protein, 85 aa, Yersinia pseudotuberculosis IP 32953
MASLLQLRDAIALNGSAEASQLSRQLAIPLPLVNAMLEKLTAMGKIERIELDHSGCLTGSCKSCPEGHQHCNTVIYQLKEPHAHQ

SEQ ID NO: 42569 - DNA, 243 bp, Pseudomonas aeruginosa UCBPP-PA14
  CDS (1)..(243): transl_table=11
atggcgacactcatgcagatccgcgccgccctggaagacggccaggcgcgtgggctgaaacagctcagccgccaggtggacgcgccgccggcgctggtggaggcgatcctggagcggctgatcgcgctcggcaaggtcgagcgggtggctgcgcaaagctcgggcggttgcggcggcggttgcaagggctgcgcccagcgcgatccgtgcgcggagccggagccgtatttccgcctgcgctag

SEQ ID NO: 42570 - protein, 80 aa, Pseudomonas aeruginosa UCBPP-PA14
MATLMQIRAALEDGQARGLKQLSRQVDAPPALVEAILERLIALGKVERVAAQSSGGCGGGCKGCAQRDPCAEPEPYFRLR

SEQ ID NO: 42571 - DNA, 228 bp, Serratia marcescens
  CDS (1)..(228): transl_table=11
atggccgggctgctgcaggtgcgcgatgcgttggcgctgcgcgcgacgtcaggcgcacagctcagccaatcgctggcgacgccgctgccgctggtgcaggcgatgctggaccgtttgacggcgatggggaaagtggaacgcatcgaacaggatgacggcgcctgtctgagcggcggctgcaaaagctgcccgcagccaaggggtgcagcacggtgttctaccggctga

SEQ ID NO: 42572 - protein, 75 aa, Serratia marcescens
MAGLLQVRDALALRATSGAQLSQSLATPLPLVQAMLDRLTAMGKVERIEQDDGACLSGGCKSCPQPRGAARCSTG

SEQ ID NO: 42573 - DNA, 23 bp, Artificial sequence
  primer
atggcttcacttattcaggtgcg

SEQ ID NO: 42574 - DNA, 20 bp, Artificial sequence
  primer
ttaacgcagcgcccaccact

SEQ ID NO: 42575 - protein, 71 aa, Artificial sequence
  consensus sequence
  Variant (3)..(3): Xaa in position 3 is any amino acid
  Variant (5)..(5): Xaa in position 5 is any amino acid
  Variant (7)..(7): Xaa in position 7 is any amino acid
  Variant (9)..(19): Xaa in position 9 to 19 is any amino acid
  Variant (20)..(20): Xaa in position 20 is any or no amino acid
  Variant (22)..(22): Xaa in position 22 is any amino acid
  Variant (24)..(28): Xaa in position 24 to 28 is any amino acid
  Variant (30)..(34): Xaa in position 30 to 34 is any amino acid
  Variant (36)..(36): Xaa in position 36 is any amino acid
  Variant (38)..(39): Xaa in position 38 to 39 is any amino acid
  Variant (41)..(43): Xaa in position 41 to 43 is any amino acid
  Variant (46)..(47): Xaa in position 46 to 47 is any amino acid
  Variant (49)..(57): Xaa in position 49 to 57 is any amino acid
  Variant (58)..(58): Xaa in position 58 is any or no amino acid
  Variant (60)..(60): Xaa in position 60 is any amino acid
  Variant (63)..(63): Xaa in position 63 is any amino acid
  Variant (65)..(69): Xaa in position 65 to 69 is any amino acid
  Variant (70)..(70): Xaa in position 70 is any or no amino acid
MAXLXQXRXXXXXXXXXXXXQXSXXXXXPXXXXXAXLXXLXXXGKXXRXXXXXXXXXXGXCKXCXXXXXXC

SEQ ID NO: 42576 - protein, 29 aa, Artificial sequence
  protein pattern
  Variant (2)..(2): Xaa in position 2 is any or no amino acid
  Variant (4)..(6): Xaa in position 4 to 6 is any amino acid
  Variant (7)..(8): Xaa in position 7 to 8 is any or no amino acid
  Variant (10)..(10): Xaa in position 10 is any amino acid
  Variant (11)..(11): Xaa in position 11 is Ala or Pro
  Variant (12)..(12): Xaa in position 12 is Leu or Met
  Variant (13)..(13): Xaa in position 13 is Ile or Val
  Variant (14)..(14): Xaa in position 14 is Glu, Asn or Gln
  Variant (16)..(16): Xaa in position 16 is Ile or Met
  Variant (18)..(19): Xaa in position 18 to 19 is any amino acid
  Variant (21)..(21): Xaa in position 21 is any amino acid
  Variant (22)..(22): Xaa in position 22 is Ala or Ser
  Variant (23)..(23): Xaa in position 23 is Leu or Met
  Variant (26)..(26): Xaa in position 26 is Ala, Ile or Val
  Variant (27)..(27): Xaa in position 27 is any amino acid
  Variant (29)..(29): Xaa in position 29 is Ile or Val
QXSXXXXXPXXXXXAXLXXLXXXGKXXRX

SEQ ID NO: 42577 - protein, 15 aa, Artificial sequence
  protein pattern
  Variant (2)..(2): Xaa in position 2 is Gly, Leu or Pro
  Variant (3)..(3): Xaa in position 3 is Glu, Gly or Ser
  Variant (5)..(6): Xaa in position 5 to 6 is any or no amino acid
  Variant (8)..(8): Xaa in position 8 is Ala, Gly, Gln or Ser
  Variant (10)..(10): Xaa in position 10 is Ala or Pro
  Variant (11)..(11): Xaa in position 11 is Glu or Gln
  Variant (12)..(14): Xaa in position 12 to 14 is any amino acid
  Variant (15)..(15): Xaa in position 15 is Ala or Cys
CXXGXXKXCXXXXXX

SEQ ID NO: 42578 - protein, 14 aa, Artificial sequence
  protein pattern
  Variant (3)..(3): Xaa in position 3 is Gly, Ser or Thr
  Variant (5)..(5): Xaa in position 5 is Ile, Leu or Met
  Variant (7)..(7): Xaa in position 7 is Ile, Leu or Val
  Variant (9)..(12): Xaa in position 9 to 12 is any or no amino acid
  Variant (14)..(14): Xaa in position 14 is Ala, Gly or Leu
MAXLXQXRXXXXDX

SEQ ID NO: 42579 - DNA, 294 bp, Escherichia coli
  CDS (1)..(294): transl_table=11
atggaaagaataatgcaaaacagaaaatggattttgacctcgctggtaatgacttttttcggcatccccatactggcgcaatttttggcggtggttattgccatgctgggtgtcggacttgccggtattattgaagtttgtaatatccttatcacgccaacaatttaccttctgctcaaaatttttatgctggcgctgggcgcattaatgctatttttctcggggcgagtggggaacgtgcctgagttttgttacgttgggtatgatggcgtgggctttgcggtaattccctaa

SEQ ID NO: 42580 - protein, 97 aa, Escherichia coli
MERIMQNRKWILTSLVMTFFGIPILAQFLAVVIAMLGVGLAGIIEVCNILITPTIYLLLKIFMLALGALMLFFSGRVGNVPEFCYVGYDGVGFAVIP

SEQ ID NO: 42581 - DNA, 294 bp, Shigella flexneri 2a str. 301
  CDS (1)..(294): transl_table=11
atggaaagaataatgcaaaatagaaaatggattttgacctcgctggtaatgacttttttcggcatcccaatactgacgcaattttttgcagcggttattgccatgctgggggctgggcttgccgctattcctgaggtttgcaatttactctttacgccaacaatttaccttctgctcaatatttttatgctgacgctgggcgcattaatgctatttttctcggggcgagtggggaacgtgcctgagttttgttacgttgggtatgatggcgtgggctttgcggtaatttcctga

SEQ ID NO: 42582 - protein, 97 aa, Shigella flexneri 2a str. 301
MERIMQNRKWILTSLVMTFFGIPILTQFFAAVIAMLGAGLAAIPEVCNLLFTPTIYLLLNIFMLTLGALMLFFSGRVGNVPEFCYVGYDGVGFAVIS

SEQ ID NO: 42583 - DNA, 282 bp, Escherichia coli
  CDS (1)..(282): transl_table=11
atgcaaaacagaaaatggattttgacctcgctggtaatgacttttttcggcatccccatactggcgcaatttttggcggtggttattgccatgctgggtgtcggacttgccggtattattgaagtttgtaatatccttatcacgccaacaatttaccttctgctcaaaatttttatgctggcgctgggccgattaatgctatttttctcggggcgagtggggaacgtgcctgagttttgttacgttgggtatgatggcgtgggctttgcggtaattccctga

SEQ ID NO: 42584 - protein, 93 aa, Escherichia coli
MQNRKWILTSLVMTFFGIPILAQFLAVVIAMLGVGLAGIIEVCNILITPTIYLLLKIFMLALGRLMLFFSGRVGNVPEFCYVGYDGVGFAVIP

SEQ ID NO: 42585 - DNA, 282 bp, Escherichia coli
  CDS (1)..(282): transl_table=11
atgcaaaacagaaaatggattttgacctcgctggtaatgacttttttcggcatccccatactggcgcaatttttggcggtggttattgccatgctgggtgtcggacttgccggtattattgaagtttgtaatatccttatcacgccaacaatttaccttctgctcaaaatttttatgctggcgctgggcgcattaatgctatttttctcggggcgagtggggaacgtgcctgagttttgttacgttgggtatgatggcgtgggctttgcggtaattccctga

SEQ ID NO: 42586 - protein, 93 aa, Escherichia coli
MQNRKWILTSLVMTFFGIPILAQFLAVVIAMLGVGLAGIIEVCNILITPTIYLLLKIFMLALGALMLFFSGRVGNVPEFCYVGYDGVGFAVIP

SEQ ID NO: 42587 - DNA, 27 bp, Artificial sequence
  primer
atggaaagaataatgcaaaacagaaaa

SEQ ID NO: 42588 - DNA, 24 bp, Artificial sequence
  primer
ttagggaattaccgcaaagcccac

SEQ ID NO: 42589 - protein, 92 aa, Artificial sequence
  consensus sequence
  Variant (22)..(22): Xaa in position 22 is any amino acid
  Variant (25)..(25): Xaa in position 25 is any amino acid
  Variant (27)..(27): Xaa in position 27 is any amino acid
  Variant (34)..(34): Xaa in position 34 is any amino acid
  Variant (38)..(38): Xaa in position 38 is any amino acid
  Variant (40)..(40): Xaa in position 40 is any amino acid
  Variant (45)..(45): Xaa in position 45 is any amino acid
  Variant (47)..(47): Xaa in position 47 is any amino acid
  Variant (56)..(56): Xaa in position 56 is any amino acid
  Variant (61)..(61): Xaa in position 61 is any amino acid
  Variant (64)..(64): Xaa in position 64 is any amino acid
MQNRKWILTSLVMTFFGIPILXQFXAXVIAMLGXGLAXIXEVCNXLXTPTIYLLLXIFMLXLGXLMLFFSGRVGNVPEFCYVGYDGVGFAVI

SEQ ID NO: 42590 - protein, 60 aa, Artificial sequence
  protein pattern
  Variant (22)..(22): Xaa in position 22 is Ala or Thr
  Variant (25)..(25): Xaa in position 25 is Phe or Leu
  Variant (27)..(27): Xaa in position 27 is Ala or Val
  Variant (34)..(34): Xaa in position 34 is Ala or Val
  Variant (38)..(38): Xaa in position 38 is Ala or Gly
  Variant (40)..(40): Xaa in position 40 is Ile or Pro
  Variant (45)..(45): Xaa in position 45 is Ile or Leu
  Variant (47)..(47): Xaa in position 47 is Phe or Ile
  Variant (56)..(56): Xaa in position 56 is any amino acid
MQNRKWILTSLVMTFFGIPILXQFXAXVIAMLGXGLAXIXEVCNXLXTPTIYLLLXIFML

SEQ ID NO: 42591 - protein, 29 aa, Artificial sequence
  protein pattern
  Variant (29)..(29): Xaa in position 29 is Pro or Ser
LMLFFSGRVGNVPEFCYVGYDGVGFAVIX

SEQ ID NO: 42592 - DNA, 339 bp, Escherichia coli
  CDS (1)..(339): transl_table=11
atgggttacaaaatgaatatttcatctctccgtaaagcgtttatttttatgggcgctgtagcggctttgtcactggtgaacgcacaatctgcgttggcagccaatgaatccgctaaagatatgacctgccaggaatttattgatctgaatccaaaagcaatgaccccggttgcatggtggatgctgcatgaagaaacagtatataaaggtggcgataccgttactttaaatgaaaccgatctcactcaaattcctaaagtgatcgaatactgtaagaaaaacccgcagaaaaatttgtataccttcaaaaatcaagcatctaatgacttgccgaattaa

SEQ ID NO: 42593 - protein, 112 aa, Escherichia coli
MGYKMNISSLRKAFIFMGAVAALSLVNAQSALAANESAKDMTCQEFIDLNPKAMTPVAWWMLHEETVYKGGDTVTLNETDLTQIPKVIEYCKKNPQKNLYTFKNQASNDLPN

SEQ ID NO: 42594 - DNA, 339 bp, Escherichia coli O157:H7 EDL933
  CDS (1)..(339): transl_table=11
atgggttacaaaataaatatttcatctctccgtaaagcgtttatttttatgggcgctgtagcggctttgtcactggtgaacgcacaatctgcgctggcagccaatgaatccgctaaagatatgacctgccaggaatttattgatctgaatccaaaagcaatgaccccggttgcatggtggatgctgcatgaagaaacagtatataaaggtggcgatacagttactttaaatgaaaccgatctcactcaaattcctaaagtgatcgaatactgtaagaaaaacccgcagaaaaatttgtataccttcaaaaatcaagcatctaatgacttgccgaattaa

SEQ ID NO: 42595 - protein, 112 aa, Escherichia coli O157:H7 EDL933
MGYKINISSLRKAFIFMGAVAALSLVNAQSALAANESAKDMTCQEFIDLNPKAMTPVAWWMLHEETVYKGGDTVTLNETDLTQIPKVIEYCKKNPQKNLYTFKNQASNDLPN

SEQ ID NO: 42596 - DNA, 330 bp, Yersinia pestis KIM
  CDS (1)..(330): transl_table=11
atgtcctacaaatcactgcgtaatattgcactgactggtttgcttctttccaccgcggcaactacctttgcagcaacgccgacagggaccacaccaagtgatatgacttgcaaagagttcttggatctaaatcctaagtcatttactccggtagtttattgggtattgaacgatgatacccaatataaacaaggtgattatgttgatctgcatgagaccgatactctcgtgacacctaaagtggtcgaggtatgtaagaaggccccagaaagtaaactgtctgaaattaaacaggacattttaaatttcgccaaaaaacacaatatgtaa

SEQ ID NO: 42597 - protein, 109 aa, Yersinia pestis KIM
MSYKSLRNIALTGLLLSTAATTFAATPTGTTPSDMTCKEFLDLNPKSFTPVVYWVLNDDTQYKQGDYVDLHETDTLVTPKVVEVCKKAPESKLSEIKQDILNFAKKHNM

SEQ ID NO: 42598 - DNA, 27 bp, Artificial sequence
  primer
atgggttacaaaatgaatatttcatct

SEQ ID NO: 42599 - DNA, 25 bp, Artificial sequence
  primer
ttaattcggcaagtcattagatgct

SEQ ID NO: 42600 - DNA, 1026 bp, Escherichia coli
  CDS (1)..(1026): transl_table=11
atgaaagcgttatccaaactgaaagcggaagagggcatctggatgaccgacgttcctgtaccggaactcgggcataacgatctgctgattaaaatccgtaaaacagccatctgcgggactgacgttcacatctataactgggatgagtggtcgcaaaaaaccatcccggtgccgatggtcgtgggccatgaatatgtcggtgaagtggtaggtattggtcaggaagtgaaaggcttcaagatcggcgatcgcgtttctggcgaaggccatatcacctgtggtcattgccgcaactgtcgtggtggtcgtacccatttgtgccgcaacacgataggcgttggtgttaatcgcccgggctgctttgccgaatatctggtgatcccggcattcaacgccttcaaaatccccgacaatatttccgatgacttagccgcaatttttgatcccttcggtaacgccgtgcataccgcgctgtcgtttgatctggtgggcgaagatgtgctggtttctggtgcaggcccgattggtattatggcagcggcggtggcgaaacacgttggtgcacgcaatgtggtgatcactgatgttaacgaataccgccttgagctggcgcgtaaaatgggtatcacccgtgcggttaacgtcgccaaagaaaatctcaatgacgtgatggcggagttaggcatgaccgaaggttttgatgtcggtctggaaatgtccggtgcgccgccagcgtttcgtaccatgcttgacaccatgaatcacggcggccgtattgcgatgctgggtattccgccgtctgatatgtctatcgactggaccaaagtgatctttaaaggcttgttcattaaaggtatttacggtcgtgagatgtttgaaacctggtacaagatggcggcgctgattcagtctggcctcgatctttcgccgatcattacccatcgtttctctatcgatgatttccagaagggctttgacgctatgcgttcgggccagtccgggaaagttattctgagctgggattaa

SEQ ID NO: 42601 - protein, 341 aa, Escherichia coli
MKALSKLKAEEGIWMTDVPVPELGHNDLLIKIRKTAICGTDVHIYNWDEWSQKTIPVPMVVGHEYVGEVVGIGQEVKGFKIGDRVSGEGHITCGHCRNCRGGRTHLCRNTIGVGVNRPGCFAEYLVIPAFNAFKIPDNISDDLAAIFDPFGNAVHTALSFDLVGEDVLVSGAGPIGIMAAAVAKHVGARNVVITDVNEYRLELARKMGITRAVNVAKENLNDVMAELGMTEGFDVGLEMSGAPPAFRTMLDTMNHGGRIAMLGIPPSDMSIDWTKVIFKGLFIKGIYGREMFETWYKMAALIQSGLDLSPIITHRFSIDDFQKGFDAMRSGQSGKVILSWD

SEQ ID NO: 42602 - DNA, 1594 bp, Glycine max
  CDS (86)..(1180)
agctcggacgcgaactgacagcactgtaccgtaagtcttattatctccgaaagctttctaagaagagagagagagagagagggaaatgggtaaggggggaatgtcaattgatgaacatggagaaggcaaagaagagaatatggctgcttggcttgttggaatgaacactctcaagattcagcctttcaagcttcctactttgggaccccatgatgtcagagttagaatgaaggctgttggtatctgtgggagtgatgttcactacctcaagacactgaggtgtgctcactttatagttaaagaaccaatggttattggtcatgagtgtgctgggatcatagaagaagttggtagtcaggtaaagagtttggtgcctggtgaccgtgtggcaattgagcctgggatcagttgttggcattgcaaccattgcaaacacggtcgatataacttatgcgatgatatgaagttttttgctactccaccagttcatggttccctggctaatcagatagtgcatcctgcagacctatgttttaagctgccagacaacgtgagcctagaggagggagcaatgtgtgaacccttaagtgttggtgttcatgcttgtaggagagctaatattggaccagaaacatatgtgttgatcatgggagcagggcccataggacttgttacaatgctggcagctcgtgcgtttggggcacccaagactgtcattgtggatgttgatgactatcgtttatctgttgcaaaatcacttggtgcagatgacattgttaaagtctcaacaaacattaaggatgtggctgaagaagttgtgcagatgacgacagaaatgggagctggtatagatgttacctttgattgtgctggttttgacaaaaccatgtctacagcactgagtgctactcagccaggtggcaaagtttgcctagtgggaatgggacattctgaaatgactgtcccactcaccccagctgcagcaagggaagttgatgtggttggagtttttcgctatatgaacacatggcctctttgccttgagtttctaaggagtggcaaaattgatgtgaaaccccttataacgcacaggtttggattctctcaaaaggaagtggaagaagcctttgaaacaagtgctcgtggtggtaacgccatcaaggtcatgttcaatctttagatactggactgtgactttacaaactgtcgtatgttgaacaaagtaggtaatttacatgttcatgctcatgttaaataccaatgtattgataacacgggttatgaataaagtggtttcaagaaggacttgtaaaacatgtgaatggtaactgcagcatctacagattcagttatgaggtgaaactttttcttaatatgtaaatgagtaaaccctcaaatttgtctagtagtaattgagaatttcaatgcacaataacaaactgttgcttccaaagtagaagttcttttaggttctatcaacttttatccaaacatgtactaaaactttatttgtggttcttaagaaatcatgattgctggccacattagtcattttaaggaattagcatgttatttgcttaagaaaaaaaccaaa

SEQ ID NO: 42603 - protein, 364 aa, Glycine max
MGKGGMSIDEHGEGKEENMAAWLVGMNTLKIQPFKLPTLGPHDVRVRMKAVGICGSDVHYLKTLRCAHFIVKEPMVIGHECAGIIEEVGSQVKSLVPGDRVAIEPGISCWHCNHCKHGRYNLCDDMKFFATPPVHGSLANQIVHPADLCFKLPDNVSLEEGAMCEPLSVGVHACRRANIGPETYVLIMGAGPIGLVTMLAARAFGAPKTVIVDVDDYRLSVAKSLGADDIVKVSTNIKDVAEEVVQMTTEMGAGIDVTFDCAGFDKTMSTALSATQPGGKVCLVGMGHSEMTVPLTPAAAREVDVVGVFRYMNTWPLCLEFLRSGKIDVKPLITHRFGFSQKEVEEAFETSARGGNAIKVMFNL

SEQ ID NO: 42604 - DNA, 1110 bp, Oryza sativa (japonica cultivar-group)
  CDS (1)..(1110)
atggggaagggagggaaaggagccgaggcggcggcggcggcggtggccggagccggtgaggaggagaacatggcggcgtggctggtggcgaagaacaccctcaagatcatgcccttcaagctcccgccagttgggccttatgatgtccgtgtccggatgaaggcagtgggcatctgcggcagcgacgtgcactacctcagggagatgcgcattgcgcatttcgtggtgaaggagccgatggtgatcgggcacgagtgcgccggcgtgatagaggaggtcggcagcggcgtgacgcacctcgccgtcggcgaccgcgtggcgctcgagcccggcatcagctgctggcgctgcaggcactgcaagggcggccgctacaacctctgcgaggacatgaagttcttcgccacccctcccgtccacggatccctcgccaaccagatcgtgcaccctggtgatctgtgcttcaagctgccggagaacgtgagcctggaggaaggcgccatgtgcgagccgctgagcgtgggcgtgcacgcgtgccgccgcgccgacgtcgggccggagacgggggtgctgatcatgggcgcggggccgatcggcctggtcaccctgctggcggcgcgcgcgttcggcgcgacgcgcgtcgtgatcgtggacgtggacgaacaccgcctctccgtggcccgatccctcggcgccgacgccgccgtgagggtgtcggcgcgcgcggaggacgtcggcgaggaggtggaacggatcagggcggcgatgggcggggacatcgacgtgagcctggactgcgccgggttcagcaagacggtggcgacggcgctggaggcgacgcgcggcggcgggaaggtgtgcctcgtcgggatggggcacaacgagatgacggtgccgctgacgtcggcggcgatcagggaggtggacgtggtggggatattccggtacaaggacacgtggccgctctgcatcgagttcctccgcagcggcaagatcgacgtgaagccgctcatcacccaccgattcgggttctcgcaggaggacgtggaggaggcgttcgaggtcagcgcccgtggccgcgacgccatcaaggtcatgttcaacctctag

SEQ ID NO: 42605 - protein, 369 aa, Oryza sativa (japonica cultivar-group)
MGKGGKGAEAAAAAVAGAGEEENMAAWLVAKNTLKIMPFKLPPVGPYDVRVRMKAVGICGSDVHYLREMRIAHFVVKEPMVIGHECAGVIEEVGSGVTHLAVGDRVALEPGISCWRCRHCKGGRYNLCEDMKFFATPPVHGSLANQIVHPGDLCFKLPENVSLEEGAMCEPLSVGVHACRRADVGPETGVLIMGAGPIGLVTLLAARAFGATRVVIVDVDEHRLSVARSLGADAAVRVSARAEDVGEEVERIRAAMGGDIDVSLDCAGFSKTVATALEATRGGGKVCLVGMGHNEMTVPLTSAAIREVDVVGIFRYKDTWPLCIEFLRSGKIDVKPLITHRFGFSQEDVEEAFEVSARGRDAIKVMFNL

SEQ ID NO: 42606 - DNA, 1209 bp, Archaeoglobus fulgidus DSM 4304
  CDS (1)..(1209): transl_table=11
atgagggctctggttgttgagttaaggctttggaaagcagcactgagcctgctgctggggaaggttacgaaaagcgtttactacagccccctatcgttgctgaaatactacaaaaactaccctgaacctgcgctgcccgacgaggactgggtcaaggtaaagacgaggctctgcgggatttgcgggtcagacctcagaatcataactcttcaggagagcttctatttagccccgctgacatccttccccttcatcccgggccatgaggtggtaggagaggttgttgaggtggggaaggaggcagatgcacaggaaggggagagggttgtcatcaatacagccctttcctgcagagttagaggatttgatgactgcgatgcgtgcagaaaaggccattttgccgcctgccataatgtggataggggcagaatctctcccggcatattcacgggaacgtgcagggatacaggaggagggtgggcagagtactttgtggcccacgaatctcagcttgttagagtgccagaggggattagggatgaaaacgctgtgttcgctgagccgctcaccataggaatccactcagccctgagaagctttcccgatgatggagaggttgtcgcaattgtgggttgtggtgttatcggcatctgcaccatcatcgccctgagacaccttggcttcaggggtgaaatcatcgggattgatataagtgaaagacaggccgagctggcaagaaaatttggagctgatggggtggtaactgaaaatcccgtagagaggattgccgagatgacgggtggaagagtttaccgcccgccgagggacaaaccaatgttcattggtggtggggttgatgtggcctttgagtgcaccggaattccccagaccgtggatacagccctgagaataaccaagcctcttggcagagttgtgattgcgggaaccgtagccaagatgggcgtggactgggctcctgtatttgcgaaagagctgagcgtgttgggaacttttggatgcggaattgaggaggttaatggggagaaaagggatgccttcgacatagcctttgaaatcctcaaaaaagttgacctctcttctctgcttacccacagattcaccatcgaggactacaagaaagctctgagggctgcgattgaaaaagggaaaagtggggcggtgaaggtggcctttgattttactctttga

SEQ ID NO: 42607 - protein, 402 aa, Archaeoglobus fulgidus DSM 4304
MRALVVELRLWKAALSLLLGKVTKSVYYSPLSLLKYYKNYPEPALPDEDWVKVKTRLCGICGSDLRIITLQESFYLAPLTSFPFIPGHEVVGEVVEVGKEADAQEGERVVINTALSCRVRGFDDCDACRKGHFAACHNVDRGRISPGIFTGTCRDTGGGWAEYFVAHESQLVRVPEGIRDENAVFAEPLTIGIHSALRSFPDDGEVVAIVGCGVIGICTIIALRHLGFRGEIIGIDISERQAELARKFGADGVVTENPVERIAEMTGGRVYRPPRDKPMFIGGGVDVAFECTGIPQTVDTALRITKPLGRVVIAGTVAKMGVDWAPVFAKELSVLGTFGCGIEEVNGEKRDAFDIAFEILKKVDLSSLLTHRFTIEDYKKALRAAIEKGKSGAVKVAFDFTL

SEQ ID NO: 42608 - DNA, 1041 bp, Neisseria meningitidis MC58
  CDS (1)..(1041): transl_table=11
atgaaagcaatggtttatcacggcgcaaacgacatccgttttgaagaaaaaccccgtccgcagattatcgatccgaccgatgcggtggtgaaaatcgtcaaaaccacgatttgcggtaccgatttgggtatttggaaaggcaaaaaccccgaagttgccgacggccgtattctcggtcatgagggcatcggtattgtagaagaagtcggcgaggctgtaaaaaacatcaaagtcggcgataaagtcattatttcatgcgtcagcaaatgttgcacttgcgacaactgcaaaacccaactctattcacactgccgtaacggcggttggattttgggttacatgattgacggtactcaggccgaatacgtccgtacgccttatgccgacaacagcctcgttccgctgcccgataatgtcaacgaagaaatcgccctgttgttgagcgacgctttgccgaccgcccacgaaatcggcgtgcaatacggcgatgtcaaacccggcgacaccgtattcatcgctggggcaggccctgtcggtatgtccgccctgttgaccgcccaactgtacagtcccgccgccatcatcgtttgcgatatggacgaaaaccgtttgaaactggcgaaagaattgggtgcgacccataccattaaccctgcttccggcgaagtatccaaacaagtctttgccatcgtcggcgaagacggcgtggattgcgccatcgaagccgtcggtatccctgctacatggaatatgtgccaagacattgtgaaacccggcggccatatcgctgtggttggtgtacatggtcaatccgttgatttcaaactggaaaaactctggattaaaaagcttgccatcactaccggtctggtaaacgccaataccaccgaaatgctgatgaaggcgatttccagcagctccgtcgattacaccaaaatgctgacccatcatttcaaattcagtgaattggaaaaagcctacgacgtgttcaaacacgccgccgaaaaccaagtgatgaaagtggttttggaagcggattaa

SEQ ID NO: 42609 - protein, 346 aa, Neisseria meningitidis MC58
MKAMVYHGANDIRFEEKPRPQIIDPTDAVVKIVKTTICGTDLGIWKGKNPEVADGRILGHEGIGIVEEVGEAVKNIKVGDKVIISCVSKCCTCDNCKTQLYSHCRNGGWILGYMIDGTQAEYVRTPYADNSLVPLPDNVNEEIALLLSDALPTAHEIGVQYGDVKPGDTVFIAGAGPVGMSALLTAQLYSPAAIIVCDMDENRLKLAKELGATHTINPASGEVSKQVFAIVGEDGVDCAIEAVGIPATWNMCQDIVKPGGHIAVVGVHGQSVDFKLEKLWIKKLAITTGLVNANTTEMLMKAISSSSVDYTKMLTHHFKFSELEKAYDVFKHAAENQVMKVVLEAD

SEQ ID NO: 42610 - DNA, 1113 bp, Deinococcus radiodurans R1
  CDS (1)..(1113): transl_table=11
gtgacttctcccagctcgaccgcaacttccagcccgaccacgaccaccgcccccacccctgcccggatgcgggccctgagcaagcagcagcccggcgagggcatctggatgatcgaaaccgaggtgccgacgcccggtcccaacgacctgctgattcgaattcgcaaggggagcatctgtggaaccgacgtgcacatctacaagtgggacgactgggcgagccagacggtgccggtgccgatggtcgtcgggcacgaatacgtgggtgtggtcgcgggcatgggctcggaagtgcgcggcttcgaaatcggcgaccgggtgagcggcgagggccacgtcacctgcgggcactgccgcaactgccgcgccgggcgccgccacctgtgccgcaacacgcagggggtgggcgtcaaccgccccggctccttcgccgagtatctggtgctgcccgccttcaatgccttcaagctgcccgacgacattcccgacgatgtcgccgctattttcgaccccttcggcaacgcggtgcacacggcgctgagcttcgacctggtgggcgaggacgtgctgattaccggcgccgggcccatcggctgcatggccgccgccgtcgcccggcacgtgggcgcccgcaacgtggtgattaccgacgtgaatgactaccgtctcgacctcgcgcggcagatgggcgtgacccgcgccgtgaatgtggcccgcgaggacctctggacggtggcgacgcaggaactcgacatgcacgagggcttcgacgtgggcatggaaatgagcggctcggggcctgccttcgcgcagatggtcagcgtgatgaacaacggcggcaaagtcgcgctgctcggcattccctcgggcgaggtgcagatcgattggaacgccgtcatcttcaagatgctcaccatcaagggcatctatggccgcgagatgttcgaaacctggtacaagatggccgccctgattcagtcgggcctggacctcacgccggtcatcacccaccactacggcatcggcgactttcagcagggcttcgacgccatgctcagcgggcagagcggcaaagtgattctggactgggagacggaagagcaaagcgcctga

SEQ ID NO: 42611 - protein, 370 aa, Deinococcus radiodurans R1
MTSPSSTATSSPTTTTAPTPARMRALSKQQPGEGIWMIETEVPTPGPNDLLIRIRKGSICGTDVHIYKWDDWASQTVPVPMVVGHEYVGVVAGMGSEVRGFEIGDRVSGEGHVTCGHCRNCRAGRRHLCRNTQGVGVNRPGSFAEYLVLPAFNAFKLPDDIPDDVAAIFDPFGNAVHTALSFDLVGEDVLITGAGPIGCMAAAVARHVGARNVVITDVNDYRLDLARQMGVTRAVNVAREDLWTVATQELDMHEGFDVGMEMSGSGPAFAQMVSVMNNGGKVALLGIPSGEVQIDWNAVIFKMLTIKGIYGREMFETWYKMAALIQSGLDLTPVITHHYGIGDFQQGFDAMLSGQSGKVILDWETEEQSA

SEQ ID NO: 42612 - DNA, 1062 bp, Xylella fastidiosa 9a5c
  CDS (1)..(1062): transl_table=11
atgagaggttatgttctagaagccaaaggcacggccaagtggaaagacgtgccaatgcccgtgctggggccgaacgatgcactggttcggcccacggcagtggcgacctgcaccaccgacgtccacatgatcgcgaccgccgcgcttcccaagaccgtgggaaaggtcatcgggcatgaagcggtcggcgtggtcgagaaggtcggcgagaacgtgaaggccttcaggcccggtgaccgcgtagtcctgccgtgcggcaattcggactggcgccatccccgcgcccagcggggcgaagccaagtactaccagaccaacagcccgtactactccgacgatccttcgatcggcggcgtgttctccgagtacgtgcgcacgctcgacgccgacctcaacctcgcgcgcatcccggataaggtgtccgacctgcaggcggtaatgctgccggacatggccgcgaccggcttcaccggcgtcgagcgccttggcattcagttcggcgaaaccgtgctggtgatgggactcgggccggtcgggctgatggccgtcgccggtgcagcccttcgcggtgccggccggatcatcggcgtggattcccgtccgaacacggttgaattggctcgggcctatggcgtgaccgacatcgtggacttcacgggcggccagaccctggagaaggtcatggccctgaccgcgggccagcccgtcgatagcgtgctcatcgccagcggcggtacggcgagcgaggtattcaccacggcgctgaaggccgtcaagttcggcggtcgcgtggcctgcgtttccggcttcctgcacgacgaatccgtcaccatcccgctggaggtgtggaactacgggttcatggagaaattcctgaccggcgttcacgtgcaggacggccgagactggatcgagcgattgttggcgatgctcgaatgcgggcgattcgacacgcggccgctggtcagccacgtcctgcatggatgggattctctcgaacaggggatcgagctgatgcgcagccgcgaccccgcggtgatcaagcccgtgatcgtcatttga

SEQ ID NO: 42613 - protein, 353 aa, Xylella fastidiosa 9a5c
MRGYVLEAKGTAKWKDVPMPVLGPNDALVRPTAVATCTTDVHMIATAALPKTVGKVIGHEAVGVVEKVGENVKAFRPGDRVVLPCGNSDWRHPRAQRGEAKYYQTNSPYYSDDPSIGGVFSEYVRTLDADLNLARIPDKVSDLQAVMLPDMAATGFTGVERLGIQFGETVLVMGLGPVGLMAVAGAALRGAGRIIGVDSRPNTVELARAYGVTDIVDFTGGQTLEKVMALTAGQPVDSVLIASGGTASEVFTTALKAVKFGGRVACVSGFLHDESVTIPLEVWNYGFMEKFLTGVHVQDGRDWIERLLAMLECGRFDTRPLVSHVLHGWDSLEQGIELMRSRDPAVIKPVIVI

SEQ ID NO: 42614 - DNA, 1170 bp, Nostoc sp. PCC 7120
  CDS (1)..(1170): transl_table=11
atgaaagcagtttgctggcacgggacaaatgatgtcagggtagaaactgtacccgatccaaaaattcttaacccgcgcgacgcaattattaaaattacttctacagctatttgtgggtctgatttacatatatataatggctatattcccacaatgcaaagtggcgatatccttggtcatgaattcatgggggaagttgtcgagttaggtagtgctgtaaaaaatgtgaaagtaggcgatcgcgtcgttgttccttttaccatttcctgcggttcttgcttcttctgtcaacgggatttatggtctttgtgcgataactccaaccccaacgcctggctggtagaactgcaaatgggtcattctccagcaggtctatttggctactctcacctatttggtggctatgctgggggtcaagcagaatacgcccgtgtaccttttgcagatgtcggcttgcttaaaattcctgataatctaccagatgaacaggtattatttttaactgatatttttcccactggctacatggcggcggagaactgtaatatcaaacccggcgatattgtggctgtgtggggttgtggccccgttggacaatttgctatcaaaagtgcatatatgttgggtgcggaaagagttatcgcctttgaccgcatccccgaacgcctacaaatggctaaagaacaatgtaatgccgaagtcctcaattacgaagaggtaaatatcggggaagcactcaaagagatgactggtggacgcggccctgatgcttgtattgatgcggtaggcatggaagcccacggtacagacttaatggctttctacgaccaagtcaagcaagctgtaagactagaaacagacagaccaacagcattacgacaagtgattgtgtctgcggctaaaggtggtcatgtttctctggcgggtgtatatggcggtttcctggacaaaatcccgatgggttcagcgatgaataagggtttaaccttcaagatgggacaaacccatgtccataaatacttaaaacccttactagaacgtattcaaaacggtgaaattgacccctcatttgtcatcacccacaccatcccgctagaacaagcaccccacggctacgaaatttttaaacacaaaaaagataactgcatcaaagttgtactcaaaccctaa

SEQ ID NO: 42615 - protein, 389 aa, Nostoc sp. PCC 7120
MKAVCWHGTNDVRVETVPDPKILNPRDAIIKITSTAICGSDLHIYNGYIPTMQSGDILGHEFMGEVVELGSAVKNVKVGDRVVVPFTISCGSCFFCQRDLWSLCDNSNPNAWLVELQMGHSPAGLFGYSHLFGGYAGGQAEYARVPFADVGLLKIPDNLPDEQVLFLTDIFPTGYMAAENCNIKPGDIVAVWGCGPVGQFAIKSAYMLGAERVIAFDRIPERLQMAKEQCNAEVLNYEEVNIGEALKEMTGGRGPDACIDAVGMEAHGTDLMAFYDQVKQAVRLETDRPTALRQVIVSAAKGGHVSLAGVYGGFLDKIPMGSAMNKGLTFKMGQTHVHKYLKPLLERIQNGEIDPSFVITHTIPLEQAPHGYEIFKHKKDNCIKVVLKP

SEQ ID NO: 42616 - DNA, 1053 bp, Thermoanaerobacter tengcongensis MB4
  CDS (1)..(1053): transl_table=11
atgtctattatggatggacttatgaccgccgtggtaaaacaataccacaaagaaggggcagatatagtaaaaaaggaaataccaaagataggccctgatgaagttttgataaaagttaaagctacttctatttgcggcacagacgttcacatatacgtctggaatgaatgggcaaaaagtagaataaaacctccaaaaacgatgggacacgaatttgtaggagaggttgtagaaattggagaaaatgtcacatcagtaaaagtgggagacttagtaagcgcagaaactcatatagtatgcggaaagtgcagagcctgcagaaccggcaacgctcacatatgtgaaaataccctcattttaggcgttgacacagatggagcttttgcagaatacatcaaagttcctgaaagcaatgtgtggataaacgacaaaaacatacctctagagatactatccatacaggaacctcttggaaacgcagtccacactgttttttcaggagacgtagttggaaaatctgtagctgtcataggatgcggcccaataggaatgatggcaataccacttcttaaaagaacaggtgctgcagcaatattcgcgattgaacctgctgactacaggagagagttggctcacaagcttggtgcaacaagggttataaatcctctccgcgaagacgttgtcagcataataaaaagtgaaacagaaggctatggagcagatgtagttttggacttttcaggtaacccaaccgccataaggcagggtctagagtacattgcaaaaggtggcagaatgtctattctaggccttcctgacaatgaagttccaattgacatcacaaataatgtggtattcaaaggaataactatacaaggcataactggaagaagaatgtacgatacctggtacaccgtaaagggcttactaaaatcaggtcttgcagaagatttaaagccaataatcacccacacattccctcttaccgaataccagaagggaatggaactcatgataaaagggcagtgcggtaaagtcgtattatatccgtaa

SEQ ID NO: 42617 - protein, 350 aa, Thermoanaerobacter tengcongensis MB4
MSIMDGLMTAVVKQYHKEGADIVKKEIPKIGPDEVLIKVKATSICGTDVHIYVWNEWAKSRIKPPKTMGHEFVGEVVEIGENVTSVKVGDLVSAETHIVCGKCRACRTGNAHICENTLILGVDTDGAFAEYIKVPESNVWINDKNIPLEILSIQEPLGNAVHTVFSGDVVGKSVAVIGCGPIGMMAIPLLKRTGAAAIFAIEPADYRRELAHKLGATRVINPLREDVVSIIKSETEGYGADVVLDFSGNPTAIRQGLEYIAKGGRMSILGLPDNEVPIDITNNVVFKGITIQGITGRRMYDTWYTVKGLLKSGLAEDLKPIITHTFPLTEYQKGMELMIKGQCGKVVLYP

SEQ ID NO: 42618 - DNA, 1122 bp, Thermosynechococcus elongatus BP-1
  CDS (1)..(1122): transl_table=11
atggggtcgtggccctcttgggactgctctgcgtcctcctgcaatggttggcctaatccatggggatctgcaatgaaagcagcagtgctctacggcaaagaagatgtccgtattgaaaccgtccccgatccgacgccggggccgggggaagtggtgattcgggtacgggctgccaccacctgtggcaccgacttgaaggtatggcggcgggggggtcatgcccgcatgctgacaccgccgattctctttggccatgaagccgccggcgaaattgttgccctgggagccggtgtgactggatggcaggtgggcgatcgcgtggtggccaataattctgccccctgtggccagtgtttttattgtcagcgccaggccttttccctatgtccccatctggagtttaacaatggcacctttgccgagtatctgaaacttcccgccagtattgtccgccaaaaccttttgcccattccagagtccctcccctttgctttggcggcgctgaccgaacccctcgcctgtgtcctccacggtgtggcccgctctggctttgaccccgcgatggtggcaacgtggccgagtccaccgcaaatcgttgtccttggggatggcgccattggtctgatgtttgttggtgtgctggcccagcagggggcacgggtgcttgcctttggtggttccaatcagcggctagcgatcgccaccacctttggggcagagcaaaccatcaatcatcaccagtgcggggatattcccgccgtcgtcaaagactggacggaaggacggggggccgacattgtcattgaagccacgggggttcctgaagtctgggaaacagcgatcgcctgtggtcggccgggtgccacaatcaacctctttggcggttgtcctcgggaaaccactatccgcgtggatacagaacgcctccactacgaagaactcaccctcaagggggtctttcacaacaccccctcctttgtccgccaggctctgcaattgattgccagcggtacactgcccttcgagaagctcattagtggtcaagcccccctcatggagattgaaactgtcctccaagccatgaaggcgcgccaagtcatcaaagttgccctgcaaccctag

SEQ ID NO: 42619 - protein, 373 aa, Thermosynechococcus elongatus BP-1
MGSWPSWDCSASSCNGWPNPWGSAMKAAVLYGKEDVRIETVPDPTPGPGEVVIRVRAATTCGTDLKVWRRGGHARMLTPPILFGHEAAGEIVALGAGVTGWQVGDRVVANNSAPCGQCFYCQRQAFSLCPHLEFNNGTFAEYLKLPASIVRQNLLPIPESLPFALAALTEPLACVLHGVARSGFDPAMVATWPSPPQIVVLGDGAIGLMFVGVLAQQGARVLAFGGSNQRLAIATTFGAEQTINHHQCGDIPAVVKDWTEGRGADIVIEATGVPEVWETAIACGRPGATINLFGGCPRETTIRVDTERLHYEELTLKGVFHNTPSFVRQALQLIASGTLPFEKLISGQAPLMEIETVLQAMKARQVIKVALQP

SEQ ID NO: 42620 - DNA, 1032 bp, Bradyrhizobium japonicum USDA 110
  CDS (1)..(1032): transl_table=11
atgcgcgccgtcgtcattcacgccccgaaagacctgcggatcgacagctatcccgatccggcacccggcccgggcgaggtccgcgtcaagatcgccaatggcggcatctgcggctcggacctgcattactaccatcacggcggcttcggcgtcgtgcgcatccagcagccgatggcgctgggccatgagatcgccggcgtggtcgcggccgtcggtgacggcgtgaccagcgtgaagccgggcacgcgcgtcgccgtcaatccgagcaagccgtgcggcaagtgcctgcattgccaggaggggatgcgcaaccaatgcctcgacatgcgcttcctcggcagcgcgatgcgctttccccatgtgcagggcggctttcgcgagttcctcacgatcgatgcgacgcaggccgtaccgatcgcggatgagctgtcgctggccgaggccgcggtcgccgagccgctcgcggtttgcctgcatgccggcaagcaggccggccccctcctcggcaagcgcgtgctgatcaccggctgcggcccgatcggtgcactgatgatcctggtctcgcgtttcggcggggcgtccgagatcgtggtgaccgatgtcgccgacgcgccgctggcggtcgccagaaagctcggtgccacccacgccatcaacgtcgcgacccatgccaccgcgctcgatccctggcgcgccggcaagggcgtgttcgacacgctgttcgaggcttccggcaaccaggctgcgctccgcaccgcgctcgacgtgctcaggcccggcgccacgctggtgcagctcggcctcggcggcgagatgacgctgccgatcaactccatcgtcgccaaggaattgcagctccgcggcaccttccgcttcgatcccgagttcgagctcgcggtgcggctgatgggcgaaggcctgatcgacgtcaagccgctgatcacggccaccatgccgttcgagaacgcggtcgccgccttcgagcttgccagcgaccgttcgcagtcgatgaaggtgcagctgtcgttctag

SEQ ID NO: 42621 - protein, 343 aa, Bradyrhizobium japonicum USDA 110
MRAVVIHAPKDLRIDSYPDPAPGPGEVRVKIANGGICGSDLHYYHHGGFGVVRIQQPMALGHEIAGVVAAVGDGVTSVKPGTRVAVNPSKPCGKCLHCQEGMRNQCLDMRFLGSAMRFPHVQGGFREFLTIDATQAVPIADELSLAEAAVAEPLAVCLHAGKQAGPLLGKRVLITGCGPIGALMILVSRFGGASEIVVTDVADAPLAVARKLGATHAINVATHATALDPWRAGKGVFDTLFEASGNQAALRTALDVLRPGATLVQLGLGGEMTLPINSIVAKELQLRGTFRFDPEFELAVRLMGEGLIDVKPLITATMPFENAVAAFELASDRSQSMKVQLSF

SEQ ID NO: 42622 - DNA, 1095 bp, Shigella flexneri 2a str. 2457T
  CDS (1)..(1095): transl_table=11
atgaaaattaatcgtattgttaatgagggatttatgaaaacgatgctggctgcttatttactaggaaattcaaccgtcgatctgcgggaagttgcggtgccgacgccggggattaaccaggtactgatcaaaatgaaatcctccgggatttgcggaagcgatgtccactatatctatcatcaacaccgtgccacggcggcggcacccgataaaccgttataccagggatttatcaacggtcatgaaccgtgcgggcagattgtggcgatggggcaaggctgccgccattttaaagagggcgaccgcgtgctggtgtatcacatttctggctgtggtttttgcccgaactgccgccgcggctttcctatctcttgtactggcaaaggaaaagcggcttacggctggcagcgtgacggcggtcatgccgaatatctgctggcggaagaaaaagatctgatcctcctgccggatgcgctgagctacgaagatggtgcgtttatcagttgcggcgttggcacggcctatgaagggattttgcgcggcgaagtttccggcagcgataacgtgctggtggtcggtctggggccggtcggcatgatggcgatgatgctggcgaaaggtcgcggtgcaaaacggatcatcggcgttgatatgctgccggaacgtctggcgatggcaaaacagttaggggggatggatcacggctatttagcaaccaccgaaggtctgccgcagataattgctgaacttacccacggtggcgcggatgttgcgctcgattgttccggtaatgccgcaggtcgcttgctggcactgcaatccactgctgactgggggcgggtggtttacattggtgaaaccggaaaagtggaattcgaggtcagcgctgatctgatgcaccatcaacggcggattatcggctcctgggtgaccagtctgttccatatggaaaaatgcgcccacgatttgactgactggaagctgtggccgcgtaacgccattacccatcgcttctcgctagaacaggcaggtgatgcctatgtgctgatggcgagcggcaaatgcgggaaagttgtgattaacttcccggattaa

SEQ ID NO: 42623 - protein, 364 aa, Shigella flexneri 2a str. 2457T
MKINRIVNEGFMKTMLAAYLLGNSTVDLREVAVPTPGINQVLIKMKSSGICGSDVHYIYHQHRATAAAPDKPLYQGFINGHEPCGQIVAMGQGCRHFKEGDRVLVYHISGCGFCPNCRRGFPISCTGKGKAAYGWQRDGGHAEYLLAEEKDLILLPDALSYEDGAFISCGVGTAYEGILRGEVSGSDNVLVVGLGPVGMMAMMLAKGRGAKRIIGVDMLPERLAMAKQLGGMDHGYLATTEGLPQIIAELTHGGADVALDCSGNAAGRLLALQSTADWGRVVYIGETGKVEFEVSADLMHHQRRIIGSWVTSLFHMEKCAHDLTDWKLWPRNAITHRFSLEQAGDAYVLMASGKCGKVVINFPD

SEQ ID NO: 42624 - DNA, 1020 bp, Nasonia vitripennis
  CDS (1)..(1020)
atggagtccctgagctttgacgcgtcgaggaagagcctcacgttgcagaaggcctcgattcccaagcccaaggatgacgaggtcctcatcagggtagcctattccggcatttgcggcaccgatcttcacatactcgagggcacattcccgtgcaaacaaaacgagcccttgataccaggccacgagttctgtggaaccgtcgaggcggtaggcgtcagcgtgaagaacttcaaagtcggccagagggtcaccgtcgacccgaacagcggctgcagcatgtgcgacgactgtcacgtgggctgctatcacctttgcgtcaacggtggtgtcaacagcaccatcggaatcttcaggaacggcggatgggctactcactgttgtgtccccgaagttcaagtataccatgtgcctgagggagtagaaatggaacaagccgctttgagcgaaccactgtcgtgtcttgcacacgggtggaagagaatgaatcctattcacgtgggccagaaagtgctcgtgctgggcgcgggtatcattggtctactctggtcaagcattcttcaccttcatggtctcaggaaaaccgtcacagtatccgagccgcaggacaaaaggaaggaaatggccaagaagatgggtctggattaccaagtgactagcccagctgagcttaaaggtaacgagtacgacgttattgtggattgcagtggaagtgggcccgccatggagtcagcgattcctcttctggccagaggtggacgcttttgcatcttcggagtcgccgatccgaaggtcaacattaagataaacccgtacgaaatgtacaagaaagagttaactatttatggagtcaatattaatccattctcgttctcgagaggcattggtctgctgaaggccatggccagttcctatctacagtacgacaatctagggatcaaggttttcaagctatccgagtacaatgtagctctggacgctctcaagaatggtacgataagcaaggctgtgtttaaattgtaa

SEQ ID NO: 42625 - protein, 339 aa, Nasonia vitripennis
MESLSFDASRKSLTLQKASIPKPKDDEVLIRVAYSGICGTDLHILEGTFPCKQNEPLIPGHEFCGTVEAVGVSVKNFKVGQRVTVDPNSGCSMCDDCHVGCYHLCVNGGVNSTIGIFRNGGWATHCCVPEVQVYHVPEGVEMEQAALSEPLSCLAHGWKRMNPIHVGQKVLVLGAGIIGLLWSSILHLHGLRKTVTVSEPQDKRKEMAKKMGLDYQVTSPAELKGNEYDVIVDCSGSGPAMESAIPLLARGGRFCIFGVADPKVNIKINPYEMYKKELTIYGVNINPFSFSRGIGLLKAMASSYLQYDNLGIKVFKLSEYNVALDALKNGTISKAVFKL

SEQ ID NO: 42626 - DNA, 1134 bp, Apis mellifera; identical to SEQ ID NO: 14388
  CDS (1)..(1134)

SEQ ID NO: 42627 - protein, 377 aa, Apis mellifera; identical to SEQ ID NO: 14389

SEQ ID NO: 42628 - DNA, 1092 bp, Debaryomyces hansenii CBS767
  CDS (1)..(1092)
atgacacctaacccatccttagtattaaataaaatcaacgatatttcatttgagaaatatgatgctccagaaatcacggaacctaatgatgtcattgtcgaggtcaaaaagactggtatttgcggttcagatattcactactatacccacggagcaattggtgggtttatcttgaaatctccaatggtattgggccatgaatcctcagggattgtttctgccgttggaaaaggtgttacatcgttgaaagtaggcgacaaggttgcaatcgaaccaggtgtgccatccagacacagtgacgcatacaaaggcggtcattacaatttatgccctcatatggtttttgctgccactcctaactcggaagatggaggcgtcaatcctcctggtactttatgtaaatactacaagagtcctgaagatttcttggtcaaattgccagaccatgtttctttggaattaggtgcattagttgaaccattgactgttggtgtccacgccgctaagttgggatccatcaagtttggtgatgtcgttgttgtatttggggctggtcctgttggtttgttggctgctgcagttgccaccaagtttggcgcaactaaagtcatggtggtcgatgttttcgaatcgaaattggaaatggctaaacaaattggtgttgcaactcacaccttcaaccctaagctgggaagcaataaggatttagttgctgctttcgacaacactgaaccttccgttgtaatggaatgtagtggtgcggaaccatgcattaagagtgctgttgacatcttgagagttggcggacgttatatccaaatcggtaatagtgcgaagccggtttctttcccaatgacagagtttgctactaaagaattgactttatttgggtcatttagatatggcttcaatgactacaagaccagtgtagctatcttggacgaaaattatagaaatggaaaagaaaacgcagccatcgactttgaaagcttgattactcatagatttaaattcgatgatgctattgacgcttatgaccttgttaagggtggtaatggctgtgtcaaatgtatcatcagtggtcccgaatag

SEQ ID NO: 42629 - protein, 363 aa, Debaryomyces hansenii CBS767
MTPNPSLVLNKINDISFEKYDAPEITEPNDVIVEVKKTGICGSDIHYYTHGAIGGFILKSPMVLGHESSGIVSAVGKGVTSLKVGDKVAIEPGVPSRHSDAYKGGHYNLCPHMVFAATPNSEDGGVNPPGTLCKYYKSPEDFLVKLPDHVSLELGALVEPLTVGVHAAKLGSIKFGDVVVVFGAGPVGLLAAAVATKFGATKVMVVDVFESKLEMAKQIGVATHTFNPKLGSNKDLVAAFDNTEPSVVMECSGAEPCIKSAVDILRVGGRYIQIGNSAKPVSFPMTEFATKELTLFGSFRYGFNDYKTSVAILDENYRNGKENAAIDFESLITHRFKFDDAIDAYDLVKGGNGCVKCIISGPE

SEQ ID NO: 42630 - DNA, 1212 bp, Debaryomyces hansenii CBS767
  CDS (1)..(1212)
atgatggctttgcaatggttcggaaaagaagatgtcgctgtcggcaaggtgcctatcccggccataactaatgacacagacgtcattgccaaagtaacaggtaccacaatctgtggatccgatttgcacctctatcatggagagataatggaattgaaaaaaggtgatgtgcttgggcatgaatggtgtggaattatagaggatgttggcccgagtgttcagaacttcaaaaagggggatagagttgtttctagttttcaaattgcttgtggcgaatgcttttattgcagagataacttatcgtctatgtgcgacaaaacaagcacatcaagagtgcaagaactgatgtatgggacggctgtcagtgggatctatggctactcccattttactggtggttatgctgggggacaggcggagtacgtccgtgctccgcgtgctgattacaacttattgaagatacctgataaagtgcctgatgagaaggcattatacttatctgacattgttcctacatcctatcatagcgtggtttgtgccgatgttaagaaaggagataccgtagctatttggggcttaggaccaattgggttatgtgccttaagatgggcacagcttagaggtgctaagagggttgttggtattgataatgttgaaagtcgcttggctaaagctcaatccatgggatgcaaggttcttaacttcaaagatatagatgtagttaaagaaattcttaacattgtgccaggaggagtagactcgagtattgatgctgccggatttcgttacgcaaacaagttgacgcataatattcagcggactcttggacttgagacagatacgtctgaggttataaacgaggccataaaagctaccagaaagtttggaactattgctttggtggcagattacgcaggattcgcaaaccagtttttaattgggggtttaatggaaaaaggtatcaccttgagaggatgtggacaggctcctgtacagaaatattggcatgagctattggagaaggttgaggctggtcttttcgatcctacatttattttgactcataggtttccaatcgaagagtttaaggaattatatcaagctttcgataaaaagaaaggaggaatcggaaaggtctttgttcagactagattttcttcacctccttctgaaggaacaccttctttgtcacatgtaaatgaacttttgtga

SEQ ID NO: 42631 - protein, 403 aa, Debaryomyces hansenii CBS767
MMALQWFGKEDVAVGKVPIPAITNDTDVIAKVTGTTICGSDLHLYHGEIMELKKGDVLGHEWCGIIEDVGPSVQNFKKGDRVVSSFQIACGECFYCRDNLSSMCDKTSTSRVQELMYGTAVSGIYGYSHFTGGYAGGQAEYVRAPRADYNLLKIPDKVPDEKALYLSDIVPTSYHSVVCADVKKGDTVAIWGLGPIGLCALRWAQLRGAKRVVGIDNVESRLAKAQSMGCKVLNFKDIDVVKEILNIVPGGVDSSIDAAGFRYANKLTHNIQRTLGLETDTSEVINEAIKATRKFGTIALVADYAGFANQFLIGGLMEKGITLRGCGQAPVQKYWHELLEKVEAGLFDPTFILTHRFPIEEFKELYQAFDKKKGGIGKVFVQTRFSSPPSEGTPSLSHVNELL

SEQ ID NO: 42632 - DNA, 1041 bp, Tribolium castaneum
  CDS (1)..(1041)
atggaagctctacgctacaccgccaaaaccaaaaaacttgagttggctaaaactgaagtccctaaaatcactagcccggacagtattttggtcaaagtggcttattctgggatttgcggaaccgacttacacataatccagggggaattcccgtgcaacccggaccgcactttcaccctaggccacgagttttcgggcactgtggtcgaagtgggccccaaagtgaccaattttaaggccggtgaccgggtttcagtcgatccgaacagtggttgcaaatgttgcaagttctgccattcggggaaaccccacttttgcaaagtggggggaattaacaacaccatcgggatttaccgagacggtgggtgggcgaattacgtggtctgccccgaggagcaggtgcacaaactccctgacagcatcaccctagagcaagccgctttgaccgaaccggtgtcgtgtttggcccacggctgggacatcgtgagccccatccacgtcggggataaaatcctagtgacgggggcggggattattgggaatttgtgggtttgcgccttgcatctgcaaggtcacaggaatgtcacagtttccgaaccgaatgcctcacgattggagatgttgaaaaagttgaatacgggttacaatttaattacacctgatcagttgaagcggaatcaagccgccgatccgaattacctcttcgacgtggtcattgattgtagtgggtttcccccagctgtggagcacgctgtctcgcttttgaattctggcgggaaattgtgtatttttggggtggcgcccccgcatggtaaaatcacgattgctccgtttgatatttacatgaaggagatgaaaattttcggtgttaatattaacccgtttagttttcccaaatcgttgggcttgctggaggcaatgggtgacagatacatgaattataatcttttgggaattaggacgtttgctctgagtcagtaccaggaggccattgagtgtctgaagaagggcacgattgccaaggcagtatttaagctgtga

SEQ ID NO: 42633 - protein, 346 aa, Tribolium castaneum
MEALRYTAKTKKLELAKTEVPKITSPDSILVKVAYSGICGTDLHIIQGEFPCNPDRTFTLGHEFSGTVVEVGPKVTNFKAGDRVSVDPNSGCKCCKFCHSGKPHFCKVGGINNTIGIYRDGGWANYVVCPEEQVHKLPDSITLEQAALTEPVSCLAHGWDIVSPIHVGDKILVTGAGIIGNLWVCALHLQGHRNVTVSEPNASRLEMLKKLNTGYNLITPDQLKRNQAADPNYLFDVVIDCSGFPPAVEHAVSLLNSGGKLCIFGVAPPHGKITIAPFDIYMKEMKIFGVNINPFSFPKSLGLLEAMGDRYMNYNLLGIRTFALSQYQEAIECLKKGTIAKAVFKL

SEQ ID NO: 42634 - DNA, 1053 bp, Tribolium castaneum
  CDS (1)..(1053)
atggccaccatggaagccgtccaattctcctttacagaaagaaacctcgcattaaacaaagtccctatccccgaggtcagaaatcccctagatgtccttatcaaagtggcttatgccgggatctgcggcaccgacttgcacattctagctggcgaatacccctgcagacaaatgggggctataaccctgggccatgaaataagtggcaccgttgtggaagttggttcagatgtggtccatttccgcaaagaggacaaagttgcaattgaccccaacagcggttgcaaacgttgtaccttttgccacgcggggaaaccccatttttgcaaattaggctgcggcactaacaccatagggatattcaaagatggggggtgggcacaatatgtgctctgccccgaggaacaggtgcacaagttgccccagaacctaaccctcgaacaagcggttttggcggagcccctgtcgtgcatcgcccatggctgggacatcactagccccctcattgtcggcgaaaaaatcctccttttgggggccggcatcactggggctttgtgggcctgcgttttgcacctccaaggtcacaggactgtcgtcgtttcggaacctaacaccacaaggctcgaaatgatgcgcaaattaaataccaactacaagatggtgacacccgaacagttgaagaaaaatgcgcaaaaggacccagaatggtacagttttgacgtggtgattgattgtagtggggatgtgggggctatagagcagggattttcgcttatgaactcggggggcaagttggtggtgtatggggtggcgccgcccgcgaataaaataagcatatctccctacgacatattccgtaaagaaatcacaatcgtgggggttcgaacaaacccctacacctttaaaaaggccttggatttaatcgcatcccttggcagcagatatttgagtcacactgcgcttggagtcaaacctttcctcctcagtgagtatcaagaagcgattgatacgttgaaaaaaggcacaataatgaaagcggttttccggatgtga

SEQ ID NO: 42635 - protein, 350 aa, Tribolium castaneum
MATMEAVQFSFTERNLALNKVPIPEVRNPLDVLIKVAYAGICGTDLHILAGEYPCRQMGAITLGHEISGTVVEVGSDVVHFRKEDKVAIDPNSGCKRCTFCHAGKPHFCKLGCGTNTIGIFKDGGWAQYVLCPEEQVHKLPQNLTLEQAVLAEPLSCIAHGWDITSPLIVGEKILLLGAGITGALWACVLHLQGHRTVVVSEPNTTRLEMMRKLNTNYKMVTPEQLKKNAQKDPEWYSFDVVIDCSGDVGAIEQGFSLMNSGGKLVVYGVAPPANKISISPYDIFRKEITIVGVRTNPYTFKKALDLIASLGSRYLSHTALGVKPFLLSEYQEAIDTLKKGTIMKAVFRM

SEQ ID NO: 42636 - DNA, 1071 bp, Tribolium castaneum
  CDS (1)..(1071)
atggcaccaaaggataacttaacagccgttttgtacggcatcaacgacatgcgacttgaacaaagaccaatccctgtccccaaaccaaatcaagtacttcttaaaatggaagtcgtgggtatttgtggctccgatgtccattacttggtcagtggcagaattggcccttttgtggttacagatcccatggttataggacacgaagcctccggaacggtaatacaagtcggacgcgacgtcaaaaatcttaaaccaggtgatcgtgtggctatcgagcctggaataacttgccgcacttgtgctgactgcaaaagcggcaattaccacctgtgcaaggacatgattttttgtgcaactccgccagttgatgggaatttgactagatattacgtccacgatgccgatttttgccacaagttgcccgataacatggacttggaagagggtgcccttatggagcccctctccgtgggtgtccacgcgtgcaggagggccggagtgcgcataggttccgtggttttggttctaggtgctggcccgattggtctagtttcaatgcttacagccaaggcaatgggtgcttccaaagtcataattacagatattgtgggccaccgattgcaaaaagctaaagagttaggtgctgatttcaccctacaaattggtcaaaacacgactgaagaagaaatcgtgtcagagattaaagcaaaattgggggaagacccgaatatcactttggaatgcacgggggccgaacaatgcgtccgagttgctttacaagtcacaaaatccggaggtactgttattttggtaggtttagggaaatttgaaatgaccgtgcctctggcgggtgctttggtacgcgaagtcaacatacgtggagtgttccgatacaataatgattatccgatcgcaatcgaaatggtcaaaacaggcaaagttaatgtgaaaccactaataacgcaccactataaaatggaagatacgctgaaagcttttcacactgctaagacaggcgaaggaaatccgatcaaggtgttaatacacgcgaatcctgactggaaaccgtaa

SEQ ID NO: 42637 - protein, 356 aa, Tribolium castaneum
MAPKDNLTAVLYGINDMRLEQRPIPVPKPNQVLLKMEVVGICGSDVHYLVSGRIGPFVVTDPMVIGHEASGTVIQVGRDVKNLKPGDRVAIEPGITCRTCADCKSGNYHLCKDMIFCATPPVDGNLTRYYVHDADFCHKLPDNMDLEEGALMEPLSVGVHACRRAGVRIGSVVLVLGAGPIGLVSMLTAKAMGASKVIITDIVGHRLQKAKELGADFTLQIGQNTTEEEIVSEIKAKLGEDPNITLECTGAEQCVRVALQVTKSGGTVILVGLGKFEMTVPLAGALVREVNIRGVFRYNNDYPIAIEMVKTGKVNVKPLITHHYKMEDTLKAFHTAKTGEGNPIKVLIHANPDWKP

SEQ ID NO: 42638 - DNA, 1071 bp, Tribolium castaneum
  CDS (1)..(1071)
atggcagctaaggataatttaacagccgtcctttacggcatcgacgacatgcgtttggaacaacgaccgattcccgtccccaaagacaaccaagtcctgcttaaaatggaatcagtcggaatttgcggctcagacgtgcattatttagtccagggccggatcgggcctttcatcgtcgaaaaacccatgataatcggtcacgaggcgtccggaacggtcgttttgtgcggcaaaaatgtcacctccttgaaacccggcgaccgcgtggccattgagcccggcgttggctgcaggatgtgctctttctgcaaagagggcaactaccacctttgcctcgacatgcaattttgcgccacgccgccagtggacggcaacctctccagattctacgtccacgacgccgatttctgcttcaaacttccggacaatgtgagccttgacgaaggcgccctgatggagccgctggcggtgggcgtgcacgcgtgtaagcgcgcaaatgtgcgcttcggcgacgtggttttgattctgggggctgggcccattgggcttgttacgcttttggctgctaaggccatgggggccaccaaggccctaatcactgacattgttgacatacgattaaccaaagccaaagaactgggggctgactatactttgaaaattgaaaagaacatgaccgaggaagagataataaaaaaaattaaggccctgttaggggaagaacctaacgttagtcttgactgcactggtgccgaacaatgtgttagggttgctgtccaggcaaccaaaagtggaggtgtggtcacgttgattggtttaggagctttcgaaatgaatttgccgttaacgggcgctcttattcgagaagttgacattcgaggtgttttccgctataataatgattatccgactgctattgaaatggtgagaagtggaaaagcaaatgttaaatctttgattacgcatcactacaagattgaagatactttgaaagcgttccatacggcgaaaacaggcgaaggaaatccgattaaagtaatgattcatgccaatccagaatggaaaaaataa

SEQ ID NO: 42639 - protein, 356 aa, Tribolium castaneum
MAAKDNLTAVLYGIDDMRLEQRPIPVPKDNQVLLKMESVGICGSDVHYLVQGRIGPFIVEKPMIIGHEASGTVVLCGKNVTSLKPGDRVAIEPGVGCRMCSFCKEGNYHLCLDMQFCATPPVDGNLSRFYVHDADFCFKLPDNVSLDEGALMEPLAVGVHACKRANVRFGDVVLILGAGPIGLVTLLAAKAMGATKALITDIVDIRLTKAKELGADYTLKIEKNMTEEEIIKKIKALLGEEPNVSLDCTGAEQCVRVAVQATKSGGVVTLIGLGAFEMNLPLTGALIREVDIRGVFRYNNDYPTAIEMVRSGKANVKSLITHHYKIEDTLKAFHTAKTGEGNPIKVMIHANPEWKK

SEQ ID NO: 42640 - DNA, 1155 bp, Tribolium castaneum
  CDS (1)..(1155)
atgctgcgatcatgtgccaaaattttcccaaaaatttatttgcggacattccaggccaggtttagttgctgtagcaaatccagtcagaaaaataacttagctgcggtcctgcacggcattggagatttacgcttggaaaatagacccatgcccatcattaaagacaatcaggtgctccttcaaatggaaacagtgggcatttgtggctcagacgtccattaccttgtggaaggccgaattggtccgtttgtggtaaaaaacccaatggtcattgggcacgaggcttccggaaccgtcctcgaaatcggaaaaaaagtcaaaactcttaaaccaggtgaccgagtggcaatcgaaccgggggttggttgtcgggtttgcacattttgcaaagacggtagatatcacctgtgtcccgagatggcattttgtgcaactcctcccatcgatggaaacttgtgcagattttttgcccacgatgcagatttttgtttcaaattacccgagcacttgactctcgatgagggtgctttaatggaacccttatctgtcgctgtgcactcttgcaagcgggcaaatgttcgtttaggggacgtggttctagtgatgggagctggtcccattggactcacttccctgcttgcagcaagagcttatggtgcctctgctgaatgcgtttctaaagatttggcagaacatcgcttgaataaagcgagagaacttggagctgattgcgtccttaaagttgagaaaaatatgcgagaagaagagcttgtgaaggagattaaatgcttgctgagggtggacccaaatattacaatagaatgtacaggggaggaatctagcattagagcttccctccaggttacaaaaactggaggtgttgtggttttagtcggtttgggaaaatttgacctaaatctaccaatttttcccttatttcgggaggttgatgttagagggatatttcgctataataatgactatccgcaagctatagaaatggtgcagagtggaaaagcgaatgtgaagcccctaattacacatcattttgcaatggaagacacggttaaagcgttcgagaccgcaagaactggggcagggaatccaattaaaatcctgattcatgccaatccagactggaagatttgtgaataa

SEQ ID NO: 42641 - protein, 384 aa, Tribolium castaneum
MLRSCAKIFPKIYLRTFQARFSCCSKSSQKNNLAAVLHGIGDLRLENRPMPIIKDNQVLLQMETVGICGSDVHYLVEGRIGPFVVKNPMVIGHEASGTVLEIGKKVKTLKPGDRVAIEPGVGCRVCTFCKDGRYHLCPEMAFCATPPIDGNLCRFFAHDADFCFKLPEHLTLDEGALMEPLSVAVHSCKRANVRLGDVVLVMGAGPIGLTSLLAARAYGASAECVSKDLAEHRLNKARELGADCVLKVEKNMREEELVKEIKCLLRVDPNITIECTGEESSIRASLQVTKTGGVVVLVGLGKFDLNLPIFPLFREVDVRGIFRYNNDYPQAIEMVQSGKANVKPLITHHFAMEDTVKAFETARTGAGNPIKILIHANPDWKICE

SEQ ID NO: 42642 - DNA, 1029 bp, Burkholderia vietnamiensis G4
  CDS (1)..(1029): transl_table=11
atgaaagcactggcaaagctcgaacgcgctccgggtctcacgttgacgcgcgtgaagcgtcccgaggtcggacacaacgacgtgctgatcaagatccgccgcacggcgatctgcggcaccgacatccatatctggaagtgggacgactgggcgcagaagacgatccccgtgccgatgcatgtcggccacgaatacgtcggcgagatcgtcgagatggggcaggaagtgcgcggcttcgcgatcggtgaccgcgtgtccggcgaagggcacatcacctgcggtttctgccgtaactgtcgtgcggggcgtcggcatctgtgccgcaataccgtcggcgtcggcgtgaaccgcgagggcgcgttcgccgaatatctggcgattcccgcattcaacgcgttcaagattccgccggagatctccgacgatctcgcgtcgatcttcgatccgttcggcaacgcgacgcatacggcgctgtcgttcaacctcgtcggcgaggacgtgttgatcaccggcgcggggccgatcggcatcatggccgtggcaatcgccaagcatgtcggcgcgcgcaatgtcgtgatcaccgacatcaacgactatcggctggagcttgcgcgcaagatgggcgcgacgcgtgctgtcaacgtcgcgcgcgagtcgctgcgcgacgtgatggccgagctgcgcatgactgaaggcttcgatgtcgggctcgagatgtcgggcgtgccgagcgcattcacgagcctgctcgaagcgatgaatcacggcggcaaggtcgcgctgctcggcattccgcccgcgcagacggcaatcgactggaatcaggtgatcttcaaggggctcgagatcaagggcatctacggccgcgaaatgttcgagacctggtacaagatggtcgcgatgctccagagtgggctcgacctgtcgccgatcgtcacgcatcgctttgccgtcgacgattacgagaaaggcttcgccgcgatgctgtccggtgaaagcggcaaggtgattctcgactggaccgcgtga

SEQ ID NO: 42643 - protein, 342 aa, Burkholderia vietnamiensis G4
MKALAKLERAPGLTLTRVKRPEVGHNDVLIKIRRTAICGTDIHIWKWDDWAQKTIPVPMHVGHEYVGEIVEMGQEVRGFAIGDRVSGEGHITCGFCRNCRAGRRHLCRNTVGVGVNREGAFAEYLAIPAFNAFKIPPEISDDLASIFDPFGNATHTALSFNLVGEDVLITGAGPIGIMAVAIAKHVGARNVVITDINDYRLELARKMGATRAVNVARESLRDVMAELRMTEGFDVGLEMSGVPSAFTSLLEAMNHGGKVALLGIPPAQTAIDWNQVIFKGLEIKGIYGREMFETWYKMVAMLQSGLDLSPIVTHRFAVDDYEKGFAAMLSGESGKVILDWTA

SEQ ID NO: 42644 - DNA, 1029 bp, Legionella pneumophila subsp. pneumophila str. Philadelphia 1
  CDS (1)..(1029): transl_table=11
atgacaatgaaatcattggttaaagcaaaaaaagagcctggaatttggatgcaggatattcctgttcctgaatatggagtaaacgatgttttaataaaaattaaaaggactgcaatttgtggtacagatatccatatttattcctgggatgaatgggcgcaagccacaattcctgttcctatgaccgtagggcatgaattttatggtgaaatagtagaggttggaaaagaagtacaaggtttgaaagttggacagagagtttctggtgaaggtcatattacctgtggtttttgcagaaattgtcgtgccggcaagcgtcatttatgtcgtaataccctgggagtgggggtgaatcgaccaggatgctttgctgagtatctggcgcttcctgctaccaatgtcatcgctctccctgacaacattacagaagagcaagcggctattctcgatccttttggaaatgctgctcattgtgcattggcatttgatgtagtaggcgaagacgttttgattactggtgcaggccccataggaataatggccgcagccatcgtaagacatattggcgcacggcatgttgttatcaccgatgttaacgatcatcgattggaactggccaggcaaatgggtgtcagccgagcggttaatgtcaaataccaaaaattaagtgatgtggctaatgagctaggaatgcttgagggttttgatgttggtctggaaatgtccgggaaccctatggcattaaacgatatgatgaaagcgatgaatcatggtggtcatgtggctttattgggtatcccaccacaagaaacccctatagattggaaccaggttatctttaaaggattggttattaagggtatttatggtcgagaaatgtttgaaacctggtataagatgattgctatgttacagagcggtttaaatatttctcccgttattactcataatttcccagtagatgaatatcagcacgcatttcaaattatggcatcgggccagtcagggaaagttatactgaactggtag

SEQ ID NO: 42645 - protein, 342 aa, Legionella pneumophila subsp. pneumophila str. Philadelphia 1
MTMKSLVKAKKEPGIWMQDIPVPEYGVNDVLIKIKRTAICGTDIHIYSWDEWAQATIPVPMTVGHEFYGEIVEVGKEVQGLKVGQRVSGEGHITCGFCRNCRAGKRHLCRNTLGVGVNRPGCFAEYLALPATNVIALPDNITEEQAAILDPFGNAAHCALAFDVVGEDVLITGAGPIGIMAAAIVRHIGARHVVITDVNDHRLELARQMGVSRAVNVKYQKLSDVANELGMLEGFDVGLEMSGNPMALNDMMKAMNHGGHVALLGIPPQETPIDWNQVIFKGLVIKGIYGREMFETWYKMIAMLQSGLNISPVITHNFPVDEYQHAFQIMASGQSGKVILNW

SEQ ID NO: 42646 - DNA, 1044 bp, Silicibacter pomeroyi DSS-3
  CDS (1)..(1044): transl_table=11
atgcgatccaacacgatgaaagcgctggagaaatccaagcctgaggaagggttgtggatggtgcaggcaccggtgcccgagatcggccctgacgatgtgctgatcaagatcaagaagaccggcatttgcggcaccgatatccatatctggaactgggacgaatgggccgcgcacacggtgccggtgccgatgatcaccggccatgaatttgcgggcgagatcgtcgagctgggccgtgatgtcaccggcctcagcatcggtcagcgggtctcgggcgaggggcatctgatcggcaccgaaagccggcagagccgggcaggcaagttccacctggacccgggcacgcgcgggatcggtgtcaacgtgcagggggcctttgcgcaatatctgcgactgcccgccttcaacgtggtgccgctgcccgaggatatcccggacgagatcggcgccatcctcgacccgctgggcaatgcggtgcacaccgcgctgagtttcgacctcttgggcgaggatgtgctgatcaccggtgccgggccgatcggcatcatggcggcggcggtggccaaacatgccggcgcccgccatgtggtgatcaccgatatcaacgccgaccggctgaaactggcgcagcacgtggtgcccagggcgcggaccgtcgatgtcacgcgcgaggatctgggcgacgtggtccacgagcttggcctgaaacaggggttcgatgtcgggctggaaatgtcgggctcgcaagcggcgctcgaccagatggtcgaggcgctggtgatgggcggcaagatcgcgttgctgggtattccgccgggcaagtcgccggtggactggtcgcgcatcgtgttcaaggcgatcaccatcaagggtgtctatggccgcgagatgttcgagacctggtacaagatgatcgccatgttgcagaacgggctggatgtgagccgggtgatcacccatcgttttggcgtcgatgagttccgcgaagggtttgcggcgatgaaatcgggcctcagcggcaaggtggtgctggactggacctga

SEQ ID NO: 42647 - protein, 347 aa, Silicibacter pomeroyi DSS-3
MRSNTMKALEKSKPEEGLWMVQAPVPEIGPDDVLIKIKKTGICGTDIHIWNWDEWAAHTVPVPMITGHEFAGEIVELGRDVTGLSIGQRVSGEGHLIGTESRQSRAGKFHLDPGTRGIGVNVQGAFAQYLRLPAFNVVPLPEDIPDEIGAILDPLGNAVHTALSFDLLGEDVLITGAGPIGIMAAAVAKHAGARHVVITDINADRLKLAQHVVPRARTVDVTREDLGDVVHELGLKQGFDVGLEMSGSQAALDQMVEALVMGGKIALLGIPPGKSPVDWSRIVFKAITIKGVYGREMFETWYKMIAMLQNGLDVSRVITHRFGVDEFREGFAAMKSGLSGKVVLDWT

SEQ ID NO: 42648 - DNA, 1056 bp, Staphylococcus aureus subsp. aureus COL
  CDS (1)..(1056): transl_table=11
gtgaaagctttagtaaaaacaagagaaggacatggcaacttagaacttcttgataaagaagttgcaacaccgctagatgataaagtaaagattaaagtacattatgcaggaatttgtggcacagatattcatacttatgaaggtcattataaagttaattttccagtgacattaggtcatgaattttctggtgaaatcgttgaagttggagcagacgttaaagattttaaagttggtgaccgtgtcacatctgaaacgacattctatgtttgtaatgagtgtgaatactgtaaatcaaaagactataatttatgcaaccatcgaaaaggtattggaacacaagttgatggcgcatttactaattatgtcattgcacgtgaagaaagtttgcatcatattccagacgaagtatcgtatcagtctgcagctatgacagaaccattagcatgtgcacatcatggcgtttctaagattcaagtcaattcaggcgatgtagcagttgtaatgggacctgggccaatcggattacttgtagcacaagtgttaaaaagtaaaggcgcaactgttgtggtaactggattggacaatgacaaagtcagattagataaagcagaagcattgcacatggattatgtagtcaatttacaacaaacagacttaaaaacgtatatcaatggaattacagacggttacggtgcagatgttgttgttgaatgttcaggtgcagttccagcagcacgacaaggtttggatattttacgcaaaaaaggtttctacagtcaaataggtatttttaaggatgctgaaattccatttgatatggaaaaagtgattcaaaaagaaataacagttgttggtagtagaagtcaaaagccagcagattgggaaccttcattgcaacttatggcggatggtttagtaaatgctgaagctttggtgacaaaaatatatgatatttcgaaatgggacgaggcgtatcaacatttaaaatccggcgaaggtattaaagtattacttaagccgctcgatttagatgaaaatgaaggagagaattaa

SEQ ID NO: 42649 - protein, 351 aa, Staphylococcus aureus subsp. aureus COL
MKALVKTREGHGNLELLDKEVATPLDDKVKIKVHYAGICGTDIHTYEGHYKVNFPVTLGHEFSGEIVEVGADVKDFKVGDRVTSETTFYVCNECEYCKSKDYNLCNHRKGIGTQVDGAFTNYVIAREESLHHIPDEVSYQSAAMTEPLACAHHGVSKIQVNSGDVAVVMGPGPIGLLVAQVLKSKGATVVVTGLDNDKVRLDKAEALHMDYVVNLQQTDLKTYINGITDGYGADVVVECSGAVPAARQGLDILRKKGFYSQIGIFKDAEIPFDMEKVIQKEITVVGSRSQKPADWEPSLQLMADGLVNAEALVTKIYDISKWDEAYQHLKSGEGIKVLLKPLDLDENEGEN

SEQ ID NO: 42650 - DNA, 1026 bp, Colwellia psychrerythraea 34H
  CDS (1)..(1026): transl_table=11
atgaaatctttagctaaattaaaagcagaaccgggcatttggttaacgcgaaccgaaaaaccaaaactaggtcataatgatctgctaatcaaaattaaaaaaacggccatttgtggtacagatatccacatttataattgggatgaatgggcacaaaaaacagtgcctacgcctatggttgttggacatgagtacgcaggtgaagtggttggtatcggccaagaagttaaaggctttactttaggtgaccgggtttctggtgaaggccatattacttgtggtcattgccgtaattgtcgtggtggcagaactcatttatgtcgtaataccgttggtgttggggtcaatcgtgcggggtcatttgcagagtatctagtgatacctgcatacaatgcctttaaattacctgacgaaatttctgatgatttagcgtcaatttttgacccctttggtaatgcagttcataccgcattgtcatttgatttagtgggtgaggatgtattaatcaccggtgctggccctattggtattatggctgcagccgttgctaaacatgtaggtgctcgtcatgtcgttattaccgatattaacgaatatcgtcttgaccttgcaagaaaaatgggcgctactcgtgctgttgatgtgagtaaagaaagcttaaaagatgtcatgaccgatttggggatgaccgagggttttgatgttggtatggaaatgtcaggtgttccaatggcattcactagcatgttagaaagcatgaataatggtggtaaaattgccatgctgggtattcctggtagcgatatggctattgattggagccaagttatttttaaagggcttaccattaaaggtatttatggtcgtgaaatgttcgaaacttggtataagatggcaagtttgattcaatctggtttagatctcaccccgattattacccatcactacaatatcgatgactttcagcaaggctttgatatgatgcgttctggtcaatctggcaaggtcattttagattggacttaa

SEQ ID NO: 42651 - protein, 341 aa, Colwellia psychrerythraea 34H
MKSLAKLKAEPGIWLTRTEKPKLGHNDLLIKIKKTAICGTDIHIYNWDEWAQKTVPTPMVVGHEYAGEVVGIGQEVKGFTLGDRVSGEGHITCGHCRNCRGGRTHLCRNTVGVGVNRAGSFAEYLVIPAYNAFKLPDEISDDLASIFDPFGNAVHTALSFDLVGEDVLITGAGPIGIMAAAVAKHVGARHVVITDINEYRLDLARKMGATRAVDVSKESLKDVMTDLGMTEGFDVGMEMSGVPMAFTSMLESMNNGGKIAMLGIPGSDMAIDWSQVIFKGLTIKGIYGREMFETWYKMASLIQSGLDLTPIITHHYNIDDFQQGFDMMRSGQSGKVILDWT

SEQ ID NO: 42652 - DNA, 1179 bp, Anabaena variabilis ATCC 29413
  CDS (1)..(1179): transl_table=11
atgaaagcagtttgctggcacgggacaaatgatgtcagggtagaaactgtacccgatccaaaaattcttaacccgcgcgacgcaattattaaaattacatctaccgctatttgtgggtctgatttacatatatataatggctatattcccacaatgcaaagtggcgatatccttggtcatgaatttatgggggaagttgtcgagttaggtagtgctgtaaaaaatgtgaaagtaggcgatcgcgtggttgtccctttcactatttcctgcggttcttgcttcttctgtcaacgggatttatggtctttgtgcgataactccaaccccaacgcctggatggtagaactgcaaatggggcattctccagcaggtttattcggctactctcatctatttggcggctatgctggtggtcaagcagaatacgcccgtgtaccttttgcagatgtcggtttactcaaaatccccgataatctaccagatgaacaagtattatttttaactgacatttttcctaccggctatatggcagcggaaaactgcaacatcaaaccaggcgatattgtggctgtgtggggttgtggccccgtcgggcaatttgctatcaagagtgcatatatgttgggtgcggaaagagttatcgcctttgaccgcatccctgaacgcctacaaatggctaaagaacaatgtaatgcggaagtcctcaattacgaagaggtaaacattggggaagcactgaaagaaatgactggtggacgcggccctgatgcttgtatagatgcggtgggaatggaagcccacggtacagatttgatggctttctacgaccaagtaaagcaagctgtaaggctagaaacagacagaccaacagcattacgacaagtcattgtgtctgcggctaaaggcggtcatgtttccctggctggtgtatatggcggctttctagacaaaatcccgatgggttcagcaatgaataagggcttaactttcaagatgggacaaactcatgtgcataaatacttgaggcctttactagaacgcattcaaaacggtgaaattgacacctcatttgtcatcacccacaccctccccctagaacaagcaccccacggttacgaaatttttaagcacaaaaaagataactgcatcaaagttgtactcaaaccctcaggtaattaa

SEQ ID NO: 42653 - protein, 392 aa, Anabaena variabilis ATCC 29413
MKAVCWHGTNDVRVETVPDPKILNPRDAIIKITSTAICGSDLHIYNGYIPTMQSGDILGHEFMGEVVELGSAVKNVKVGDRVVVPFTISCGSCFFCQRDLWSLCDNSNPNAWMVELQMGHSPAGLFGYSHLFGGYAGGQAEYARVPFADVGLLKIPDNLPDEQVLFLTDIFPTGYMAAENCNIKPGDIVAVWGCGPVGQFAIKSAYMLGAERVIAFDRIPERLQMAKEQCNAEVLNYEEVNIGEALKEMTGGRGPDACIDAVGMEAHGTDLMAFYDQVKQAVRLETDRPTALRQVIVSAAKGGHVSLAGVYGGFLDKIPMGSAMNKGLTFKMGQTHVHKYLRPLLERIQNGEIDTSFVITHTLPLEQAPHGYEIFKHKKDNCIKVVLKPSGN

SEQ ID NO: 42654 - DNA, 1026 bp, Rhodobacter sphaeroides 2.4.1
  CDS (1)..(1026): transl_table=11
atgcgggcactggtgaaggccaaggcggaaccgggcctctggatggaagagcggcccgtgcccgagatcggccccgacgaggtgctcatccgggtccgcaagacggggatctgcggcaccgatgtccatatctggaactgggacgactgggcggcgaagacggtgccggtgccgctcgtcaccgggcacgagtttgcgggcgagatcgtcgaggtgggccgcgacgtgcgcgacctcagcccgggccagcgctgctcgggcgagggccatctgatcggccaccattcgcggcaggtgcgggccgggcgcttccacctcgatcccgagacgcgcggcatcggcgtcaatgttccgggcgccttcgccgactatctgcggcttcccgccttcaacgtggtgccgctgcccgatgccatcgacgacgaggtgggggcgatcctcgatcccctgggcaatgccgtgcacacggcgctcagcttcgatctggtgggagaggatgtgctcgtgaccggcgcaggccccatcgggatcatggccgcggctgtggcgcggcatgtgggcgcgcgccatgtcgtcatcaccgacgtcaatgccgaccggttgcggctgtcaaccgaggtggccgatgtggtgccggtcaatgtggccaccgaggatctgcgctcggtgatgggccgactgaagatcgtgcagggcttcgacgtagggatggagatgtcgggcgcacccgcgggcttcgaccagatggtcgaagcgatggtgatgggcggtcgcatcgcgatgctggggatcccgcccggccgcagccccgtggactggagccggatcgtcttcaaggcgctgaccatcaagggcgtctacggccgcgagatcttcgagacatggtacaagatgatcgcgatgctggagaacggcctcgatatccggcgcgtcatcacccaccgctttcctgtggcggatttcgccgagggttttgccgccatgcgcagcggcgcgtcgggcaaggtggtgctggactggggctga

SEQ ID NO: 42655 - protein, 341 aa, Rhodobacter sphaeroides 2.4.1
MRALVKAKAEPGLWMEERPVPEIGPDEVLIRVRKTGICGTDVHIWNWDDWAAKTVPVPLVTGHEFAGEIVEVGRDVRDLSPGQRCSGEGHLIGHHSRQVRAGRFHLDPETRGIGVNVPGAFADYLRLPAFNVVPLPDAIDDEVGAILDPLGNAVHTALSFDLVGEDVLVTGAGPIGIMAAAVARHVGARHVVITDVNADRLRLSTEVADVVPVNVATEDLRSVMGRLKIVQGFDVGMEMSGAPAGFDQMVEAMVMGGRIAMLGIPPGRSPVDWSRIVFKALTIKGVYGREIFETWYKMIAMLENGLDIRRVITHRFPVADFAEGFAAMRSGASGKVVLDWG

SEQ ID NO: 42656 - DNA, 1029 bp, Burkholderia sp. 383
  CDS (1)..(1029): transl_table=11
atgaaagcactggcaaagctcgaacgcggccccggcctcacgctcacgcgcgtgaagcgtcctgaagtcggccacaacgacgtgctgatcaagatccgccgcacggcgatctgcggcaccgacatccatatctggaagtgggacgactgggcgcagaagacgattcccgtgccgatgcacgtcggtcacgaatacgtcggcgagatcgtcgagatggggcaggaagtgcgcggcttcgcgattggcgatcgcgtgtccggcgaaggccacatcacgtgcggtttctgccgcaactgtcgcgcggggcgccggcatctgtgccgcaacacggtcggtgtcggcgtgaaccgcgaaggcgcgttcgccgagtatctggcgattcctgcgttcaacgcgttcaagattccgccggagatctccgacgatctcgcatcgatcttcgatccgttcggcaacgcgacgcacacggcgctgtcgttcaacctcgtcggcgaagacgtgctgatcaccggcgcgggcccgatcggcatcatggccgtcgcgatcgcgaaacacgtcggcgcgcgcaacgtcgtgatcaccgacatcaacgactaccggctcgaactcgcgcgcaagatgggcgcgacgcgcgcggtcaatgtcgcgcgcgagtcgctgcgcgacgtgatgtccgacctgcacatgaccgaaggctttgacgtcggcctcgaaatgtcgggcgtgccgagcgcgttcacgagcatgctcgaggcgatgaaccacggcggcaaggtcgcgttgctcggcattccgcccgcgcagacggcgatcgactggaaccaggtgatcttcaaggggctcgagatcaagggcatctacggccgcgagatgttcgagacctggtacaagatggtcgcgatgctgcagagcggcctcgacctgtcgccgatcattacgcatcgttttgcggccgacgattacgagaagggattcgccgcgatgttgtcgggtgaaagcggcaaggtgattctcgactggacggcctga

SEQ ID NO: 42657 - protein, 342 aa, Burkholderia sp. 383
MKALAKLERGPGLTLTRVKRPEVGHNDVLIKIRRTAICGTDIHIWKWDDWAQKTIPVPMHVGHEYVGEIVEMGQEVRGFAIGDRVSGEGHITCGFCRNCRAGRRHLCRNTVGVGVNREGAFAEYLAIPAFNAFKIPPEISDDLASIFDPFGNATHTALSFNLVGEDVLITGAGPIGIMAVAIAKHVGARNVVITDINDYRLELARKMGATRAVNVARESLRDVMSDLHMTEGFDVGLEMSGVPSAFTSMLEAMNHGGKVALLGIPPAQTAIDWNQVIFKGLEIKGIYGREMFETWYKMVAMLQSGLDLSPIITHRFAADDYEKGFAAMLSGESGKVILDWTA

SEQ ID NO: 42658 - DNA, 1032 bp, Burkholderia thailandensis E264
  CDS (1)..(1032): transl_table=11
atgaaagcgcttgcaaagctcgaacgcggaccgggcctcacgcttacccgcgtgaagaagcccgaggtcggccacaacgacgtcctcatcaagatccgccgcaccgcgatctgcggcaccgacatccatatctggaagtgggacgactgggcgcagaagacgattccggtgccgatgcacgtcggccacgagtacgtcggcgagatcgtcgagatgggccaggaggtgcgcggcttctcgatcggcgaccgcgtgtccggagaagggcacatcacgtgcggcttctgccgcaactgccgcgcggggcggcgtcacctgtgccgcaatacggtcggcgtcggcgtgaatcgcgaaggcgcgttcgccgagtacctcgcgatacccgcgttcaacgcgttcaagattccgcccgaaatctccgacgatctcgccgcgatcttcgatccgttcggcaacgcgacgcacactgcgctgtcgttcaacctcgtcggcgaggacgtgctgatcacgggcgcggggccgatcggcgtgatggcggtggcgatcgcgaagcacgtcggcgcgcgcaacgtcgtcatcaccgacatcaacgactatcgcctcgaccttgcccgcaggatgggtgcgacgcgcgcggtgaacgtgtcgcgcgaatcgctgcgcgacgtgatggcggacctgcacatgacggagggcttcgacgtcgggctcgagatgtcgggcgtgccgagcgcgttcacgtcgctgctcgaatcgatgaatcacggcggcaaggttgcgctgctcgggattccgcccgcgcaaaccgcgatcgactggaaccaggtgatcttcaagggcctggagatcaagggcatctacgggcgcgagatgttcgagacctggtacaagatggtcgcgatgctgcaaagcgggctcgatctttcgccgatcatcacgcaccgcttcgccgtggacgactacgagaagggcttcgctgcgatgctgtcgggcgaaagcggcaaggtgattctcgactgggccgctgcgtga

SEQ ID NO: 42659 - protein, 343 aa, Burkholderia thailandensis E264
MKALAKLERGPGLTLTRVKKPEVGHNDVLIKIRRTAICGTDIHIWKWDDWAQKTIPVPMHVGHEYVGEIVEMGQEVRGFSIGDRVSGEGHITCGFCRNCRAGRRHLCRNTVGVGVNREGAFAEYLAIPAFNAFKIPPEISDDLAAIFDPFGNATHTALSFNLVGEDVLITGAGPIGVMAVAIAKHVGARNVVITDINDYRLDLARRMGATRAVNVSRESLRDVMADLHMTEGFDVGLEMSGVPSAFTSLLESMNHGGKVALLGIPPAQTAIDWNQVIFKGLEIKGIYGREMFETWYKMVAMLQSGLDLSPIITHRFAVDDYEKGFAAMLSGESGKVILDWAAA

SEQ ID NO: 42660 - DNA, 1089 bp, Syntrophus aciditrophicus SB
  CDS (1)..(1089): transl_table=11
atgaaggaaaaactggagggtatcagaatggacgacacaatgaaagcgatggtgtaccgtgggcccggtcggtacggcttggaagatgtcccggcgcccgtcatcctggaacccgatgatgtcattggcagggtcacgttatcgtcgatttcgggcagcgatgttcagattgtccatggcggcctgccggaagttagaactccgctgatcgtcggccacgaattctgcgctgaaatcatggaagtcggtccagcggtgaaaagtctgaatgtcggagatcgggtcgtcgtctcctgcgtcgccttctgcggggaatgccggtcctgcagacagggcctccatgcccgctgcgaaaagacggggttcggctctttcgggatgaatgggccggacggcggccaggcggaatacgtacgcctcccgggggccgatcgttactgtttcaaaattcccgaatccctgacttttcaggatgtcctgttctgcggcgatgtcctgtcggcgggctattacggggcggaaatgggggacattcaacgcggtgaaacggtggtcgtggtgggcgccggtccggtcggtctgtgcgccatggcgtcggcaaggctccgggaaccgtcgcggattatcgccgtcgacaccaatccgtaccggctggatgcggccctgaaagcaggcgtggcggatctggccctcaacccagtgaaggatcgcgttgttgaaatcgtccagggacttaccgatgggcggggcgccgacaaaaccatcgaatgcgcgggcatgcagaccacgttcgatatcgccttccaggccgtccggggcggagggaaaatcgctaccgccagcatttttcaaaaaccggtgactgttcctctggatgccgcctggggcagaaatatcagcctgagctgggggttcgcgccgatcgatcggattccgaaactgatcaggctgatcgaagagggaaaaatcaataccggcttcttatgcacccatcaagcgccgttaaacgacatcctgcgaggctacgacatcttcggcaacaggaaggacggctgcctgaagtggctggtgacgccatgggaacattag

SEQ ID NO: 42661 - protein, 362 aa, Syntrophus aciditrophicus SB
MKEKLEGIRMDDTMKAMVYRGPGRYGLEDVPAPVILEPDDVIGRVTLSSISGSDVQIVHGGLPEVRTPLIVGHEFCAEIMEVGPAVKSLNVGDRVVVSCVAFCGECRSCRQGLHARCEKTGFGSFGMNGPDGGQAEYVRLPGADRYCFKIPESLTFQDVLFCGDVLSAGYYGAEMGDIQRGETVVVVGAGPVGLCAMASARLREPSRIIAVDTNPYRLDAALKAGVADLALNPVKDRVVEIVQGLTDGRGADKTIECAGMQTTFDIAFQAVRGGGKIATASIFQKPVTVPLDAAWGRNISLSWGFAPIDRIPKLIRLIEEGKINTGFLCTHQAPLNDILRGYDIFGNRKDGCLKWLVTPWEH

SEQ ID NO: 42662 - DNA, 1056 bp, Francisella tularensis subsp. holarctica
  CDS (1)..(1056): transl_table=11
atgaaagcattagctaaattaaaaaaacaaccaggtatatggatgattaatgatgcgccaataccagaatatggctacaatgatgttttgattaaaattaaaaaaacggctatttgtggtactgatttacatatttataattgggataaatggtcgcaaaacaccattccagttccaatgattaccggacatgagtttgctggtgaagttgtagctaaaggagatggtgttacaagcgtagatatcggcgatagagtgtcaggtgagggtcatcttgtatgtgggcaatgccgtaattgcagagcaggtaaacgtcacctttgtagaaaaactataggtataggagtaaatgtacagggtgcatttgcagaatatctagttatgcctgcggttaatgtttttaagatccctgattctatcagtgatgatatcgctagtacttttgatcctatgggcaatgctattcacaccgcactttcttttaacttaacaggtgaggatgtccttataactggtgctggacctattggcttaatggctgtcaaaatagcaagattctgtggtgcacgcagaatagtaatcacagatattaatgagtatcgcctacaaatggctagggattttggtgcaactgttgctttgaatgttgctccatttaagaatcaagatgagttagtaaaacaaatgcgcaaagttatgtcagatatcggcatgacagaaggatttgatgttggtctagaaatgtctggaattaactctgcaatctcaatgatgcttgatgttatgaatcatggtggtaagctatcacttctaggcatatctgctggtgatatttctgttgattggggagctatattgtttaagggtctgactctcaagggtatatatggtagagaaatgtttgaaacatggtacttaatgactagtatgctccaagctggtatggatatgaaccctatcatcacacatcgacttcatattgatgagtttcaaaaaggatttgaaataatgaaaagtggtcaatgtggtaaagtaatactggattggagcagctag

SEQ ID NO: 42663 - protein, 351 aa, Francisella tularensis subsp. holarctica
MKALAKLKKQPGIWMINDAPIPEYGYNDVLIKIKKTAICGTDLHIYNWDKWSQNTIPVPMITGHEFAGEVVAKGDGVTSVDIGDRVSGEGHLVCGQCRNCRAGKRHLCRKTIGIGVNVQGAFAEYLVMPAVNVFKIPDSISDDIASTFDPMGNAIHTALSFNLTGEDVLITGAGPIGLMAVKIARFCGARRIVITDINEYRLQMARDFGATVALNVAPFKNQDELVKQMRKVMSDIGMTEGFDVGLEMSGINSAISMMLDVMNHGGKLSLLGISAGDISVDWGAILFKGLTLKGIYGREMFETWYLMTSMLQAGMDMNPIITHRLHIDEFQKGFEIMKSGQCGKVILDWSS

SEQ ID NO: 42664 - DNA, 1074 bp, Methylobacillus flagellatus KT
  CDS (1)..(1074): transl_table=11
atggctaccatgaaagctgctgtattcgtctcccccggcaaaatagcgttgcgcgacaagcccgtccctgaaatcggcccgctggatgccttgatccgcatcaccaccacgaccatctgcggcacagatgtgcatatcctcaagggtgaatacccagttgcggcaggactgacagtcggacacgagcccgtcggcatcattgaaaagctggggtcagaggtacacggcttcaaggtaggccagcgcgtcatcgcaggtgcgatcacgcccagcgggcactccaacgcctgcctgtgcggcatcggcgcccaggatggcccggacagcccgcacggtttcaaggtggcaggtggctggaaatttggcaacaccatagacggcagccaagcggaattcctgcgcgtgccggatgccatggctaacctgagcccgatcccagaccacctcagcgacgagcaagtactgatgtgtccggacatcatgtcgaccggcttctctggcgcagagcggggcaacatcaagattggcgatacagtggtgatatttgcgctgggccccatcggcctctctgccgtcgcaggcgccaaactgctgggagccaccaagatcatcggcgtggattccattcctgacaggctcaacatcgcccgcgcgctaggcgcagaccatgtcatcaacttcaagactcatgacccggtgcaggaaattctcaagctgacagacggacgcggcgtggatgtcgcaatcgaggcactgggcgtgcaacagacattcgagtccagcctgcgcgtgctgcgtccgggcggcaccttgtccagcctgggcgtctattcctccgacctcaggctgccactagatgccttcggggccggactgggggacttcacgatcgtgtccaccctctgtcccggaggcaaggagcgcatgcgcagactgatggaggcagtcggctcgggccgcgctgacctgagcaatctggtgacccatcgcttcaagctcagcgagatcgaggaggcttacgacttgttcgccaatcagcgtgacggcgtcatcaaggtagccatcacaccctag

SEQ ID NO: 42665 - protein, 357 aa, Methylobacillus flagellatus KT
MATMKAAVFVSPGKIALRDKPVPEIGPLDALIRITTTTICGTDVHILKGEYPVAAGLTVGHEPVGIIEKLGSEVHGFKVGQRVIAGAITPSGHSNACLCGIGAQDGPDSPHGFKVAGGWKFGNTIDGSQAEFLRVPDAMANLSPIPDHLSDEQVLMCPDIMSTGFSGAERGNIKIGDTVVIFALGPIGLSAVAGAKLLGATKIIGVDSIPDRLNIARALGADHVINFKTHDPVQEILKLTDGRGVDVAIEALGVQQTFESSLRVLRPGGTLSSLGVYSSDLRLPLDAFGAGLGDFTIVSTLCPGGKERMRRLMEAVGSGRADLSNLVTHRFKLSEIEEAYDLFANQRDGVIKVAITP

SEQ ID NO: 42666 - DNA, 1032 bp, Burkholderia xenovorans LB400
  CDS (1)..(1032): transl_table=11
atgaaagcattggcaaaactcgaacgcgctccgggcctcacgcttacggacgtcaagaaacccgaagtcggccataacgacgtgatgatccgcatcacgcgcaccgcgatttgcggcacggacattcacatctggaagtgggacgactgggcgcagaaaacgattcctgtgccgatgcatgtcggccacgaatacgtgggtgaaatcgtcgaaatgggccaggaagtgcgcggctttgcgatcggcgaccgtgtgtccggcgaaggacatatcacgtgcggcttctgtcgcaattgtcgcgcgggccgcaggcatttgtgccgcaatacggtgggcgtcggcgtgaatcgtgagggggcgttcgccgagtatctggtgattccggccttcaacgcattcaagattccgcccgagatttccgacgacctcgccgctattttcgatccgttcggcaacgccacgcatactgcgctgtcgttcaatctggtcggcgaagacgtgttgattaccggcgccggccccatcggcatcatggcggtggcgatcgcgaagcacgtcggcgcgcgcaacgtggtgattaccgacgtcaacgactatcgcctcgaactcgcgcgcaagatgggcgccacgcgtgcagtcaacgtctcgcgcgaatcgttgcgcgacgtgatggcggatctgcacatggccgaaggtttcgacgtcggcctggaaatgtccggtgtgccgagcgcgttcaccggcatgctcgaagcaatgaaccacggcggcaagatcgcgctgctcggcattccgcccgcgcagaccgcgatcgactggactcaggtgatctttaaaggcctcgaaatcaagggcatttatgggcgcgagatgttcgagacctggtacaagatggtggcgatgctgcaaagcgggctggatctgtcgccgatcctcacacaccatttcaaggtcgacgactatcgggaagcgttcgccacgatgctctcaggcgagagcggcaaagtgattctcgactggaccgccgcgtga

SEQ ID NO: 42667 - protein, 343 aa, Burkholderia xenovorans LB400
MKALAKLERAPGLTLTDVKKPEVGHNDVMIRITRTAICGTDIHIWKWDDWAQKTIPVPMHVGHEYVGEIVEMGQEVRGFAIGDRVSGEGHITCGFCRNCRAGRRHLCRNTVGVGVNREGAFAEYLVIPAFNAFKIPPEISDDLAAIFDPFGNATHTALSFNLVGEDVLITGAGPIGIMAVAIAKHVGARNVVITDVNDYRLELARKMGATRAVNVSRESLRDVMADLHMAEGFDVGLEMSGVPSAFTGMLEAMNHGGKIALLGIPPAQTAIDWTQVIFKGLEIKGIYGREMFETWYKMVAMLQSGLDLSPILTHHFKVDDYREAFATMLSGESGKVILDWTAA

SEQ ID NO: 42668 - DNA, 1062 bp, Ralstonia metallidurans CH34
  CDS (1)..(1062): transl_table=11
atgaaagccgcagtctattacggtccgcaggatattcgctgtacggatattccagaccctgtcattcgctccgaccacgaaatgctagtcaaagtaacggccacatcgatatgtggctccgatttgcacctttaccggggcgcgcttgatggaatcatggaaaaaggcaagtcccaaacaggtcatgagttgatcggcgaagtcgtggaggtcggtaagagcgtcgggcgcttcaagcagggggatcgcgtcagtatggggtactcagtctcatgcggccactgctacatgtgcgaggttgggcagaccgcacattgtgagactaccaaaaacgcagtctatggattcggcatacctttcggcagcatcaatggaactcatgcggaggccctgatcgtccctcacgcggatggtcacgcgatgaatgtgccgaagggaattcccgatgaagcggcggttacgctttcctgcaacctgccgtcggcaatcatcgccaaccgcctggccgatatccaggtcggggagaatgttgcactggtgggctgcgggccgacgggtatgatgactctcgatatcgcgctgcacagagggccagggcgcgtggttgtgctcgataaggttgcccatcgtcttgacgtcgtgcgcaaaaaagggggcgtggcgattgatgcgaaccaggaagactggaaagaaaaagcactggcagaaaccggcggacgtggctttgacaaagtgatcgaggtggtcggttatcccgaaaccctacagatgtgcctcgatctggttcgccccggcggaacggttgccgcgatcggcgttttctgcgactcaactttcaatctgaatttggccgatgtgtttctgcgcaatatcagcttgcacatgaatggcttcgctaacgcccagccttacatgtgggaggcattgcggctgatggagcgtggtgtgatcaatccgcaagagtacttttcacacgcgttcgaacttgctgatgtcgacaaggcattctcggtctttcatcagaaatcggacagcgcaatgaaggtactgatccggccataa

SEQ ID NO: 42669 - protein, 353 aa, Ralstonia metallidurans CH34
MKAAVYYGPQDIRCTDIPDPVIRSDHEMLVKVTATSICGSDLHLYRGALDGIMEKGKSQTGHELIGEVVEVGKSVGRFKQGDRVSMGYSVSCGHCYMCEVGQTAHCETTKNAVYGFGIPFGSINGTHAEALIVPHADGHAMNVPKGIPDEAAVTLSCNLPSAIIANRLADIQVGENVALVGCGPTGMMTLDIALHRGPGRVVVLDKVAHRLDVVRKKGGVAIDANQEDWKEKALAETGGRGFDKVIEVVGYPETLQMCLDLVRPGGTVAAIGVFCDSTFNLNLADVFLRNISLHMNGFANAQPYMWEALRLMERGVINPQEYFSHAFELADVDKAFSVFHQKSDSAMKVLIRP

SEQ ID NO: 42670 - DNA, 1053 bp, Acidobacteria bacterium Ellin345
  CDS (1)..(1053): transl_table=11
atgccgaatacaatgcttgcagttatgaaacccgaggccgctccaggctcggagattcgcgaagttcctgttcctaaatttggaccgaacgaagtcctcgtcaaagttaaagttgcttccatctgtggtaccgacctccacatttacaactgggaccagtgggcccagcgccgcattaagccgccgctcatccccggccatgagttctgtggagacgtggttgcggtgggtagtgaagtaacgctggtgaaggaaggcgattttgtttccgccgaaatgcacgtgaactgcgggaagtgcctgcagtgcagaaccggacaggcgcatatttgccaacacgtgaagatcatcggcgtggacgcgaacggcgctttcgccgagtacgtggtgattccggagtcgaacatctggaagctggatccggcgattccgcaggaatacgcctcgattctcgatccgctcggaaacgcggtgcacacagtgctcgcgggcgacattgctgcgaagaccgttgcgatcacgggctgcggacccatcgggttgttttcgatcgccgtggcgaaagcctgtggcgcgacgaaagtgttcgccatcgaagtaaatgaacaccggcgcgcgatcgccaagaagatgaaagccgacttcgtgctcgatcccacgaaggacaacgtgaagcaggtggtactcgataacactgagggcgtgggtgttgacgttctgctcgaaatggctggacgccaggacgcgatcaaactcggcttctcgatcctccggctcgggggacgcgcgtccttgctcggaatccctggcaagcccatcgagatcaacctcgcggaagacatcatcttcaagggcgcgatcgtgcagggcatcaacggccgcaagatgtatgagacctggtaccagatggaagcgctgctcaaggccaagatgctcgatctgcatccggtgattaccgacaagatcccgatgaaggacttcagcacggcgatggcgcgattgcagagcggtgaagccagcaagattttgatgtatccgaatgggacgaaataa

SEQ ID NO: 42671 - protein, 350 aa, Acidobacteria bacterium Ellin345
MPNTMLAVMKPEAAPGSEIREVPVPKFGPNEVLVKVKVASICGTDLHIYNWDQWAQRRIKPPLIPGHEFCGDVVAVGSEVTLVKEGDFVSAEMHVNCGKCLQCRTGQAHICQHVKIIGVDANGAFAEYVVIPESNIWKLDPAIPQEYASILDPLGNAVHTVLAGDIAAKTVAITGCGPIGLFSIAVAKACGATKVFAIEVNEHRRAIAKKMKADFVLDPTKDNVKQVVLDNTEGVGVDVLLEMAGRQDAIKLGFSILRLGGRASLLGIPGKPIEINLAEDIIFKGAIVQGINGRKMYETWYQMEALLKAKMLDLHPVITDKIPMKDFSTAMARLQSGEASKILMYPNGTK

SEQ ID NO: 42672 - DNA, 1047 bp, Silicibacter sp. TM1040
  CDS (1)..(1047): transl_table=11
atgcggcccaatacaatgaaagccctagagaaatccaaaccccaagaggggctttggatggtccaggccccagtgcccgaaatcggcccggatgaggtcctgatcaagatcaacaagaccggcatctgcggtacagatattcacatctggaactgggatgattgggctgcgcacacggtgccggttccgatgatcacgggtcatgagtttgctggcgagatcgttgagctggggcgcaatgtgaccggtctcacggttgggcagcggtgctcgggcgaagggcatctgattggtacagaaagccgtcaatcgcggtcaggcaagtttcaccttgatccgggaacgcgcgggattggggtcaacgagcaaggagcctttgcgcaatacctgcgcctgcccgcttttaacgtggtgccgctgcccgatgacattccggatgacatcggcgccatcctcgacccactcggcaacgcggtccacaccgccttgagctttgatctcctcggtgaggatgtgctcattacgggagccggtccgatcgggatcatggcggccgccgtggcacgacatgcgggcgcgcgccatgtggtgattaccgatgtaaacgcagaccgcctggcgcttgccagtgaggtcacacgcgtgcgcacggtcaacgtcgccgtcgaggatctcaacgatgtgatgcatgaacttggcctcagggaagggtttgatgtcggcctcgagatgtccggcaatcaacaggcgctggaccagatggtcgaagcgctggtgatgggcggcaagattgcgcttcttggtattcccccgggcaaatcccccgtcgactggtctcggatcgtcttcaaggccatcaccatcaaaggcgtctatggacgggagatgttcgagacctggtacaagatgatcgcgatgctgcaaaacggcctggatgtaagcggggtgatcacccaccggtttgcggtcgatgagtttgaacaaggctttgccgccatgaaatcaggacaaagcggcaaggttgtactcgactggactggaggctga

SEQ ID NO: 42673 - protein, 348 aa, Silicibacter sp. TM1040
MRPNTMKALEKSKPQEGLWMVQAPVPEIGPDEVLIKINKTGICGTDIHIWNWDDWAAHTVPVPMITGHEFAGEIVELGRNVTGLTVGQRCSGEGHLIGTESRQSRSGKFHLDPGTRGIGVNEQGAFAQYLRLPAFNVVPLPDDIPDDIGAILDPLGNAVHTALSFDLLGEDVLITGAGPIGIMAAAVARHAGARHVVITDVNADRLALASEVTRVRTVNVAVEDLNDVMHELGLREGFDVGLEMSGNQQALDQMVEALVMGGKIALLGIPPGKSPVDWSRIVFKAITIKGVYGREMFETWYKMIAMLQNGLDVSGVITHRFAVDEFEQGFAAMKSGQSGKVVLDWTGG

SEQ ID NO: 42674 - DNA, 1074 bp, Rubrobacter xylanophilus DSM 9941
  CDS (1)..(1074): transl_table=11
atgccggagaagaagatgatgagggcggccgtgtaccgcgggccacgagagctgcgcgtcgagcccgtccccgttccggagatcgggccctccgacgtgctcgtgagggttcacagctgcggtatatgcggctcggatctgcacagctacaaggcggggatgtacatccggcccggccagatcatgggacacgagttcatgggcaccgtcgccgccgccggtgaggacgtggaaggtgtggaggagggcgaccgggtcaccggcttcagcatcggggtgtgcggtagctgctactggtgctcccgccagcagtacatcctgtgcccggaactcttccggaactccaccgggtatggccttccgggcgggttcgcagagtacgtcccgatccggaacgcggtggtcggtcagagcatacacccggtccccagcgagctcgacgacgagacggcggccaccacggagcccgtctccgtaggggtgggggccatcgaagcggccggggtgcgtccgggggacagggtggtcgtgctgggggcgggcatgatcggcaacgcctgcatgcaggcggccagggcggccggagcggggcaggttgcggtgatagacgtctctccggtccggctcgaggcggccaggagcctcggcgccgacgccgtcttcgacgcgaggaccggagacgccctgtcgtgggtgaaggagctgtggggggtcgggcgctaccacttcaacgagggcggcatggcggacgtcgtcgtcgaggccgccggcgcgcccgtgacggtccagcaggccttcgagatggtgcgcagcgggggggcgatcgtcttcgtgggcctgcccgaggagccggcgcccatcgacgtaaccaagatcgtgcacaagcagccgcgcatcgtgggttcgctgggcggggactttgccagggccatcgagctgatggccagcgggagcatccggacaaaggagcttatcacccacaggttcccgctcgaggacgccgccgaagccttcgagacccagctgcggacgggcgaggcgatgaaggtcatgatacaaccgcgggaggggtag

SEQ ID NO: 42675 - protein, 357 aa, Rubrobacter xylanophilus DSM 9941
MPEKKMMRAAVYRGPRELRVEPVPVPEIGPSDVLVRVHSCGICGSDLHSYKAGMYIRPGQIMGHEFMGTVAAAGEDVEGVEEGDRVTGFSIGVCGSCYWCSRQQYILCPELFRNSTGYGLPGGFAEYVPIRNAVVGQSIHPVPSELDDETAATTEPVSVGVGAIEAAGVRPGDRVVVLGAGMIGNACMQAARAAGAGQVAVIDVSPVRLEAARSLGADAVFDARTGDALSWVKELWGVGRYHFNEGGMADVVVEAAGAPVTVQQAFEMVRSGGAIVFVGLPEEPAPIDVTKIVHKQPRIVGSLGGDFARAIELMASGSIRTKELITHRFPLEDAAEAFETQLRTGEAMKVMIQPREG

SEQ ID NO: 42676 - DNA, 1035 bp, Mesorhizobium sp. BNC1
  CDS (1)..(1035): transl_table=11
atgaccaacatgatgaaggccttggtgaaggccaagcccgaggaagggctttggatggagcgggtgccgcttccggagatcggcccgaacgacgtgctgatcaaggtgaggaaagctgccatctgcggcacggacgtccatatctggaactgggacgaatgggcaagaaagaccgtgcccgtgccgctcgtcaccggccatgagttcgtcggcgaggtcgtggatgtcggctcagccgtgaccgaatacagaatcgggcagcgtgtttcgggcgaggggcacattgtctgcggccattgccgcaactgccgggccgggcgtggacatctctgccgaaacacgctgggcgtcggcgttcaccggccgggtgcctttgccgaatatatctcgctgccgcagcacaatgtcgtggcgatccccgacgacgtgccggacgagatcgccgcgattttcgatccgcttggaaacgcggtgcacaccgcgctctctttcgatctggtgggcgaggatgtgctggtgaccggagctggcccgatcggcattatgggcgcgctggtggcgcagtgcgtaggtgcgcgcaaagtggtcatcacggatatcaatccggggcgacttgcgctcgctaagaaactcggcgtgcgtcacgtggtgaatgccagggaagagaagctcaccgatgtaatgaggaagctcggcatgaccgagggcttcgacgtgggcctggagatgtccggctctgcctcggcgtttcgcgacatgatcgatgtcatgaacaatggcggcaaaatagcgatcctcggcatagcgccgacgggtttcgagatcgattggaacaaggtgattttcaagatgctccacctgaagggcatctacggccgggagatgttcgaaacctggtacaagatgatcgcgcttgtgcaggggcctctcgatatctccggcctgatcacgcaccgcatctctgccgatgattaccgcgaaggctttgccgccatgcgcagcggcgaggccggtaaggttgtaatggattggtga

SEQ ID NO: 42677 - protein, 344 aa, Mesorhizobium sp. BNC1
MTNMMKALVKAKPEEGLWMERVPLPEIGPNDVLIKVRKAAICGTDVHIWNWDEWARKTVPVPLVTGHEFVGEVVDVGSAVTEYRIGQRVSGEGHIVCGHCRNCRAGRGHLCRNTLGVGVHRPGAFAEYISLPQHNVVAIPDDVPDEIAAIFDPLGNAVHTALSFDLVGEDVLVTGAGPIGIMGALVAQCVGARKVVITDINPGRLALAKKLGVRHVVNAREEKLTDVMRKLGMTEGFDVGLEMSGSASAFRDMIDVMNNGGKIAILGIAPTGFEIDWNKVIFKMLHLKGIYGREMFETWYKMIALVQGPLDISGLITHRISADDYREGFAAMRSGEAGKVVMDW

SEQ ID NO: 42678 - DNA, 1026 bp, Shewanella sp. MR-7
  CDS (1)..(1026): transl_table=11
atgaaagcactaagcaagttaaaagccgaaaaaggcatttggttagtcgatgcgcctaagcctgaaatgggccacaacgatctgctgatcaagattaaaaagaccgccatttgtggcaccgacatgcacatctacaactgggacgaatggtcacaaaaaaccattcctgtgcctatggtggtaggtcacgagtatgtgggtgaagtggttgatatcggtcaagaagttcgtggctttaaaattggtgaccgcgtttctggcgaaggccatatcacctgcggccactgccgtaactgccgcgctggccgcacccatttatgccgcaacacctcaggtgtgggtgtaaaccgcgaaggttcatttgccgaatacttagtgatcccagcctttaacgccttcaaaattcccgatgatatcagcgatgatttagcgtctatcttcgacccgttcggtaacgcagtgcacacagcgctgtcattcgacttagtcggcgaagacgtgttaatcactggcgcgggccctatcggtattatggctgcggccgtatgtcgccacgttggtgctcgccatgtggtcattaccgacgttaacgaataccgcttagagttagcccgtaaaatgggtgctacccgcgcagttaacgtggctcaggaaaacctgaaagacgtgatgaaagaactcggcatgaccgaagggttcgacgtgggtctagaaatgtctggcgtaccttcagccttccacgccatgttagataccatgaaccacggtggcaaaatcgctatgctcggtatcccgggtggcgaaatggcgattgattggagcaaagtgatcttcaagggtctggtcatcaaaggcatttacggccgtgaaatgttcgaaacctggtacaagatggcaagcttgatccaatctggcttagacatttcgcctatcatcacgcaccactacaagattgatgatttccaaaaaggcttcgacgctatgggctcgggccaatccggtaaagtcatcctcagctgggattaa

SEQ ID NO: 42679 - protein, 341 aa, Shewanella sp. MR-7
MKALSKLKAEKGIWLVDAPKPEMGHNDLLIKIKKTAICGTDMHIYNWDEWSQKTIPVPMVVGHEYVGEVVDIGQEVRGFKIGDRVSGEGHITCGHCRNCRAGRTHLCRNTSGVGVNREGSFAEYLVIPAFNAFKIPDDISDDLASIFDPFGNAVHTALSFDLVGEDVLITGAGPIGIMAAAVCRHVGARHVVITDVNEYRLELARKMGATRAVNVAQENLKDVMKELGMTEGFDVGLEMSGVPSAFHAMLDTMNHGGKIAMLGIPGGEMAIDWSKVIFKGLVIKGIYGREMFETWYKMASLIQSGLDISPIITHHYKIDDFQKGFDAMGSGQSGKVILSWD

SEQ ID NO: 42680 - DNA, 1044 bp, Hyphomonas neptunium ATCC 15444
  CDS (1)..(1044): transl_table=11
atgaaagctctcgtttatcgcggcccgcgcgacatcgcctttgaaacgatgaaagaccccgacctgcacgatgaccgcgacgcgatcatcaaggtcgacaaatgcgccatctgcggcagcgacctgcacatctatcatggcgaaaccttctccgaggacaccggctattgtgtcggccatgaagccgtcggcgaggtggtcgaaatcggccgcggcgtgcgccagctgaaagtgggcgacaaggtgatgatctcggcggcggtcgggtgcggccagtgccgcgcctgtctcgccggggtcgtcaaccgctgcgaattcaatgccggcagctgctatggcctctcggcaaaactgcaaggctgccaggccgaagccgtccgtgtccccgccgctgacttcaacgcccagaagatcccagacggcatcagcctcgaccaggccctgatgatgaccgacgccctcgccaccgcctggttcggcgcgcgcaacgcggatattcagcgcggcgccaccgtcgccgtcgtcggcctcggccccatcggtctattggctgcggaagccgccttcatcatgggcgcctcccgcgtcttcggtatcgaccttgtggaggaacgccgcgcggcgggccgcgccatcggccttgaaacgccagacccggcggatgcccgcgccatcatccaggaggccacaaagggccgcatgtgcgacagcgtcatcgaagcggtcggccactcggccaccatccgcgccgccctcggcctttcgggcaagcgcgccacggtctcggtcgtcggcgtcgctcaggaccgcaccttcgacttcccgatgtcaaaagccttcggcatgggcctcaccttccgtatcgggacatgttcggtcccccaggaatggcccgagctgatcccgctcgtccaatccggccgcatcaagccggaaaaatacatcactcacaccctccccctgtcagacggcgcccgcgcctacgacatcttcgacaaacgcaccgaaggcgcgatgaagatggtgtttgacctgacgctttga

SEQ ID NO: 42681 - protein, 347 aa, Hyphomonas neptunium ATCC 15444
MKALVYRGPRDIAFETMKDPDLHDDRDAIIKVDKCAICGSDLHIYHGETFSEDTGYCVGHEAVGEVVEIGRGVRQLKVGDKVMISAAVGCGQCRACLAGVVNRCEFNAGSCYGLSAKLQGCQAEAVRVPAADFNAQKIPDGISLDQALMMTDALATAWFGARNADIQRGATVAVVGLGPIGLLAAEAAFIMGASRVFGIDLVEERRAAGRAIGLETPDPADARAIIQEATKGRMCDSVIEAVGHSATIRAALGLSGKRATVSVVGVAQDRTFDFPMSKAFGMGLTFRIGTCSVPQEWPELIPLVQSGRIKPEKYITHTLPLSDGARAYDIFDKRTEGAMKMVFDLTL

SEQ ID NO: 42682 - DNA, 1038 bp, Rhizobium leguminosarum bv. viciae 3841
  CDS (1)..(1038): transl_table=11
atgtcgaacatgatgaaggcgctggtcaaagcgaaaccggaagtcgggctctggatggagaatgtgccggtgcccgaggtcgggccgaacgacgtgctgatccgggtgaagaaatcggcgatctgcggcaccgacgtccatatctggaactgggatcagtgggcgcagaagaccattccggtaccgatggtggtcggccatgaattctccggcgagatcgccgagatcggttcggcggtcacccgctatcatgtcggcgagcgggtttccggcgaggggcatatcgtctgcggcaagtgccgcaactgccgggcgggcaggggccatctctgccgcaacacgctcggtgtcggcgtcaaccgcccgggctccttcggcgaattcgtctgcattcccgaaagcaatgtcgtgccgatcccggatgatatttccgacgagatcgccgcgatcttcgatccgttcggcaatgccgtgcacaccgcgctctccttcgatctcgtcggcgaggacgtgctcgtcaccggcgccgggccgatcggcatcatgggcgcgctcgtcgccaagcgatccggcgcccgcaaggtcgtcatcaccgatatcaatccgcaccggctggagctggcgcgcaagctcggcatcgatcatgtcgtcgacgcatcgaaggaaaacctcgccgacgtgatgaaggcgatcggcatgacggaaggattcgacgtcgggctggaaatgtcgggggccgcacctgccttccgcgacatgatcgacaagatgaacaatggcggcaagatcgccatcctcggcatcgcgccggcgggcttcgaaatcgactggaacaaggtgatcttcaagatgctcaatctcaagggcatctacggccgcgagatgttcgagacctggtacaagatgatcgccttcgtccagggcggcctcgatctcgcgcccatcatcacccaccggatcggcatcgacgatttccgcgacggcttcgaggcgatgcggtcgggcaattccggcaaggtagtgatggactggatgtga

SEQ ID NO: 42683 - protein, 345 aa, Rhizobium leguminosarum bv. viciae 3841
MSNMMKALVKAKPEVGLWMENVPVPEVGPNDVLIRVKKSAICGTDVHIWNWDQWAQKTIPVPMVVGHEFSGEIAEIGSAVTRYHVGERVSGEGHIVCGKCRNCRAGRGHLCRNTLGVGVNRPGSFGEFVCIPESNVVPIPDDISDEIAAIFDPFGNAVHTALSFDLVGEDVLVTGAGPIGIMGALVAKRSGARKVVITDINPHRLELARKLGIDHVVDASKENLADVMKAIGMTEGFDVGLEMSGAAPAFRDMIDKMNNGGKIAILGIAPAGFEIDWNKVIFKMLNLKGIYGREMFETWYKMIAFVQGGLDLAPIITHRIGIDDFRDGFEAMRSGNSGKVVMDWM

SEQ ID NO: 42684 - DNA, 1029 bp, Pseudomonas aeruginosa UCBPP-PA14
  CDS (1)..(1029): transl_table=11
atgaccctgccacagaccatgaaagccgcggtcgtgcacgcctacggcgcgccgctgcggatcgaggaagtcaaggttccgctgcccggccccgggcaggtactggtgaagatcgaagcctccggcgtctgccacaccgacctgcacgccgccgagggcgactggccggtgaagccgccgttgccgttcattcccggtcacgaaggcgtcggctacgtcgccgcggtgggcagcggagtgacccgggtgaaggaaggcgaccgggtcggcatcccctggctgtacaccgcctgcggctgctgcgagcactgcctgaccggctgggagaccctctgcgagagccagcagaacaccggctactcggtgaacggcggctatgccgaatacgtattggccgacccgaactacgtcggaattctgccgaaaaacgtcgaattcgctgaaatcgcgccgatcctctgcgccggcgtcaccgtctacaaggggctcaagcagaccaacgcgcgccccggccagtgggtggcgatctccggcatcggcggcctcggccacgtcgccgtgcagtacgccagggccatgggcctgcacgtcgccgccatcgacatcgacgacgccaagctggaactggcgcgcaagctcggtgccagcctgacggtcaacgcccggcaggaagacccggtggaggcgctccagcgcgacatcggcggcgcccacggggtgctggtcacagcggtatccaacagcgccttcggccaggccatcggcatggcccgccgcggcggcaccattgccctggtcggcctgccgccgggtgacttcccgacgccgatcttcgacgtggtgctcaagggcctgcacatcgccggctccatcgtcggcacccgcgcggacctgcaggaagccctcgacttcgccggcgaaggcctggtcaaggcgaccatccatccgggcaagctggacgacatcaaccagatcctcgaccagatgcgcgccgggcagatcgaggggcgcatcgtccttgagatgtga

SEQ ID NO: 42685 - protein, 342 aa, Pseudomonas aeruginosa UCBPP-PA14
MTLPQTMKAAVVHAYGAPLRIEEVKVPLPGPGQVLVKIEASGVCHTDLHAAEGDWPVKPPLPFIPGHEGVGYVAAVGSGVTRVKEGDRVGIPWLYTACGCCEHCLTGWETLCESQQNTGYSVNGGYAEYVLADPNYVGILPKNVEFAEIAPILCAGVTVYKGLKQTNARPGQWVAISGIGGLGHVAVQYARAMGLHVAAIDIDDAKLELARKLGASLTVNARQEDPVEALQRDIGGAHGVLVTAVSNSAFGQAIGMARRGGTIALVGLPPGDFPTPIFDVVLKGLHIAGSIVGTRADLQEALDFAGEGLVKATIHPGKLDDINQILDQMRAGQIEGRIVLEM

SEQ ID NO: 42686 - DNA, 1026 bp, Solibacter usitatus Ellin6076
  CDS (1)..(1026): transl_table=11
atgaaggctttggtaaagagcaagagccagccagggttgtggctcgaagagatccccgagcccgcgatcgggatcaatgatgtgctcatccgcgtgttgcggaccggcatatgcggcacggacgtgcacatatacaagtgggacgagtgggcgcgggagacgatccacgtaccgatggcgatcgggcacgagttcgtcggccgcatcgaagcggttggctccaacgtggcggatttcttccccggcgacattgtcagcggcgaaggccacgtggtctgcggccgctgccgcaattgctttgccgggcgacgccacctgtgcgccaagaccatgggcgtcggcgtcaaccgcccaggagcgttcgctgaatacatcgcgctgcccatgacgaatatctggcgacaccacgagggcatcgatctcgatgtcgccgccatcttcgaccccttcggcaatgccgttcacaccgcgctctccttccccgtgctcggtgaggacgtgctgatcaccggcgctgggcctatcggcatcatggccgcggcggtggcccgccacgcggcagcccgctacaccgtgatcaccgacctgaatccctaccggctcgagttggccgccaaactcggggtcacccgcgccgtcaacgtccgcgagcaaaagctcggcgacgtgcagaaggagctcggcatgaccgagggcttcgacgtcggcctcgagatgtccggcaaccccgcgggattccgcgacatgctggccaacatgagtcacggcgccaaaatcgccatgctcggaattcccgccggcgaaatggctatcgattggcgcaccgtaatctttaacatgctcaccatcaagggaatctacggccgtgaaatgtacgagacctggtacaagatgagcgtgatgctgcagtccggcctggacatctcccccgtaatcacgcaccgctaccactacaccgatttcgaaaagggatttgaagtcatgagctccggtaattccggcaaggtcattctgagctgggactaa

SEQ ID NO: 42687 - protein, 341 aa, Solibacter usitatus Ellin6076
MKALVKSKSQPGLWLEEIPEPAIGINDVLIRVLRTGICGTDVHIYKWDEWARETIHVPMAIGHEFVGRIEAVGSNVADFFPGDIVSGEGHVVCGRCRNCFAGRRHLCAKTMGVGVNRPGAFAEYIALPMTNIWRHHEGIDLDVAAIFDPFGNAVHTALSFPVLGEDVLITGAGPIGIMAAAVARHAAARYTVITDLNPYRLELAAKLGVTRAVNVREQKLGDVQKELGMTEGFDVGLEMSGNPAGFRDMLANMSHGAKIAMLGIPAGEMAIDWRTVIFNMLTIKGIYGREMYETWYKMSVMLQSGLDISPVITHRYHYTDFEKGFEVMSSGNSGKVILSWD

SEQ ID NO: 42688 - DNA, 1026 bp, Shewanella sp. ANA-3
  CDS (1)..(1026): transl_table=11
atgaaagcactaagcaagttaaaagccgaaaaaggcatttggttagtcgatgcgcctaagcctgaaatgggccacaacgatctgctgatcaagattaaaaagaccgccatttgtggcaccgacatgcatatctacaactgggacgaatggtcacaaaaaaccattcctgtgcctatggtggtaggtcacgagtatgtgggtgaagtggttgatatcggtcaagaagttcgtggctttaaaattggtgaccgcgtttctggcgaaggccatatcacctgcggccactgccgtaactgccgcgctggtcgcacccatttatgccgcaacacctcaggtgtgggtgtaaaccgcgaaggttcatttgccgaatacttagtgatcccagcctttaacgccttcaaaattcccgatgatatcagcgacgatttagcctctatcttcgatccattcggtaacgcagtgcacacagcgctgtcattcgacttagtgggcgaagacgtgttaatcactggcgcgggtcctatcggtattatggctgcggccgtgtgtcgccacgttggtgctcgccatgtggtcattaccgacgttaacgaatatcgtttagagctggcacgcaagatgggcgccacccgcgccgttaacgtggctcaggaaagtctgaaagacgtgatgaaagaactcggcatgaccgaaggcttcgacgtgggtctggaaatgtcaggcgtaccttcggccttccacgccatgttagataccatgaaccacggtggcaaaatcgcgatgctcggcattccaggtggcgaaatggcgattgattggagcaaagtgatcttcaagggtctggtcatcaaaggcatttacggccgtgaaatgttcgaaacctggtacaagatggcaagcttgatccaatctggcttagatatttcgcctatcatcacgcaccactacaagattgatgatttccaaaaaggcttcgacgctatgggctcgggccaatcaggtaaagtcatcctcagctgggattaa

SEQ ID NO: 42689 - protein, 341 aa, Shewanella sp. ANA-3
MKALSKLKAEKGIWLVDAPKPEMGHNDLLIKIKKTAICGTDMHIYNWDEWSQKTIPVPMVVGHEYVGEVVDIGQEVRGFKIGDRVSGEGHITCGHCRNCRAGRTHLCRNTSGVGVNREGSFAEYLVIPAFNAFKIPDDISDDLASIFDPFGNAVHTALSFDLVGEDVLITGAGPIGIMAAAVCRHVGARHVVITDVNEYRLELARKMGATRAVNVAQESLKDVMKELGMTEGFDVGLEMSGVPSAFHAMLDTMNHGGKIAMLGIPGGEMAIDWSKVIFKGLVIKGIYGREMFETWYKMASLIQSGLDISPIITHHYKIDDFQKGFDAMGSGQSGKVILSWD

SEQ ID NO: 42690 - DNA, 1089 bp, Mycobacterium smegmatis str. MC2 155
  CDS (1)..(1089): transl_table=11
atgtccaatcaagtccccgaaaagatgcaggcagtggtgtgtcacggcccccacgactaccggctcgaggaggtcgcggtaccgcagcgcaaacccggcgaggcgctgatccgggtcgaggccgtgggcatctgtgcaagcgatctcaagtgctaccacggggccgccaagttctggggtgacgagaaccggcccgcgtgggccgagaccatggtgatccccggccacgagttcgtcggacgggtcgtcgaactcgacgacgaggccgcgcagcggtggggtatcgcggtcggtgaccgcgtggtgtccgagcagatcgtgccctgctgggagtgcctgttctgcaagcgcggccagtaccacatgtgccagccgcacgatctctacggcttcaagcggcgcacgcccggcgcgatggccagctacatggtgtatccggcagaggccttggtgcacaaggtttccccggacatcccggcccagcacgccgccttcgccgagccgctgtcgtgctcgctgcacgccgtggaacgcgcccagatcaccttcgaggacaccgtcgtggtggccggctgcgggccgatcggcctcggcatgatcgcgggcgccaaggccaagagccctatgcgcgtcatcgccctcgacatggcacccgacaagctcaagctcgccgagaagtgcggggccgacctcacgatcaacatcgccgagcaggacgccgagaagatcatcaaggacctcaccggcggctacggcgccgacgtgtacatcgagggcacgggccacacctcggccgtgccgcaggggctcaacctgctgcgcaagctcggccgctacgtcgagtacggcgtcttcggcagtgacgtcacggtcgactggagcatcatcagcgacgacaaggagctcgacgtcctcggtgcccacctcggcccgtactgctggcccgcggccatcaagatgatcgagtccggtgcgctgccgatggacgagatctgcacacatcagttcccgctcaccgaattccagaagggcctcgacctcgtggccagcggaaaggaatcggtcaaggtctccctgatcccggcatag

SEQ ID NO: 42691 - protein, 362 aa, Mycobacterium smegmatis str. MC2 155
MSNQVPEKMQAVVCHGPHDYRLEEVAVPQRKPGEALIRVEAVGICASDLKCYHGAAKFWGDENRPAWAETMVIPGHEFVGRVVELDDEAAQRWGIAVGDRVVSEQIVPCWECLFCKRGQYHMCQPHDLYGFKRRTPGAMASYMVYPAEALVHKVSPDIPAQHAAFAEPLSCSLHAVERAQITFEDTVVVAGCGPIGLGMIAGAKAKSPMRVIALDMAPDKLKLAEKCGADLTINIAEQDAEKIIKDLTGGYGADVYIEGTGHTSAVPQGLNLLRKLGRYVEYGVFGSDVTVDWSIISDDKELDVLGAHLGPYCWPAAIKMIESGALPMDEICTHQFPLTEFQKGLDLVASGKESVKVSLIPA

SEQ ID NO: 42692 - DNA, 1041 bp, Nocardioides sp. JS614
  CDS (1)..(1041): transl_table=11
gtgcgtgctctcgtgaagacgaccgccggacccgggctcgagctcatcgacgtgcccgagccggcctgtggtgaccgcgacgtgaagatccgggtgctgagagcgggcctctgcggcaccgacctgcacctgctgtcctgggacgactgggcggccgcgacggtgcaggcgccgatgacgatcggccacgagttcttcggggaggtcgtcgaggtcggcgcggacgtcgaccacgtctcggtcggcgaccgggtctccggcgagggacacatcgtgtgcggggcctgccgcaactgccgggccgggcggcgccagctgtgcatcaacaccgtcggcgtcggggtcaaccgggacggcgcgttcgccgactacgtcgtcatcccggcggccaacgcctgggtccagccggccgacctcgacccggacctgggtgcgctgttcgacccgctcggcaacgccacccacaccgccctccagtggccggtggtgggggaggacgtcgtcattacgggggccggcccgatcgggatcatggcgaccgcgatcgtgcggcacgcgggcgcccggcggatcgcggtcaccgacctcagccccgagcggctggagctggcggcaagcgcgggcgccgacctcaccgtcgacgtctcccagggccaggacctggcctgggcacagcggcagctcggcatgctcgagggcttcgacatcggcctggagatgtcgggtgctcccgacgccgtgcgcgacatgctcgagaacctcaaccacggggcccgggtcgcgatgctgggcctgccgcggtcggcgtacgagatcgactggggcaaggtgatcacgcacatgatcacgctgcgcgggatctatggccgcgagatgttcgagacgtggtacctgatgggctcgatgctggcgaccacgccggcgctgcgggacgccgtacagtccgtgatcacgtggcgtggcccggcggaggactgggaggaagccttcgagcacacccggtccggcaccgccggcaaggccgtcctggattggagctga

SEQ ID NO: 42693 - protein, 346 aa, Nocardioides sp. JS614
MRALVKTTAGPGLELIDVPEPACGDRDVKIRVLRAGLCGTDLHLLSWDDWAAATVQAPMTIGHEFFGEVVEVGADVDHVSVGDRVSGEGHIVCGACRNCRAGRRQLCINTVGVGVNRDGAFADYVVIPAANAWVQPADLDPDLGALFDPLGNATHTALQWPVVGEDVVITGAGPIGIMATAIVRHAGARRIAVTDLSPERLELAASAGADLTVDVSQGQDLAWAQRQLGMLEGFDIGLEMSGAPDAVRDMLENLNHGARVAMLGLPRSAYEIDWGKVITHMITLRGIYGREMFETWYLMGSMLATTPALRDAVQSVITWRGPAEDWEEAFEHTRSGTAGKAVLDWS

SEQ ID NO: 42694 - DNA, 1089 bp, Mycobacterium sp. KMS
  CDS (1)..(1089): transl_table=11
atgtccgaccagattccggaaaagatgcaggcagtggtctgtcacggaccgcgtgactatcgactcgaggagatcgccgtaccgcagcgcggacccggcgaagcgctgatcagggtcgaagcggtcggcatctgcgccagcgatctgaagtgctaccacggcgcggcgaagttctggggcgacgagaaccgccccgcgtgggccgagaccatggttatccccggacacgagttcgtcggcacggtggtcgaactcgacgacgacgccgcccagcggtgggggatcgccgtcggtgaccgtgtggtctccgagcagatcgtgccgtgctgggagtgtcgcttctgcaagcgcggccagtaccacatgtgtcagccgcacgacctctacggtttcaagcgccgcacgcccggcgccatggccagctacatggtgtatccggcagaagcgttggtgcacaaggtgtccaaagacatcaagccccatcatgccgccttcgccgaaccgctgtcgtgctccctgcacgcggtcgaacgcgcccagatcaccttcgaggacaccgtcgtcgtcgcggggtgcggaccgatcgggctcggcatgatcgcgggtgcgcgggccaagaacccgatgcacgtcatcgcgctcgacctggcccccgacaagctcgaactggccgagaagtgcggcgccgacatcacgatcaacatcgccgaacaggatgcggtggcgatcgtcaaggagctcaccgacggctacggcgccgatgtctacctcgagggcaccggccacacgtcggcggttccgcaggggctcaacctgttacgcaagctcggccgctacgtcgagtacggggtgttcggcagtgacgtcaccgtcgactggagcatcatcagcgacgacaaggaactcgacgtgctcggcgcgcatctcgggccgtactgctggccggccgccatcaagatgatcgaatccggcatcttgccgatggacgagatctgcacccatcagctgccgctcaccgacttccagaagggtctcgacctcgtcgcgagcggtaaagagtccgtcaaggtttcgttgatccccgcctga

SEQ ID NO: 42695 - protein, 362 aa, Mycobacterium sp. KMS
MSDQIPEKMQAVVCHGPRDYRLEEIAVPQRGPGEALIRVEAVGICASDLKCYHGAAKFWGDENRPAWAETMVIPGHEFVGTVVELDDDAAQRWGIAVGDRVVSEQIVPCWECRFCKRGQYHMCQPHDLYGFKRRTPGAMASYMVYPAEALVHKVSKDIKPHHAAFAEPLSCSLHAVERAQITFEDTVVVAGCGPIGLGMIAGARAKNPMHVIALDLAPDKLELAEKCGADITINIAEQDAVAIVKELTDGYGADVYLEGTGHTSAVPQGLNLLRKLGRYVEYGVFGSDVTVDWSIISDDKELDVLGAHLGPYCWPAAIKMIESGILPMDEICTHQLPLTDFQKGLDLVASGKESVKVSLIPA

SEQ ID NO: 42696 - DNA, 1047 bp, Listeria monocytogenes str. 1/2a F6854
  CDS (1)..(1047): transl_table=11
atgaaagctttaaaattatatggaaaaagagatttgcgttatgaagaagcggatatgccaacaattgaagagccagatgatgttattttgaaagtgaaaacagttgggatttgtggctcagatatttcaaggtatagtaagcttgggccgtacgtaccaggaatggtatggggtcatgaattttcaggggaagttattgaagttggtagtgaggttacagatattgagattggtgatagggctgccggatgcccagcactctattgtggagagtgtgaatactgtaaaaaaggcgaattcgcccgctgtcggaagctaacagtaatcggagcaagacatcccggagcctatgctgagtatatcaaacttccagcagaaaatgtagtaaaaataccagatgaattagattatgaagctgctgcacttgtcgagccttccgcagtggtcgttcatggattttatcatacgaaattacaagctggtgatgatgtcgtcgttgtcggaagcggcaatatcggtttgctagcaattcaatgggcgaaagtctttggggcaagaagagtgatagcgattgatgtagacgataaaaagctagcacttgcgaaagaagtcggagcagacgtagttattaactctttaaaagaagatcctttagaagtagtcgcagcacatacagatggtctaaacgctgatttagttgtagaagctgcgggatcacctattacatctgcacaagtttttgcctatgcgaaaaaaggtgggggcgtcgttttcctaggaattccatacgcagatgtaacaatcgaacgtttctattttgaaaaaattgtacgtagtgagcttactgtttggggctcatggaatgcaatttctgcaccattcccaggaaaagaatggcaaacaaccattcacttcttagccaataaacaaatcaacattgagccaatgattacacatcgtctttcacttgctgaaggaccagaagtttttgagcgaatctatgaaagaaatgaatttttcgggaaagtattatttttcccagaatga

SEQ ID NO: 42697 - protein, 348 aa, Listeria monocytogenes str. 1/2a F6854
MKALKLYGKRDLRYEEADMPTIEEPDDVILKVKTVGICGSDISRYSKLGPYVPGMVWGHEFSGEVIEVGSEVTDIEIGDRAAGCPALYCGECEYCKKGEFARCRKLTVIGARHPGAYAEYIKLPAENVVKIPDELDYEAAALVEPSAVVVHGFYHTKLQAGDDVVVVGSGNIGLLAIQWAKVFGARRVIAIDVDDKKLALAKEVGADVVINSLKEDPLEVVAAHTDGLNADLVVEAAGSPITSAQVFAYAKKGGGVVFLGIPYADVTIERFYFEKIVRSELTVWGSWNAISAPFPGKEWQTTIHFLANKQINIEPMITHRLSLAEGPEVFERIYERNEFFGKVLFFPE

SEQ ID NO: 42698 - DNA, 1092 bp, Exiguobacterium sibiricum 255-15
  CDS (1)..(1092): transl_table=11
atgatgacaaaactagtgacagctgtagaagatacgacaaaagtaaaaacgatgcgcgcactcgtcaaggaagaacggggatttggcgctgtcttgaaagaagtcgcagttccttcaccaaaacgtggtgaagtcttgattcgcgtggaagcgacttccatctgcgggacggatgtccacatttacgaatgggacgcgtgggcagcatcacgcgtgaatccgccgtatgttttcggacatgagttttccggtgaagtcgtggaactgggagaagggacgaaacgtctgaaactcggggaccgtgtctcagcggaaacacatatcgtctgtcatcaatgcaaacagtgtctgcgggggcagtatcacatttgtaaaaacacaaaaatcatcggcgtcgatacacaaggctgtttcgccgagtacgtcgtcatgccggaagaaaatctctgggtcaatccggaggatatgccagccgccatcgcatcgattcaagagccgatgggcaatgccgttcacacggttcttgcgagtgacgtcagcgctaaaacggtcgccatcgtcggttgcggtccaatcggtctgatggctgtctcggtcgcaaaagcggcaggagctgcggaagtcattgcgattgatgtcaatccgtaccggttggagcttgcgaaaacgatgggcgcagatgtcgtcatcgattcacgccacgaggatgttctcgaacgggtccggatgatgacggacggggacgggattgatgtcgtctgtgaaatgagcggtcatccggttgcgattcgtcaagcatttgagatggtgacagccggcggagacgtcaacattctcagtctgccggtcaaaccggtcgagattgatctgacgaatcacgttgtttttaaaggtgttcgcgttcaaggcatcaccggacggaaaatgtatgagacatggagtcaagtatccgcattcctgtcgagcggaaaagtcgatgtcaaaccgttgattacacacacattgccactcgaacggtttgaagaaggattcgaattgatgcgacaagggaaatgtggaaaggtcgtactacaaccaagggggacgaattaa

SEQ ID NO: 42699 - protein, 363 aa, Exiguobacterium sibiricum 255-15
MMTKLVTAVEDTTKVKTMRALVKEERGFGAVLKEVAVPSPKRGEVLIRVEATSICGTDVHIYEWDAWAASRVNPPYVFGHEFSGEVVELGEGTKRLKLGDRVSAETHIVCHQCKQCLRGQYHICKNTKIIGVDTQGCFAEYVVMPEENLWVNPEDMPAAIASIQEPMGNAVHTVLASDVSAKTVAIVGCGPIGLMAVSVAKAAGAAEVIAIDVNPYRLELAKTMGADVVIDSRHEDVLERVRMMTDGDGIDVVCEMSGHPVAIRQAFEMVTAGGDVNILSLPVKPVEIDLTNHVVFKGVRVQGITGRKMYETWSQVSAFLSSGKVDVKPLITHTLPLERFEEGFELMRQGKCGKVVLQPRGTN

SEQ ID NO: 42700 - DNA, 1026 bp, Roseovarius nubinhibens ISM
  CDS (1)..(1026): transl_table=11
atgaaggccctcgtgaaatcccgccccgagccgggcctctggatggaacatgtcccggtgccggaaccgggcgatgacgaagtgctcatcaaggtgcgcaaatccgccatctgcggcaccgatgtgcatatctggaaatgggatgaatggtcggccaagaccgtgccggtgccgatggtcgtcggccatgagttctgtggcgagatcgtcgacacgggccgcgccgcgatcaaatacaagatcggccagcgcgtcgcgggcgagggccatgtggtctgtggcacctgccgcaactgtcgcgcggggcgggggcatctgtgccgcaacacgctcggcgtgggggtcaaccggcccggctctttcgcggaatatctctgcatccccgaaagcaatgtggtgccgatccccgatgacatccccgacgagatcgcggcgatcttcgatccgttcggcaatgcggtccacaccgcgctgagctttgatctggtgggtgaggatgtgcttgtcaccggggccggtccgatcggcatcatgggggcgctcgtcgcgcaaaaggccggcgcgcgcaaagtggtgatcaccgacatatcgccctatcgcatcgcgctcgcgcaaaagctcggggtgcagcatgtggtcaacgcggcggaggaaaacctcaaggatgtgatggcgcggctcggcatgaccgaaggttttgacgtcgggctcgagatgtccggcgcggcccccgccatgcgcgacatgatcgacaagatgaacaatggcggcaagatcgcacttctgggcatcgcgccgaccgagttcgcagtcgactggaacaagatcatcttcaagatgctcaacgtcaaaggcatctatggccgcgagatgtacgagacctggtacaagatgatcgcgctggtgcaatcgggcctcgacctgacgccgctgatcacccatcgcatcggcatcgacgcctttgaggatggctttgccgcgatgctctcgggcgaggcgggcaaggtggtgatggactggggctaa

SEQ ID NO: 42701 - protein, 341 aa, Roseovarius nubinhibens ISM
MKALVKSRPEPGLWMEHVPVPEPGDDEVLIKVRKSAICGTDVHIWKWDEWSAKTVPVPMVVGHEFCGEIVDTGRAAIKYKIGQRVAGEGHVVCGTCRNCRAGRGHLCRNTLGVGVNRPGSFAEYLCIPESNVVPIPDDIPDEIAAIFDPFGNAVHTALSFDLVGEDVLVTGAGPIGIMGALVAQKAGARKVVITDISPYRIALAQKLGVQHVVNAAEENLKDVMARLGMTEGFDVGLEMSGAAPAMRDMIDKMNNGGKIALLGIAPTEFAVDWNKIIFKMLNVKGIYGREMYETWYKMIALVQSGLDLTPLITHRIGIDAFEDGFAAMLSGEAGKVVMDWG

SEQ ID NO: 42702 - DNA, 1026 bp, Pseudoalteromonas tunicata D2
  CDS (1)..(1026): transl_table=11
atgaaagcgctatcgaaattaaaagcagaaccgggcatttggatgaccgaagcggcaaaaccagaagtcggtcataatgatttattaattaaaatccgtaaaacagcaatttgtggtacagacgttcacatttataaatgggatgagtgggcgcaaaatacaatccctgtacctatggtggttggccacgaatatgtgggcgaagtagttgatatgggccaagaagtacgcggatttaaaattggtgatcgtgtatcgggcgaaggccatattacatgtggtcattgccgtaactgccgtgcgggtcgagtgcatttatgccgcaataccataggtgtgggtgttaaccgtgaaggatcatttgcagagtatttagtgatccctgcttacaatgcatttaaaatcccagacaatatttctgatgaattagcatcaatttttgatccatttggtaatgcggtacatacagctttatcgtttgatttagtgggtgaagatgtacttatcactggcgcaggcccaattggcattatggcagcagctgttgctaagcatgttggtgctcgttatgttgttgttaccgatgtgaatgaatatcgcttagaccttgcgcgtaaaatgggtgctacacgagcggtaaatatcgcaaacgaaaagcttgaagatgtgatgaaagagcttggtatgacagagggctttgatgttggtcttgaaatgtctggcgtaccttctgcatttaaaaacatgctgagtaatatgaatcatggtggaaaaattgccatgctaggtattccaccttcagacatggcggttgattggaatcaggttatttttaaagggttagtgatcaaaggtatttacggtcgtgaaatgtttgagacctggtataaaatggccagcttaattcaatcggggcttgatttatctccgattattacgcatcagttcccaattgatcaattccaacaaggatttgacaccatgttgtctggtcagtcaggtaaagtgattttagattggtgttaa

SEQ ID NO: 42703 - protein, 341 aa, Pseudoalteromonas tunicata D2
MKALSKLKAEPGIWMTEAAKPEVGHNDLLIKIRKTAICGTDVHIYKWDEWAQNTIPVPMVVGHEYVGEVVDMGQEVRGFKIGDRVSGEGHITCGHCRNCRAGRVHLCRNTIGVGVNREGSFAEYLVIPAYNAFKIPDNISDELASIFDPFGNAVHTALSFDLVGEDVLITGAGPIGIMAAAVAKHVGARYVVVTDVNEYRLDLARKMGATRAVNIANEKLEDVMKELGMTEGFDVGLEMSGVPSAFKNMLSNMNHGGKIAMLGIPPSDMAVDWNQVIFKGLVIKGIYGREMFETWYKMASLIQSGLDLSPIITHQFPIDQFQQGFDTMLSGQSGKVILDWC

SEQ ID NO: 42704 - DNA, 1032 bp, Photobacterium sp. SKA34
  CDS (1)..(1032): transl_table=11
atgaaaatcaaagctctttctaagttaaagcctgaagaaggcatctggatgactgaagtagataagcctgaagttggtcataacgatctgcttatccgcatcaagaaaacagcaatctgtggtactgatgttcatatctacaattgggatgaatggtcacaaaaaacgatccctgtacctatggttgttggtcatgagtatgtcggtgaagtggttgggatgggtcaggaagtgcgtggctttgctattggcgatcgcgtttcaggtgaaggccatattacgtgtggtcactgccgaaactgtcgtggtggccgtacccacttatgccgaaataccattggtgttggtgtaaaccgtgaaggtgcatttgcggaatacttagtgatccctgcatttaacgcattcaaaattcctgatgatatttcagatgatgtagcgtctattttcgacccgttcggcaatgctgttcacaccgcgctgtcgttcgacttagtgggtgaagatgtgctgatcacaggtgcaggtccaattggcattatggctgcggcagtagcaaaacacgtgggtgcgcgtcacgtagtgatcactgatgtgaacgaataccgtttagatcttgcacgcgaaatgggcgtgacccgtgcgattaacgttgctaaagaaagcctgacggatgtgatggcagagcttggcatgaaagaaggctttgacgtgggcatggaaatgtcgggtaatcctgcggcatttaacagcatgctatcaagcatgaaccacggcggtaaaattgcactgctaggtattccaccatcagacatggcaatcgattggaaccaagtgatcttcaaaggtttgatcatcaaaggtatctatggccgtgaaatgtttgaaacatggtacaagatggcaaccttgattcaatcaggtttagatctatcaccaattattactcaccattacaagatcgatgatttccaagagggctttgatgtcatgcgctctggtcaatcaggtaaggttattcttgattgggaataa

SEQ ID NO: 42705 - protein, 343 aa, Photobacterium sp. SKA34
MKIKALSKLKPEEGIWMTEVDKPEVGHNDLLIRIKKTAICGTDVHIYNWDEWSQKTIPVPMVVGHEYVGEVVGMGQEVRGFAIGDRVSGEGHITCGHCRNCRGGRTHLCRNTIGVGVNREGAFAEYLVIPAFNAFKIPDDISDDVASIFDPFGNAVHTALSFDLVGEDVLITGAGPIGIMAAAVAKHVGARHVVITDVNEYRLDLAREMGVTRAINVAKESLTDVMAELGMKEGFDVGMEMSGNPAAFNSMLSSMNHGGKIALLGIPPSDMAIDWNQVIFKGLIIKGIYGREMFETWYKMATLIQSGLDLSPIITHHYKIDDFQEGFDVMRSGQSGKVILDWE

SEQ ID NO: 42706 - DNA, 1026 bp, marine gamma proteobacterium HTCC2207
  CDS (1)..(1026): transl_table=11
atgaaagcattagttaaaaggaattccactgttggtctctggttggaggatgtacccaaaccggaaatgggtattaatgacgttttgatcaagattaagcgcacggccatctgcggcaccgatatgcatatttataactgggatagctgggctcaggaaaccattcccgtacctatggtagtggggcatgagtttgtcggcgagatcgtcgatgtaggctccaatgtaaatgattttcgtcctgggcaaattgtctcgggagagggccatgtagtctgtggtcgctgccgcaattgtctcgccggacgtcgtcatctctgcgcccacaccagtggtataggcgtggatcgctcgggtgcctttgctgaatatttggcgctgccaatgtccaatgtgtgggagcatcgcgcagatatagatctggatgtggctgcgctctttgatcccttgggcaatgccgtgcacaccgcactgcaatacgatctattgggtgaagacgttttgatcactggtgctgggcctattggcgccatggccgccgcagtttgtcgtcatgccggtgcgcgcaatgtggtgatcaccgatattaatccccagcgccttgcgctagcgaaagagctcggcgctacctgtacagttgatgtgcgcaccgagaaactcgctgatgtgcagcgtgcactgggtatgtctgaaggctttgatgtgggtctggagatgtccggtaatcctgctgggtttcgtgacctattaagcaatatgtgccatggcggcaaagtggcaatgctcggtattcctgcggaagaggtagccatcgattggagtctagtgatctttaatatgctcactctgaaaggtatctatggtcgtgagatgtatgagacctggtacaagatgtcggtaatgattgagagcggcttggatatttcttcggtgattacccatcgcatgcactacaccgatttccagaagggttttgatgcgatgaacgccggagaggcgagcaaggtgattttgaattgggactga

SEQ ID NO: 42707 - protein, 341 aa, marine gamma proteobacterium HTCC2207
MKALVKRNSTVGLWLEDVPKPEMGINDVLIKIKRTAICGTDMHIYNWDSWAQETIPVPMVVGHEFVGEIVDVGSNVNDFRPGQIVSGEGHVVCGRCRNCLAGRRHLCAHTSGIGVDRSGAFAEYLALPMSNVWEHRADIDLDVAALFDPLGNAVHTALQYDLLGEDVLITGAGPIGAMAAAVCRHAGARNVVITDINPQRLALAKELGATCTVDVRTEKLADVQRALGMSEGFDVGLEMSGNPAGFRDLLSNMCHGGKVAMLGIPAEEVAIDWSLVIFNMLTLKGIYGREMYETWYKMSVMIESGLDISSVITHRMHYTDFQKGFDAMNAGEASKVILNWD

SEQ ID NO: 42708 - DNA, 1032 bp, Vibrio sp. Ex25
  CDS (1)..(1032): transl_table=11
atgaaaattaaagcattatcaaagctaaagcctgaagaaggcatctggatgactgaggttgataaacctgaagttggccataacgatattctgatcaaaattaagaaaaccgctatctgtggtacagacgtacacatctacaactgggacgaatggtcacaaaagacaattccagttcctatggttgtcggtcacgaatacgtgggtgaagtggttgcgattggtcaggaagttcgtggctttgaaatcggtgaccgcgtatctggtgaaggtcacatcacttgtggtcactgccgtaactgtcgtggcggtcgtactcacttgtgtcgcaacacgatcggtgtgggtgtaaaccgtgaaggcgcatttgcagaatacctagtgattcctgcatttaacgcgtttaagatccctgacgagatttctgacgatctagcatcgatcttcgacccgttcggtaacgcggtacacactgcgctttctttcgatctagtcggtgaagacgtgctcatcactggtgctggcccaatcggtatcatggcagctgcagtcgcaaaacacgttggtgctcgccatgtggttatcacagacgttaacgaataccgtttagaacttgctcgtaagatgggcgtaacacgcgcagtaaacgttgcagaagagaagcttgaagatgtaatggctgaactaggcatgacagaaggctttgacgtaggcctagaaatgtctggtaacccagcggcattcaactcaatgctaaccacaatgaaccacggtggccgtattgcattactcggtattccaccatcagatatgggcattgattggaaccaagtgatcttcaaaggcttagttatcaaaggcatctatggtcgtgaaatgttcgaaacatggtacaagatggcttcactgattcaatctggtctggatctatcaccaattattacgcaccactacaagattgatgacttccaagaaggcttcgatgtcatgcgttcaggcatgtctggcaaagttatccttgattgggaataa

SEQ ID NO: 42709 - protein, 343 aa, Vibrio sp. Ex25
MKIKALSKLKPEEGIWMTEVDKPEVGHNDILIKIKKTAICGTDVHIYNWDEWSQKTIPVPMVVGHEYVGEVVAIGQEVRGFEIGDRVSGEGHITCGHCRNCRGGRTHLCRNTIGVGVNREGAFAEYLVIPAFNAFKIPDEISDDLASIFDPFGNAVHTALSFDLVGEDVLITGAGPIGIMAAAVAKHVGARHVVITDVNEYRLELARKMGVTRAVNVAEEKLEDVMAELGMTEGFDVGLEMSGNPAAFNSMLTTMNHGGRIALLGIPPSDMGIDWNQVIFKGLVIKGIYGREMFETWYKMASLIQSGLDLSPIITHHYKIDDFQEGFDVMRSGMSGKVILDWE

SEQ ID NO: 42710 - DNA, 1026 bp, Alteromonadales bacterium TW-7
  CDS (1)..(1026): transl_table=11
atgaaagcattatctaaattaaaagcagaaccgggtatctggatgacagatgcacctaagcctgaagtgggccataacgatctgttaattaaaatacgtaaaacagcgatttgtggcaccgacgttcatatttataaatgggacgagtgggcgagtaaaacaattcctacaccaatggttgttggtcatgagtacgttggtgaagtggttgatatgggtcaagaagttcgcggtttttcagtgggtgaccgggtatctggcgaaggtcatattacctgtgggcattgtcgaaattgtcgtgctgggcgtgtgcatttatgccgtaataccacaggtgttggtgttaaccgcgaaggcgcgtttgctgagtacttagtcattccagcatttaatgcatttaaaattccagacaacatatctgacgaattagcctctatttttgacccatttggcaatgctgtacacacagccctttcgtttgatctagtaggagaagatgtactaattactggtgccggtcctataggtattatggctgcagctgttgcaaaacatgtaggcgcgcgtcatgtagtaattactgatgttaacgagtaccgattagagcttgcccgcaaaatgggcgcaactcgcgcggtgaatgttgcaaatgaaaagcttgaagatgttatgaccgacctaggcatgacagaaggctttgatattggtcttgaaatgtcgggtgtgccaagtgcatttaattcaatgcttaataatatgaaccatggtggcaaaattgccatgctcggtattccaccatcagacatggcagtagattggaaccaagttatttttaaaggtttagtgattaaaggtatttatggtcgcgaaatgtttgaaacctggtacaaaatggcaagtttaatacagtcaggtcttaatttaagcccaatcattacacatcaatattctgtagatgacttccaagctggctttgatatgatgatttcaggtcagtcaggaaaagtaattttaaactgggattaa

SEQ ID NO: 42711 - protein, 341 aa, Alteromonadales bacterium TW-7
MKALSKLKAEPGIWMTDAPKPEVGHNDLLIKIRKTAICGTDVHIYKWDEWASKTIPTPMVVGHEYVGEVVDMGQEVRGFSVGDRVSGEGHITCGHCRNCRAGRVHLCRNTTGVGVNREGAFAEYLVIPAFNAFKIPDNISDELASIFDPFGNAVHTALSFDLVGEDVLITGAGPIGIMAAAVAKHVGARHVVITDVNEYRLELARKMGATRAVNVANEKLEDVMTDLGMTEGFDIGLEMSGVPSAFNSMLNNMNHGGKIAMLGIPPSDMAVDWNQVIFKGLVIKGIYGREMFETWYKMASLIQSGLNLSPIITHQYSVDDFQAGFDMMISGQSGKVILNWD

SEQ ID NO: 42712 - DNA, 1035 bp, marine gamma proteobacterium HTCC2080
  CDS (1)..(1035): transl_table=11
atgaaagcattggtaaaaaagcgcgcagaggaaggtctttggctcgaagatgtgcccattccggcaatcggtggcaatgacgtactcatcaaggtccacaaaacagcgatttgtggcacggacgtccatatttacaattgggatgcctgggctcaaaagacgataccagtgcccatggtcagtgggcatgagtttgctggagaaattgttgagctaggcagtaacgtcactgggctacaagtgggtgacatcgtttctggagaggggcacgttgtctgtggtcgatgtcgaaattgtctagccggtcgcttgcatttgtgccccaacacaatgggagtgggcgttaatcgtgacggggcttttgctgagtacctcgcgatacctgcgaccaacgtctttcgccccaatgtttatatcccgactgacttactaagcattttcgatccctacggaaatgccgtacacaccgccctctccttcaatatggttggcgaggatgtcatcattaccggggcaggtcccattggtattatggcggcgatggttgccgggcactgcggcgcacgcaacgtgatactgaccgacgttaatgagtacagactagatcttgccaagcggattgtgccgaaagtgcaaccaatcaacgtctcaaagcaagagatctcacgcaattttatggagagcctgggcatactcgagggttttgacgtttgtttggaaatgtcggggtctccggtagcgttccaagacgttttaagcaaaatgatcaacgggggcagcatcgccatgttaggcctaatgcccgatgacaccggtattgcttggactgatgtggtctttaagggtctcaatatcaaaggtatttacggccgggaaatgtacgagacttggtacaaaatggtgatgatggtgcagagcggtttgcccatagatcgcatcattacccaccgacttcactacaccgaatttcaggaaggcttcgacattatgcgttcagggcaatctggaaaaattatactcaactggaaggactga

SEQ ID NO: 42713 - protein, 344 aa, marine gamma proteobacterium HTCC2080
MKALVKKRAEEGLWLEDVPIPAIGGNDVLIKVHKTAICGTDVHIYNWDAWAQKTIPVPMVSGHEFAGEIVELGSNVTGLQVGDIVSGEGHVVCGRCRNCLAGRLHLCPNTMGVGVNRDGAFAEYLAIPATNVFRPNVYIPTDLLSIFDPYGNAVHTALSFNMVGEDVIITGAGPIGIMAAMVAGHCGARNVILTDVNEYRLDLAKRIVPKVQPINVSKQEISRNFMESLGILEGFDVCLEMSGSPVAFQDVLSKMINGGSIAMLGLMPDDTGIAWTDVVFKGLNIKGIYGREMYETWYKMVMMVQSGLPIDRIITHRLHYTEFQEGFDIMRSGQSGKIILNWKD

SEQ ID NO: 42714 - DNA, 1032 bp, Marinobacter sp. ELB17
  CDS (1)..(1032): transl_table=11
atgaaagcattggcatttcatgggcctggtaaacgcagctgggaagataagccgcagccggcgatcgaaaaacccacggatgcggtagtccgcatcactcataccaccatttgcggcaccgacctgcacatcctaaaaggcgatgtgcccgccgtagaagtaggtcgcatcctgggtcacgaagggctgggggtggtgacggaaatcggtgacggcgtaagcaacatccagattggcgacgaggtgctgatatcctgcgtcacttcctgcggtcgctgcgactattgcaagcgcggcgtctattctcattgccgcgacggaggctggattctcggtcatctaatcgacgggacccaagccgagtatgtacgcatcccccatgcggacaacagcctctacgtgttgcccgaagacatggaccgcgctgcagctgtcatgctcagcgatatcttgcccaccggacacgaaattggcgccctgaacggcgaggtcaagctcggtgacactgtggccattgtcggggctggccctataggactggcggcactgatgacctcacgcttctactccccagcgcgaatcatcatgattgatccggacgagaaccgcctggccatggccaagctgctcggcgccacggacaccatcgccagggacccaatcgaggccatccacaaaatgaccgatggtgaaggcgtggacgtggctatggaggcagtaggggtccccgaaacctttgatatctgccagagcattgttcgcgcgggcggtcatatcgccaacatcggcgtgcacggcaagagcgtcgaattcaagctgcaggacttgtggatcaagaacatcaccctacgcaccggcctggtgaataccaacaccattcctgtgctaatgcgggtggtcgaaagtggcggcgtcaagcccgaggagctggtcacgcatcgcttcaaactcgacgatatcgaaaaggcctacgatattttcagcgaagcggcaaaggagcaggccatcaagatgctgttgacggtcgaatga

SEQ ID NO: 42715 - protein, 343 aa, Marinobacter sp. ELB17
MKALAFHGPGKRSWEDKPQPAIEKPTDAVVRITHTTICGTDLHILKGDVPAVEVGRILGHEGLGVVTEIGDGVSNIQIGDEVLISCVTSCGRCDYCKRGVYSHCRDGGWILGHLIDGTQAEYVRIPHADNSLYVLPEDMDRAAAVMLSDILPTGHEIGALNGEVKLGDTVAIVGAGPIGLAALMTSRFYSPARIIMIDPDENRLAMAKLLGATDTIARDPIEAIHKMTDGEGVDVAMEAVGVPETFDICQSIVRAGGHIANIGVHGKSVEFKLQDLWIKNITLRTGLVNTNTIPVLMRVVESGGVKPEELVTHRFKLDDIEKAYDIFSEAAKEQAIKMLLTVE

SEQ ID NO: 42716 - DNA, 1047 bp, Pseudomonas sp
  CDS (1)..(1047): transl_table=11
atgctcgcgataaggaaaactaaagcagggccaggagggctatctgtcgatgatgtggccgcccctaaagaggcccacagtactgacgtgctggtgaaagttgaagcggccggtatctgtggtactgacttgttgatctataaatggggcgagttcgccaaaagaatgaaactccccactatcttgggtcatgaagttagcggggtgattgaacaggtcggatctgacgttaaaggtctaaggcctgggatgcgcgtcagtctggagagtcatctcccttgtggaacgtgctacacgtgtcgacgcggttgggcgcatgtttgtcctaagacgcggtatccgggggtcgactttgatggaggcttcgcgtctttcgttgtggttccggaaagcgtgtgttggccggtgccgtgcggaattcctccgctccaggcggcaatgatggagccgttcgggcttgcggtgcatgcaagtctggagggttctggggtttcgggattgaatgttcttgtttctggttgcggtccgatcggacttatgaacattgcagccgccaaagcactgggagcaagcaaggtcattgcaacggacattcatcctctgcgcctcactgcagcagccaaaatgggggcggatgaatgcattaatgcagctgaagagagcgtttataagactgtgcgttcgctgctcggtgagaggggagtagatgttgcaattgactattctgggcaagcagcggcgttaaaggagcttattcaatccatcacccatggtggtgagttgcgactgatgggcgtcccgtcacatgatattttgctcaacttagaggagtggcttttcaaaggccttattgtacgtggcctgcatggcaggcgcctgtatgaaacatgggagcgttcaactagcttattggttacagggcgtgttgatttgtcttcgctcgtatcgcatcgattgccactatcggcggcagaggatgcgttcgaaatggccctaaatggtcagtccttgaaaatcctgtttgagcccaatggctcatgtatctaa

SEQ ID NO: 42717 - protein, 348 aa, Pseudomonas sp
MLAIRKTKAGPGGLSVDDVAAPKEAHSTDVLVKVEAAGICGTDLLIYKWGEFAKRMKLPTILGHEVSGVIEQVGSDVKGLRPGMRVSLESHLPCGTCYTCRRGWAHVCPKTRYPGVDFDGGFASFVVVPESVCWPVPCGIPPLQAAMMEPFGLAVHASLEGSGVSGLNVLVSGCGPIGLMNIAAAKALGASKVIATDIHPLRLTAAAKMGADECINAAEESVYKTVRSLLGERGVDVAIDYSGQAAALKELIQSITHGGELRLMGVPSHDILLNLEEWLFKGLIVRGLHGRRLYETWERSTSLLVTGRVDLSSLVSHRLPLSAAEDAFEMALNGQSLKILFEPNGSCI

SEQ ID NO: 42718 - DNA, 1020 bp, Streptoalloteichus hindustanus
  CDS (1)..(1020): transl_table=11
gtgaaggcactgacgttcgtagcgcccggcgaggcggtcttcggcacccgcgcggtgcccgtccccgcccccggtgaggcgctggtccgcctcgggtacaactcgatctgcggcagcgacctgtcgctgtaccggggcgtctggcacggattcggctacccggtcgtgccgggtcacgagtggagcgggacggtcgtcgaggtcaacgggcccggcgacgagttggtcggccgggacgtggtcggcgacctcacgtgcccgtgcggcgcgtgtgccgcctgtcagcgcgggactccggtgctctgcgagaacctccaggaactcgggttcacccgggacggcgcgtgcgcggagtacatgaccatcccgacgcgcaacctgcaccggctgccggcggaactgtcgttgcgggtcgcctgccaggtggagccggtcgccgttgccctgcacgctctgtccactgtggacgtctcgcccggggagaaggtggccgtcctcggcgccggcgggatcggcctgctgttgtcacaggtggcgcgacaccggggcgcggtgatcaccaccgtcggcgagcccgtccccgagcgcagggcggtcgccgcccagctcggggcggcgacggtgacgaccggccgccccggcgagctggcggacctggtggccaaacgcccggagctgacccccgacgtcgtgctggaggcctccggctacccggtcgccctgcaggaggcgatcgaggtcgtgcgccccggcggccggatcggcgtggtgggctaccgggtcgaggagatcagcccgatggcgacccaccacgtcgccgtgaaggcgttgacgatccggggctcgctggggcccggcaaccggttccccgacgccatcgacctgctcgctcggcgcgagatcaacgtcgatccgctgctcagccacgagttcgcgctggccgaccacgcccgcgcgctggagctcgcgttgcgccgcaccgagggcaacatccgctcgttcttcaacctccgcgcctga

SEQ ID NO: 42719 - protein, 339 aa, Streptoalloteichus hindustanus
MKALTFVAPGEAVFGTRAVPVPAPGEALVRLGYNSICGSDLSLYRGVWHGFGYPVVPGHEWSGTVVEVNGPGDELVGRDVVGDLTCPCGACAACQRGTPVLCENLQELGFTRDGACAEYMTIPTRNLHRLPAELSLRVACQVEPVAVALHALSTVDVSPGEKVAVLGAGGIGLLLSQVARHRGAVITTVGEPVPERRAVAAQLGAATVTTGRPGELADLVAKRPELTPDVVLEASGYPVALQEAIEVVRPGGRIGVVGYRVEEISPMATHHVAVKALTIRGSLGPGNRFPDAIDLLARREINVDPLLSHEFALADHARALELALRRTEGNIRSFFNLRA

SEQ ID NO: 42720 - DNA, 1089 bp, Aedes aegypti
  CDS (1)..(1089)
atggcaaaacggtcaaacattggcgcggtgattcacggtgtcgacgatatgcgaatggagcaagtcccgattccaacgccgcgtgacaacgaagtcctgctggagatcgattgcgtcgggatatgtggatcggatgtgcacgtactttcccacggtggattcggcgagtacgtcctgaagaagcccatggttattgggcacgagtcgtccggtgtggtgatcggtgtcggtaagggcgtgaagcgtctcaaagtaggtgatcgcgtcgcactcgagcctgccataggctgtaaggtgtgcaagctgtgtaaggccggtcggtacaacctctgcccggatggcatctacagcgcaactccaccaatccacggatctcttcaaaactattacacccacccggaggattgctgcttcaagttacccccgaacgtgacgatggaggaaggctcgcttttggaaccgcttgccgtcggagttcacagctgtcgcatagcgaatgtccaactgggctcaagtgttctagttctgggcgctgggccaatcggcatggtctccatcttggtagcaaaagcaatgggggccgcgaaagtttgcgtgatcgacctggttcaaagtaagctggatattgccaaggagattggagcggacttcacgttgcagattcagaagggcgacaaagaagataacattgtcaagaagattcatggtctcatgggatgcgccccggatatcgccatcgaatgcaccggtgcggagccctgtgttcgtctggcaattttggccacggaactcggaggcgtcgttacgatggtgggcatcggaaacaccaacatgaacctaccgataacgatcgcgctggtgcgagaggtagaaatccgatccggattccggtatgccaacgcttacccggctgctctggccatggtcgcaaacggaacgattgacgcaacacgacttatcacacatcacttcaacctggaggattcggtagaggcgttcaaaacggctcgctacggcctgggggatgcgatcaaggtcatgatccactgtcaacctcgtaacaaaaataacccggtgaaaaagctatga

SEQ ID NO: 42721 - protein, 362 aa, Aedes aegypti
MAKRSNIGAVIHGVDDMRMEQVPIPTPRDNEVLLEIDCVGICGSDVHVLSHGGFGEYVLKKPMVIGHESSGVVIGVGKGVKRLKVGDRVALEPAIGCKVCKLCKAGRYNLCPDGIYSATPPIHGSLQNYYTHPEDCCFKLPPNVTMEEGSLLEPLAVGVHSCRIANVQLGSSVLVLGAGPIGMVSILVAKAMGAAKVCVIDLVQSKLDIAKEIGADFTLQIQKGDKEDNIVKKIHGLMGCAPDIAIECTGAEPCVRLAILATELGGVVTMVGIGNTNMNLPITIALVREVEIRSGFRYANAYPAALAMVANGTIDATRLITHHFNLEDSVEAFKTARYGLGDAIKVMIHCQPRNKNNPVKKL

SEQ ID NO: 42722 - DNA, 1077 bp, Aedes aegypti
  CDS (1)..(1077)
atggctaaggacaatttaaccgccgttctttacggtattgaggacttgagattggagcaacgtcccatcccaacgccgaaggatgatgaggttcttttggatatggactgcgttggaatctgcgggtcagatgtacactatctggtcagaggacgatgcggtgacttcgtggttcagaaaccgatggtgataggccacgaagcatcaggtgtcgtgtcgaaggtgggttcaaatgtgaaacacctaaaggccggtgatcgagtggcgattgagcctggctacggttgccgagtttgcgacttttgtaagggcggtcgctataacctgtgtgcggacatgatcttttgtgcaacgccgccctacgatggtaacctggcccggcactatactcatccggctgatttctgctacaaattaccgccgcatgtgaccatggaggaaggggccctgcttgagcctctgtctgttggagtccatgcgtgtcgcagagctggcgttggattaggatcggaagtgttgattctcggtgccggtccgattggattggtgacgctcatcacggcgaaatctatgggagcaggtaaggtcgtggtgacggatctgctgcagaatcgtttggacgtggccaaagaattgggagctgatggaaccctggtggttgaggtgggagccaacgaaatggaagtggtgaagaaggttcatgatctgttcggaggcgaacctgataaaactatcgactgcagtggagccgaggccacttcgcggctgtcggttttggccacccggtccggaggttgtgccgttttggttggcatgggagcctcggaagtcaaactccctctggcgaacgcactggcacgtgaagtcgacattcgtggagtattccgctactgcaatgactatccagcggcgttgagtctggtggcgagtggaaaaatcgacgttaagcgcctgataacacaccacttcaacatcgaggaaacggcagaagctttcaatacctctcgacatgggcttggtggcgccatcaaggttatgattcacgtgcagcccaaggacaaaaacaatccaaagtga

SEQ ID NO: 42723 - protein, 358 aa, Aedes aegypti
MAKDNLTAVLYGIEDLRLEQRPIPTPKDDEVLLDMDCVGICGSDVHYLVRGRCGDFVVQKPMVIGHEASGVVSKVGSNVKHLKAGDRVAIEPGYGCRVCDFCKGGRYNLCADMIFCATPPYDGNLARHYTHPADFCYKLPPHVTMEEGALLEPLSVGVHACRRAGVGLGSEVLILGAGPIGLVTLITAKSMGAGKVVVTDLLQNRLDVAKELGADGTLVVEVGANEMEVVKKVHDLFGGEPDKTIDCSGAEATSRLSVLATRSGGCAVLVGMGASEVKLPLANALAREVDIRGVFRYCNDYPAALSLVASGKIDVKRLITHHFNIEETAEAFNTSRHGLGGAIKVMIHVQPKDKNNPK

SEQ ID NO: 42724 - DNA, 1086 bp, Aspergillus oryzae
  CDS (1)..(1086)
atgagtgagagcatccgccaagtcatagaacttaacccatcattggtgctcaaagctgtccaacagctcgagttcgaggaccgcccggtaccagacttgttggagccctacgatgtttccgtgcggattgaatatacagggatatgcggcaacgatgtccactactggcagcgcggccgaattggccaattcatcctcgaaaagccgatggtgctaggccacgagtcagccggagtagtagagaaggtcggctccaaagtgaaatcactagcagtgggcgatcatgttgccctagaacccggagtgccctgtcggcgatgcacgttttgcaaagcggggaactacaacctgtgcagcgagatggcatttgctgctactcccccctttgatggcaccttggccaagtattatgttttgccagaggacttttgctacaagctccctacgaatgttagcttgcaagaaggcgccgttgtggaaccccttagtgttgcagtgcatctcgttcgacaggccgcgctgcagccagggcagtcggtagtggtatttggtgcaggacccgtcggccttttgtgctgtgcggtggctcgagcttttggggcttccaaggtaattgtcgttgatgtgcagcctaagcgattggaatttgcccgtgcctatgcggcaactgctcattttctcccgggcgtggagacctctccggcggataacgctgttcggcttcgagaagagaacgaactcgaaatgggcgcggatgttgtcatcgaggcctccggtgcagagccatcggtctacacaggtatccatatcttgagacctggtggaacgtatgttcaaggaggaatgggaaaggaggaagttaagtttccaatcacggcggcatgcacgaaggagctcaatattcggggaagttttcgatattcgagtggcgattataagctcgctattgagctaatcgcggctgggaaaatcaacgttaaggccctgatcacacaagttttcaagtttgaggatgcaccgcgggcgtttgaggaggtgaagtcagggaaagggattaagacactcattgcaggcccgggagtctga

SEQ ID NO: 42725 - protein, 361 aa, Aspergillus oryzae
MSESIRQVIELNPSLVLKAVQQLEFEDRPVPDLLEPYDVSVRIEYTGICGNDVHYWQRGRIGQFILEKPMVLGHESAGVVEKVGSKVKSLAVGDHVALEPGVPCRRCTFCKAGNYNLCSEMAFAATPPFDGTLAKYYVLPEDFCYKLPTNVSLQEGAVVEPLSVAVHLVRQAALQPGQSVVVFGAGPVGLLCCAVARAFGASKVIVVDVQPKRLEFARAYAATAHFLPGVETSPADNAVRLREENELEMGADVVIEASGAEPSVYTGIHILRPGGTYVQGGMGKEEVKFPITAACTKELNIRGSFRYSSGDYKLAIELIAAGKINVKALITQVFKFEDAPRAFEEVKSGKGIKTLIAGPGV

SEQ ID NO: 42726 - DNA, 1521 bp, Malus domestica
  CDS (136)..(1242)
gaattcggcacgagaacaagtccgtgtattccgtgtattccgtgtcttctgtgtccattttatttggagaagaaagaagtttgtgtcttctaaacacagataaacgccctagaaaaaaccagagaagagtaaaaaatgggcaagggaggccaatcctgcaatggcatggttagagatgtcaaacctgtggagaaggaaaacatggctgcttggctcgttgatgttaacaccatcaagatcctacctttcaagctccccactattggaccgaatgatgttcaaattcgaattaaggctgtcggcatttgcggaagtgatgttcactacctcaagaccatgaaatgtgcggattttgaggttaaagagccgatggtgatcggacatcagtgtgctgggatcgtagacaaagttgggagcgaggtgaagcatctggtgcccggtgaccgagtggcggttgagcccggcatcagctgcgcacattgccagcagtgcaaaggaggccgctacaatctctgtcccgacatgaagtttttcgccaccccaccggttcacggtgccttggctaatcagattgtcgaccctgcagatctgtgctttaaactgcccgaaaacgtgagcttggaggaaggagcaatgtgtgagcccttgagtgttggggttcacgcttgtcggcgagccaatgttggtcccgaaacaactgttctgatcgtcggtgcagggccgattgggctggtttccgtgctcgctgctcgtgctttcggagcaccaagaattgtcatcgtagatatggatagtaagcgtttagccgtggccaagtctctgggagctgatggaaccgtcaaagtttcacgaaaaatggaggatttagatgacgaagttgccaagattaaagaaaccatgggagccgaagttgatgtgaccttcgactgtgtgggtttcaacaaaaccatgtctacgggcctcaatgctactcgtcccggcggcaaagtttgccttgtaggaatggggcacagcatgatgacagtccctctgacagccgctgcagccagggaggttgacgtggttggagttttccggtgtaagaacacatggcctctttgccttgagtttttgagaagcgggaagatcgacgtgaagccgcttattacccaccggtttggatttaccgagaaggaggtggaagaagcatttgcaaccagtgctcgtgggggtgacgccattaaagtcatgtttaatctatagtaaataaatcattaagtttctgaattttggattcgtcgagaggacaagtttttgtgatggtttggaaaattggaagtcatcgtctcggatgaagaatggtcttgtttttaagttccgggaaacttgttgatgtacagagaccattgtatagctgtattagatctcggcatgcaccacactagtaaattcattatttaacatgagtccatcaatacatgttaactatgtgcgtacgtatgcatgtaactaaattgtcttcaatataaatcattttctacc

SEQ ID NO: 42727 - protein, 368 aa, Malus domestica
MGKGGQSCNGMVRDVKPVEKENMAAWLVDVNTIKILPFKLPTIGPNDVQIRIKAVGICGSDVHYLKTMKCADFEVKEPMVIGHQCAGIVDKVGSEVKHLVPGDRVAVEPGISCAHCQQCKGGRYNLCPDMKFFATPPVHGALANQIVDPADLCFKLPENVSLEEGAMCEPLSVGVHACRRANVGPETTVLIVGAGPIGLVSVLAARAFGAPRIVIVDMDSKRLAVAKSLGADGTVKVSRKMEDLDDEVAKIKETMGAEVDVTFDCVGFNKTMSTGLNATRPGGKVCLVGMGHSMMTVPLTAAAAREVDVVGVFRCKNTWPLCLEFLRSGKIDVKPLITHRFGFTEKEVEEAFATSARGGDAIKVMFNL

SEQ ID NO: 42728 - DNA, 1457 bp, Prunus persica
  CDS (197)..(1300)
tcattcagaaagtactcatcgtttgtctttcttaccttcaggccttcacacacccgttctctctctctctttgtttttcaagttcttctctttccttcaagttcttctctttctttcaatttcttgcctttcaaacgcccagattccctcgtttctcttctcttttctttcaaccacaaaacagagcaagtaaaaaatgggcaagggagggatgtcttctcagggaggggctctagaagcccatgttgaacaagaaaacatggctgcttggctggtgggtgtgaacaccctcaggattcaacctttcaagctccctactgttggtcccaatgatgtcagagtcaagataaaggctgttgggatatgcggaagtgatgtccactaccttaagaccatgaaatgtgcagactttgttgttcaagagccaatggtaattgggcatgaatgtgctgggatcgttgacgaagttggtagcttggtgaagaatctggtgcccggagatcgcgtggctctagagcccggcatcagctgctggagatgtgagcagtgcaagggcgggcgatacaatctctgccctgacatgaagttcttcgccaccccaccagtccacggctcattggcaaatcagattgtgcaccctgcagatctgtgcttcaagctcccggagaatgtgagtttggaagaaggcgccatgtgcgagcctctgagtgttggtgttcatgcctgtcggcgagccaacatcggcccagaaacaaatgtcctggtgatcggagcagggccaatcgggcttgtgtcggtgctctctgctcgtgcttttggggcggccagaattgtcattgtggatgtggatgatgagcgcttatccattgcaaagtctctcggcgccgacgacgccgtcaaagtctccacaaaccctcaggatttagaagatgaagtttctaagataagtaaggccatgaaaggtggagtagatgtgagctttgactgcgtgggttttaataaaactatgtcaacggccctcagcgccacccgtccgggcggcaaagtttgcctcgtgggcatgggtcacggcgtcatgactgtccccctcacacctgccgctgccagggaagttgatgtggttggaatattccggtacaagaacacatggccgctgtgcctcgagtttttgagaaccggtaagatcgatgtgaagcccctcataacgcaccgtttcggattctcccagaaggagattgaagaagccttcgaaaccagcgcgcgtggcggaaatgccataaaagtcatgtttaatttgtaaagttgagagagctactacaagtttttaccttatccaatttcttattagaaaggtcggcgagaacattatccgttaacaaggcattgttgaataagtgccattgtatgaattaaacaataataaatattaatagtatttttgtaaaaaaaaaaaaaaa

SEQ ID NO: 42729 - protein, 367 aa, Prunus persica
MGKGGMSSQGGALEAHVEQENMAAWLVGVNTLRIQPFKLPTVGPNDVRVKIKAVGICGSDVHYLKTMKCADFVVQEPMVIGHECAGIVDEVGSLVKNLVPGDRVALEPGISCWRCEQCKGGRYNLCPDMKFFATPPVHGSLANQIVHPADLCFKLPENVSLEEGAMCEPLSVGVHACRRANIGPETNVLVIGAGPIGLVSVLSARAFGAARIVIVDVDDERLSIAKSLGADDAVKVSTNPQDLEDEVSKISKAMKGGVDVSFDCVGFNKTMSTALSATRPGGKVCLVGMGHGVMTVPLTPAAAREVDVVGIFRYKNTWPLCLEFLRTGKIDVKPLITHRFGFSQKEIEEAFETSARGGNAIKVMFNL

SEQ ID NO: 42730 - DNA, 1047 bp, Bombyx mori
  CDS (1)..(1047)
atgaccgagaactacgctgctgtgttacacggagccaacgacgtcagaatcgagaaaattccagtgcccgagataaacgatgacgaggttttaataaagatagactgtgtcggcatatgcggttctgatgtcaagttatacagcacgggtacgtgtggagcggatgttatcgacaaaccgattgtcattggtcacgaaggtgccggaactgtggtcaaggtaggagacaaagtaagcagtttgagagtgggcgacagagtggcaatagaaccgacgcagccgtgtcggtcctgtgagctgtgcaagcgagggaagtacaatttgtgtgtggagccacgttattgctcctcgatgggcgctccgggaaacctatgccgttactacaagcacgtcgccgatttttgtcataaattaccagacaatctaacaatggaggaaggggcagcggtccagccgctcgccatcgtgatccacgcctgcaaccgcgccaagataactctcggatctaagatcgttatccttggggccgggcctattggtattttgtgtgctatgtcggccaaagcaatgggagctagcaaaattattttaacagacgtagttcagtcacgcttagacgcagcactggagttgggagctgataacgtcctcctcgtccgtcgggagtacactgacgaggaggttgtagaaaaaattgtgaagttgctcggtgaccgcccggatgtgtcaatcgatgcgtgtgggtacgggtcggcgcagagagtcgctctactggtgactaagacagcgggcttggtgttggtggtcggcatagctgacaaaacggtggagctgccgctctcacaagcgctgctcagagaagttgacgttgtagggtcctttcgtattatgaacacgtaccagcccgccctggccgcggtgtcctccggggccatccccttggacaagttcatcactcatcgcttcccgttgaacaagaccaaagaagcactggatttagccaaatctggtgccgccatgaaaatactcatacacgtgcaaaattaa

SEQ ID NO: 42731 - protein, 348 aa, Bombyx mori
MTENYAAVLHGANDVRIEKIPVPEINDDEVLIKIDCVGICGSDVKLYSTGTCGADVIDKPIVIGHEGAGTVVKVGDKVSSLRVGDRVAIEPTQPCRSCELCKRGKYNLCVEPRYCSSMGAPGNLCRYYKHVADFCHKLPDNLTMEEGAAVQPLAIVIHACNRAKITLGSKIVILGAGPIGILCAMSAKAMGASKIILTDVVQSRLDAALELGADNVLLVRREYTDEEVVEKIVKLLGDRPDVSIDACGYGSAQRVALLVTKTAGLVLVVGIADKTVELPLSQALLREVDVVGSFRIMNTYQPALAAVSSGAIPLDKFITHRFPLNKTKEALDLAKSGAAMKILIHVQN

SEQ ID NO: 42732 - DNA, 1032 bp, Burkholderia mallei
  CDS (1)..(1032): transl_table=11
atgaaagcgctggcgaaactcgaacgcgggccgggcctcacgctcacccgtgtgaaaaagccggaggtcggccacaacgacgtcctcatcaagatccgccgcaccgcaatctgcggcaccgacatccatatctggaagtgggacgactgggcgcagaagacgattccggtgccgatgcacgtcggccacgagtacgtcggcgagatcgtcgagatgggccaggaagtgcgcggcttctcgatcggcgatcgcgtatccggcgaaggccacatcacgtgcggcttctgtcggaactgccgcgcggggcggcgccatttgtgccgcaacacggtgggcgtcggcgtgaatcgcgaaggcgcgttcgccgagtacctcgcgattcccgcgttcaacgcgttcaagattccgcccgagatctccgacgatctcgccgcgatcttcgatccgttcggcaacgcgacgcacaccgcgctgtcgttcaacctcgtcggcgaggacgtgctgatcacgggtgcggggccgatcggcgtgatggcggtggcgatcgcgaagcacgtcggcgcgcgcaacgtcgtcatcaccgacatcaacgactatcgcctcgaactcgcgcgcaagatgggcgcgacacgcgcggtgaacgtgtcgcgcgaatcgctgcgcgacgtgatggccgacctgcacatgacggagggcttcgacgtcgggctcgagatgtccggcgtgccgagcgcgttcacgtcgctgctcgaatcgatgaatcacggcggcaaggtcgcgctgctcggcattccgcccgcgcagaccgcgatcgactggaaccaggtgatcttcaagggcctcgagatcaagggcatctatgggcgcgagatgttcgagacgtggtacaagatggtcgcgatgctgcaaagcgggctcgatctttcgccgatcatcacgcaccgcttcgccgtggacgactacgagaaaggtttcgctgcgatgctgtcgggcgaaagcggcaaggtgattctcgactgggccgacgcgtga

SEQ ID NO: 42733 - protein, 343 aa, Burkholderia mallei
MKALAKLERGPGLTLTRVKKPEVGHNDVLIKIRRTAICGTDIHIWKWDDWAQKTIPVPMHVGHEYVGEIVEMGQEVRGFSIGDRVSGEGHITCGFCRNCRAGRRHLCRNTVGVGVNREGAFAEYLAIPAFNAFKIPPEISDDLAAIFDPFGNATHTALSFNLVGEDVLITGAGPIGVMAVAIAKHVGARNVVITDINDYRLELARKMGATRAVNVSRESLRDVMADLHMTEGFDVGLEMSGVPSAFTSLLESMNHGGKVALLGIPPAQTAIDWNQVIFKGLEIKGIYGREMFETWYKMVAMLQSGLDLSPIITHRFAVDDYEKGFAAMLSGESGKVILDWADA

SEQ ID NO: 42734 - DNA, 1026 bp, Chromobacterium violaceum
  CDS (1)..(1026): transl_table=11
atgaaggcgcttgccaagctgaaggccgctcccggcctggaaatgaccgatgttccgctgccggaagtcggccacaacgatctgttgatcaagatcgtcaagaccgcgatctgcggcaccgacatccatatctggaactgggacgagtggtcgcagaagaccatcccggtgccgatgcacgtcgggcacgagtacgtcggcgtcgtcgccggcatgggttcggaagtgcagggcttcaagatcggccagcgcgtgtccggcgaaggccacatcacctgcggctattgccgcaactgccgcgccggccgccgccacctgtgccgcaacaccaccggcgtcggcgtcaaccgcgaaggcgcgttcgccgaatacctggtgattccggccttcaatgccttcccgatcccggacgacatctccgacgacctggcctccatcttcgacccgttcggcaatgccgtgcacaccgcgctgtcgttcaacctggtgggcgaggacgtgctgatcacaggcgccggcccgatcggcatcatggcggtggccatcgccaagcatgtcggcgcgcgccatgtcgtcatcaccgacgtcaacgactaccggctggagctggcgaagaagatgggcgccacccgtgccgtcaacgtcgcccgcgaggacctgaaggcggtgatgcaggagctgcacatgagcgagggcttcgacgtgggcctggaaatgtccggcaatccgcaggctttccgccagatgctggaaacgatgaaccacggcggcaaggtggcgctgctgggcattccgccgtccaataccgccatcgactggaaccaggtgatcttcaagggcctggaaatcaagggcatttacggccgcgagatgttcgagacctggtacaagatggtggccctgatccagtccggcctggacatcagtcctatcatcacccaccacttcaaggtggacgagttcgagcagggcttcgccgcgatgctgtccggccagagcggcaaggtgatcctggactggcgctga

SEQ ID NO: 42735 - protein, 341 aa, Chromobacterium violaceum
MKALAKLKAAPGLEMTDVPLPEVGHNDLLIKIVKTAICGTDIHIWNWDEWSQKTIPVPMHVGHEYVGVVAGMGSEVQGFKIGQRVSGEGHITCGYCRNCRAGRRHLCRNTTGVGVNREGAFAEYLVIPAFNAFPIPDDISDDLASIFDPFGNAVHTALSFNLVGEDVLITGAGPIGIMAVAIAKHVGARHVVITDVNDYRLELAKKMGATRAVNVAREDLKAVMQELHMSEGFDVGLEMSGNPQAFRQMLETMNHGGKVALLGIPPSNTAIDWNQVIFKGLEIKGIYGREMFETWYKMVALIQSGLDISPIITHHFKVDEFEQGFAAMLSGQSGKVILDWR

SEQ ID NO: 42736 - DNA, 1029 bp, Coxiella burnetii
  CDS (1)..(1029): transl_table=11
atgaaagtactttccaaactaaaaccagcccctggcctctggctccacaaggcaccaacgcctaaacccggccgggacgaagtattaattaaaattaaaaaaaccgccatttgcggcacggatttgcatatttataaatgggatgaatgggcgcaaaaaaccattcctgtccccatgcacgtcggccatgaatttgttggtgaaatcgtggaggtaggcgaggccgctagcgcgttggcggttggagatcgggtttcaggggaaggacacatcacgtgcggggattgtcgtaattgtcgcgccggtaagcgccatttgtgtcgctacaccgtaggcgttggcgtaaatcgtcccggcgcgtttgcggaatatttagttatccccgctaaaaatgcgtataaaattccggcaaaaattagcgatgatatcgctgccattttagatcctttcggcaacgccgcacattccgcgttggagtttgatttagtgggcgaagatgtattaattaccggcgcaggccccgtcggattgatgtcagcagccattgcgcggcacgtcggggcgcggcatgtagtgataacggatgtcaatgattaccgtttagctttagccgaaaaagtgggcgtaaccgctgccgttaactcgacaaaaactcccttaacggagacgatgaaaaatcttgggatgacagagggttttgatgtcggtcttgaaatgtcaggaaacgctgaggcttttcgcagcatgttaacggtaatgaataacggcgggaaaatcgcctttttgggtatcccaccggaaccgtttgcgattgattggaatcaagtcgttttcaaaagcttattgataaaagggatttatggacgccgcatgtttgagacgtggtataaaatgactaatttattactaagcgggttagacatttcacccatcatcacgcatgagtttccgatgaaggattttcaacaagcatttgatgtaatgctgtcgggtaaaacaggcaaagtgattttgaattgggagcaatga

SEQ ID NO: 42737 - protein, 342 aa, Coxiella burnetii
MKVLSKLKPAPGLWLHKAPTPKPGRDEVLIKIKKTAICGTDLHIYKWDEWAQKTIPVPMHVGHEFVGEIVEVGEAASALAVGDRVSGEGHITCGDCRNCRAGKRHLCRYTVGVGVNRPGAFAEYLVIPAKNAYKIPAKISDDIAAILDPFGNAAHSALEFDLVGEDVLITGAGPVGLMSAAIARHVGARHVVITDVNDYRLALAEKVGVTAAVNSTKTPLTETMKNLGMTEGFDVGLEMSGNAEAFRSMLTVMNNGGKIAFLGIPPEPFAIDWNQVVFKSLLIKGIYGRRMFETWYKMTNLLLSGLDISPIITHEFPMKDFQQAFDVMLSGKTGKVILNWEQ

SEQ ID NO: 42738 - DNA, 1047 bp, Deinococcus radiodurans
  CDS (1)..(1047): transl_table=11
atgcgggccctgagcaagcagcagcccggcgagggcatctggatgatcgaaaccgaggtgccgacgcccggtcccaacgacctgctgattcgaattcgcaaggggagcatctgtggaaccgacgtgcacatctacaagtgggacgactgggcgagccagacggtgccggtgccgatggtcgtcgggcacgaatacgtgggtgtggtcgcgggcatgggctcggaagtgcgcggcttcgaaatcggcgaccgggtgagcggcgagggccacgtcacctgcgggcactgccgcaactgccgcgccgggcgccgccacctgtgccgcaacacgcagggggtgggcgtcaaccgccccggctccttcgccgagtatctggtgctgcccgccttcaatgccttcaagctgcccgacgacattcccgacgatgtcgccgctattttcgaccccttcggcaacgcggtgcacacggcgctgagcttcgacctggtgggcgaggacgtgctgattaccggcgccgggcccatcggctgcatggccgccgccgtcgcccggcacgtgggcgcccgcaacgtggtgattaccgacgtgaatgactaccgtctcgacctcgcgcggcagatgggcgtgacccgcgccgtgaatgtggcccgcgaggacctctggacggtggcgacgcaggaactcgacatgcacgagggcttcgacgtgggcatggaaatgagcggctcggggcctgccttcgcgcagatggtcagcgtgatgaacaacggcggcaaagtcgcgctgctcggcattccctcgggcgaggtgcagatcgattggaacgccgtcatcttcaagatgctcaccatcaagggcatctatggccgcgagatgttcgaaacctggtacaagatggccgccctgattcagtcgggcctggacctcacgccggtcatcacccaccactacggcatcggcgactttcagcagggcttcgacgccatgctcagcgggcagagcggcaaagtgattctggactgggagacggaagagcaaagcgcctga

SEQ ID NO: 42739 - protein, 348 aa, Deinococcus radiodurans
MRALSKQQPGEGIWMIETEVPTPGPNDLLIRIRKGSICGTDVHIYKWDDWASQTVPVPMVVGHEYVGVVAGMGSEVRGFEIGDRVSGEGHVTCGHCRNCRAGRRHLCRNTQGVGVNRPGSFAEYLVLPAFNAFKLPDDIPDDVAAIFDPFGNAVHTALSFDLVGEDVLITGAGPIGCMAAAVARHVGARNVVITDVNDYRLDLARQMGVTRAVNVAREDLWTVATQELDMHEGFDVGMEMSGSGPAFAQMVSVMNNGGKVALLGIPSGEVQIDWNAVIFKMLTIKGIYGREMFETWYKMAALIQSGLDLTPVITHHYGIGDFQQGFDAMLSGQSGKVILDWETEEQSA

SEQ ID NO: 42740 - DNA, 1026 bp, Idiomarina loihiensis
  CDS (1)..(1026): transl_table=11
atgaaagctttatcaaaactgcacgcaaaacccggcatttggatgaccgacgtggaaaagccggaatgcggttacaacgatttgctgattaaaattaagaaaaccgccatttgcggtaccgatgttcacatttataaatgggacgactggtcgcagaaaaccattccggtgcctatggtggtcggccacgagtacgtgggtgaagttgccgctatgggcgacggtgttcgtggctttgaaattggcgaccgcgtttccggagaaggtcacattacctgtggtcactgtcgtaactgtcgcgccggccgtcgtcacttatgccgcaatacctatggtgtgggtgtgaatcgtccgggtgcttttgcagaatacctggcactgccagctgaaaacgcttttaaacttccagatgacgttactgatgaaatggcagctgtatttgacccatttggtaatgcggttcacaccgccctggcttttgacctggtgggtgaagacgtgctgattaccggtgcgggtcctattggtattatggcagcagccgttgcccgtcacgttggcgcacgccacgtggttattaccgacgtcaacgaataccgcctggacttagctcgtaaaatgggcgttacccgcgcagtggacgttagcaaagagaagctgtccgacgtaatgactgaactaggcatgaaagaaggttttgatgtgggtctggaaatgtcaggtgtgccatcagctttctcacaaatgctggaaaccatgaaccatggcggcaaaattgccatgctgggcattccgcctgaaaatatcgctatagactggaaccaggttatttttaaaggtctggttattaaaggcatttatggccgcgagatgtttgaaacctggtacaaaatggccagcttgctgcagtccgggctggatatttcgcctattttaacgcacgaaatgcctattgatgactttgagaaaggctttgaaaccatgatttcaggccagtccggcaaagtcatactgaactgggattaa

SEQ ID NO: 42741 - protein, 341 aa, Idiomarina loihiensis
MKALSKLHAKPGIWMTDVEKPECGYNDLLIKIKKTAICGTDVHIYKWDDWSQKTIPVPMVVGHEYVGEVAAMGDGVRGFEIGDRVSGEGHITCGHCRNCRAGRRHLCRNTYGVGVNRPGAFAEYLALPAENAFKLPDDVTDEMAAVFDPFGNAVHTALAFDLVGEDVLITGAGPIGIMAAAVARHVGARHVVITDVNEYRLDLARKMGVTRAVDVSKEKLSDVMTELGMKEGFDVGLEMSGVPSAFSQMLETMNHGGKIAMLGIPPENIAIDWNQVIFKGLVIKGIYGREMFETWYKMASLLQSGLDISPILTHEMPIDDFEKGFETMISGQSGKVILNWD

SEQ ID NO: 42742 - DNA, 1032 bp, Photobacterium profundum
  CDS (1)..(1032): transl_table=11
atgaaaattaaagcgctgtcaaaactaaagcctgaagaaggcatctggatgaatgaagtagacaagcctgaaatgggccataatgatctacttattcgtattaagaaaaccgctatttgtggtacagatgtacatatctacaactgggatgaatggtcacaaaagacgattccagttccaatggttgtaggtcatgaatatgttggcgaagttgttggtattggccaagaagttcgtggttttacaatcggtgatcgtgtgtctggtgaaggtcatattacatgtggtcattgccgtaattgtcgtggtggtcgtacacacctttgtcgtaatacgacaggcgttggtgttaaccgtgatggcgcatttgctgagtttttggttattcctgcattcaatgcgttcaagatccctgcaggtatctctgacgatctagcatcaatcttcgacccgtttggcaatgctgttcatactgcattatcattcgatcttgttggtgaagatgtgctaattacaggtgctggtcctattggtattatggctgctgctgtcgctaaacacgttggtgcacgccatgttgtgattaccgatgtgaacgaataccgtctagatcttgctcgtaaaatgggcgtgactcgcgctgttaacgtagcaaacgaaaaacttgaagatgtaatgtctgaacttggcatgacagaaggttttgacgttggtttagaaatgtctggcgtaccatcagcatttaacggcatgctagctagcatgaaccacggtggtaaagtggcgttgttgggtattccaccatcagacatggcagtagattggacccaagttatctttaaaggtttggttattaaaggtatctacggccgtgaaatgtttgaaacttggtacaagatggcaagcttgattcaatcaggcttagatctaacaccaattatcacgcaccattacaaaattgatgatttccaaaaaggctttgacatgatgcgttcaggcatgtcaggtaaagttattctcgattgggaataa

SEQ ID NO: 42743 - protein, 343 aa, Photobacterium profundum
MKIKALSKLKPEEGIWMNEVDKPEMGHNDLLIRIKKTAICGTDVHIYNWDEWSQKTIPVPMVVGHEYVGEVVGIGQEVRGFTIGDRVSGEGHITCGHCRNCRGGRTHLCRNTTGVGVNRDGAFAEFLVIPAFNAFKIPAGISDDLASIFDPFGNAVHTALSFDLVGEDVLITGAGPIGIMAAAVAKHVGARHVVITDVNEYRLDLARKMGVTRAVNVANEKLEDVMSELGMTEGFDVGLEMSGVPSAFNGMLASMNHGGKVALLGIPPSDMAVDWTQVIFKGLVIKGIYGREMFETWYKMASLIQSGLDLTPIITHHYKIDDFQKGFDMMRSGMSGKVILDWE

SEQ ID NO: 42744 - DNA, 1038 bp, Propionibacterium acnes
  CDS (1)..(1038): transl_table=11
atgaaggctttggtcaagacccgcccggagccgggtctggagctggtggaggtccccgacccggtcgctggccccaacgacgtcatcgtcaaggtgatgcggacaggaatctgtggcaccgacgttcacatcgataaatgggacgggtgggccgccaagacggtgcacaccccgctggtcctcggccacgagttctgcggtgagattgttgaactcggttcggaggtcaatgatctggaggtcggacagttcgtctccggcgaggggcactatgtctgcggacgctgccgggcctgcctagcgggcaaacgtcacctgtgccgcaacacccaaggtattggatatgcggtcaacggtgcctactgccagtacttcgtcatgccggctggcaacgtctgggtacatcacatcccggaccttgaccccgacgtcgcggcgatctttgacccgttcggcaatgccgtacacaccgccttgcagttcccctgcctggccgaggatgtcctcgtttcaggtgctgggccgatcggcatcatggcggccctggtcgctcagttccaaggggcgcgcaatgtcgtcgttaccgacctgtccgacgagaggctggagctggctcagcaactgggcctgaagaacgccgtcaatgtttcccgcgaaggtttggagacggtctgggaccgattcgacatgaaggaggggtttgacatcggcctggagatgtccgggtcggggacagctttaacatccatgattgacaatatgactcatggtggacggattgcgttgctgggaaccccgagcactgacatcaccctcgacttttccaagatcatctttaacatgatcacaattcagggagtgaccgggcgtcagatcttcgaaacgtggtacaccatggcctccctcatccgttccggtctggacatctccggaatcatcaccgaccgataccccatcacggaattccgggaagcctttgacgtcgcaggctcgggccacggcggcaaggttgtcatgaactgggaatgcctcgactga

SEQ ID NO: 42745 - protein, 345 aa, Propionibacterium acnes
MKALVKTRPEPGLELVEVPDPVAGPNDVIVKVMRTGICGTDVHIDKWDGWAAKTVHTPLVLGHEFCGEIVELGSEVNDLEVGQFVSGEGHYVCGRCRACLAGKRHLCRNTQGIGYAVNGAYCQYFVMPAGNVWVHHIPDLDPDVAAIFDPFGNAVHTALQFPCLAEDVLVSGAGPIGIMAALVAQFQGARNVVVTDLSDERLELAQQLGLKNAVNVSREGLETVWDRFDMKEGFDIGLEMSGSGTALTSMIDNMTHGGRIALLGTPSTDITLDFSKIIFNMITIQGVTGRQIFETWYTMASLIRSGLDISGIITDRYPITEFREAFDVAGSGHGGKVVMNWECLD

SEQ ID NO: 42746 - DNA, 1047 bp, Pyrococcus abyssi
  CDS (1)..(1047): transl_table=11
atgtccgagaagatggtagctatcatgaagacgaaaccggcttacggcgctgagctcgtcgaggttgatgttccaaagccaggacctggggaggttctaataaaagttatagcgactagcatttgtggaacagacctacacatctatgagtggaacgagtgggcccaatcaaggataaagcccccacagataatgggtcatgaggttgccggtgaagtagttgaggtgggcccgggagttgagggaattgaggttggagattacgtaagcgttgaaacccacatagtttgtgggaaatgctacgcgtgtagaaggggacagtaccatgtttgtcaaaacacgaagatattcggtgtagacaccgatggtgtatttgctgagtacgcggtggttccagctcaaaacgtttggaagaatccaaagtcaattcctccggagtacgcaacccttcaagaaccacttggaaatgcagttgatactgttctggccgggccaatctctggaaagagcgttttgataactggagctggcccccttggcttacttggaattgcggtggcgaaggcctccggggcttatccggtgatagtttccgagccgagcgatttcaggagagagctagctaagaaggtcggtgcagattacgtgataaatccattcgaggaagacgtcgttaaggaagtcatggacataacggatggaaatggagttgacgtgttccttgagttcagcggagctcctaaggctttagaacagggacttcaggctgttacaccagctggaagagtatccctcctgggcctttacccagggaaggttagcatagacttcaacaatctgataatcttcaaggctctaactgtttatggaatcacaggtaggcacctctgggagacatggtacacagtttctaggctactccagagcggaaagcttaacttggacccaataataacccacaagtacaagggattcgacaagtacgaggaagccttcgagctaatgagggctggaaagacgggtaaggtagtcttcatgctcaagtga

SEQ ID NO: 42747 - protein, 348 aa, Pyrococcus abyssi
MSEKMVAIMKTKPAYGAELVEVDVPKPGPGEVLIKVIATSICGTDLHIYEWNEWAQSRIKPPQIMGHEVAGEVVEVGPGVEGIEVGDYVSVETHIVCGKCYACRRGQYHVCQNTKIFGVDTDGVFAEYAVVPAQNVWKNPKSIPPEYATLQEPLGNAVDTVLAGPISGKSVLITGAGPLGLLGIAVAKASGAYPVIVSEPSDFRRELAKKVGADYVINPFEEDVVKEVMDITDGNGVDVFLEFSGAPKALEQGLQAVTPAGRVSLLGLYPGKVSIDFNNLIIFKALTVYGITGRHLWETWYTVSRLLQSGKLNLDPIITHKYKGFDKYEEAFELMRAGKTGKVVFMLK

SEQ ID NO: 42748 - DNA, 1047 bp, Pyrococcus furiosus
  CDS (1)..(1047): transl_table=11
atgtccgagaagatggttgctatcatgaagacaaaaccagagtacggtgcagagttagttgaagtagatgtaccaaaacctgggccaggggaagtcctaataaaaattcttgcaacaagcatatgtggaactgacctgcacatttatgaatggaatgaatgggctcagacaagaattaggccacctcagataatggggcatgaggttgcaggagaggttgtggaagttggtccaggtgtagagggaattgaagttggtgattacgtttctgttgagactcacatagtctgtggaaagtgttacgcatgtaaaagagggcaatatcacgtatgtcaaaacacaaagatatttggagtagatactgacggtgtttttgccgaatatgcagtagttccagcacaaaacgtctggaagaatccaaagaacatacctcccgaatatgctactctacaagagccattgggaaatgctgtggatacagtacttgctggcccaattgccggaaagagcgttctcattactggagcaggtcccctgggacttcttggaatagcagtggcaaaggcatccggagcctatcctgtgatagtttctgagccaagtgaatttagaagaaacttggcaaagaaggtgggtgcagactacgtaataaatccatttgaagaagatgttgtaaaggaggtaatggacataaccgacggaaacggagttgatgtgttcttggagttcagcggtgctccaaaggctcttgagcaaggactccaggcagtaactccagctggaagggtttctcttctcggactattcccaggaaaagtgagcatagactttaacaaccttataatattcaaggcattgacagtttacggaatcactgggagacacctttgggaaacttggtatacagtctctagactgctccaaagtggaaaattaaatatagacccaataataactcacaagtacaagggatttgacaagtatgaagaagcctttgagctaatgagggctggcaaaactggcaaagttgttttcatgcttaaatga

SEQ ID NO: 42749 - protein, 348 aa, Pyrococcus furiosus
MSEKMVAIMKTKPEYGAELVEVDVPKPGPGEVLIKILATSICGTDLHIYEWNEWAQTRIRPPQIMGHEVAGEVVEVGPGVEGIEVGDYVSVETHIVCGKCYACKRGQYHVCQNTKIFGVDTDGVFAEYAVVPAQNVWKNPKNIPPEYATLQEPLGNAVDTVLAGPIAGKSVLITGAGPLGLLGIAVAKASGAYPVIVSEPSEFRRNLAKKVGADYVINPFEEDVVKEVMDITDGNGVDVFLEFSGAPKALEQGLQAVTPAGRVSLLGLFPGKVSIDFNNLIIFKALTVYGITGRHLWETWYTVSRLLQSGKLNIDPIITHKYKGFDKYEEAFELMRAGKTGKVVFMLK

SEQ ID NO: 42750 - DNA, 1047 bp, Pyrococcus horikoshii
  CDS (1)..(1047): transl_table=11
atgtcagaaaagatggtagctatcatgaagacaaagcctgggtatggtgctgagcttgttgaggtggacgttccaaagcctggacctggagaagttctcattaaggttcttgcaaccagcatatgtggaactgatcttcatatatacgagtggaatgagtgggcacagagcaggattaagccacctcagataatggggcatgaagttgcgggagaagtcgttgaaatcgggccaggtgtggaaggaattgaagttggtgactacgtttccgttgaaacgcacatagtttgtggcaagtgttacgcctgcagaaggggccagtaccacgtctgccagaataccaagatatttggcgtcgatacagatggcgtattcgcagagtatgccgttgttccagcccaaaatatctggaagaatcctaaatcaattccaccagaatatgcaaccctccaggagcccttgggtaatgctgttgataccgttttggcaggaccaatttctggtaagagcgttttaataaccggagcggggccccttggattattgggaattgcagtggcaaaagcgtctggcgcataccctgtgatagtctcagaacctagtgacttcagaagggagttggccaagaaggtaggtgctgattacgttatcaatccattcgaagaggatgtcgttaaggaggtaatggatatcacagatggaaatggtgttgacgtatttctggaattcagtggagctcctaaggctctagagcagggtcttcaagcagttacacctgctggaagggtatctctcctgggtctatacccaggaaaggttaccattgactttaacaatctaataatcttcaaggcgctaacaatctatggaataactggaaggcacctctgggaaacttggtatacagtttcaaggctccttcagagcggaaagctcaacttagatcctattataactcataaatataagggattcgacaagtacgaggaagcctttgagctaatgagggccggcaaaacgggtaaagttgtttttatgcttaaatga

SEQ ID NO: 42751 - protein, 348 aa, Pyrococcus horikoshii
MSEKMVAIMKTKPGYGAELVEVDVPKPGPGEVLIKVLATSICGTDLHIYEWNEWAQSRIKPPQIMGHEVAGEVVEIGPGVEGIEVGDYVSVETHIVCGKCYACRRGQYHVCQNTKIFGVDTDGVFAEYAVVPAQNIWKNPKSIPPEYATLQEPLGNAVDTVLAGPISGKSVLITGAGPLGLLGIAVAKASGAYPVIVSEPSDFRRELAKKVGADYVINPFEEDVVKEVMDITDGNGVDVFLEFSGAPKALEQGLQAVTPAGRVSLLGLYPGKVTIDFNNLIIFKALTIYGITGRHLWETWYTVSRLLQSGKLNLDPIITHKYKGFDKYEEAFELMRAGKTGKVVFMLK

SEQ ID NO: 42752 - DNA, 1053 bp, Pyrococcus kodakaraensis
  CDS (1)..(1053): transl_table=11
atggccgagaaaatgcaggctattatgaagactaagccggcgtacggcgccgaacttgtagaagttgacgttccaaagcctgggccaggagaagtcctcattaaggttctcgcaacgagcatctgcggtacagacctccatatctacgagtggaacgaatgggcgcagagcaggataaagccgccccagataatgggccacgaagtggctggagaggtcgtcgaggtcggtcccggcgttgaggatctccaggttggagattacatcagcgttgaaactcatatcgtctgtggcaagtgctacgcgtgcaagcacaaccgctatcacgtctgccagaacaccaagatattcggagttgatatggacggtgtcttcgcccactacgcgatagttccggccaagaacgcctggaagaacccgaaggacatgccgccagagtacgcagcccttcaggagccgctcggaaacgccgtcgataccgttcttgcaggcccgattgctgggaggagcaccctcataaccggtgctggaccgctcggtcttctcggcatagcagttgccaaggcaagcggggcttatccagtcatcgttagcgagccgagtgagttcagaaggaagctcgccaagaaggtcggtgctgactacgtcgttaaccccttcgaggaagacccagtcaagttcgttatggacataaccgacggagcgggcgttgaagttttccttgagttcagtggtgcacctaaagcccttgagcagggcctcaaggcagtaacacccggaggacgcgtctcacttctcggcctcttcccgagagaggtcacgatagacttcaacaacctcataatcttcaaggcccttgaagtccacggcataaccggaaggcacctctgggaaacctggtacaccgtctcaagcctcatccagagcggcaagctgaacctcgatccgataatcacccacaagtacaagggcttcgacaagttcgaggaagcctttgagcttatgcgcgctggaaagaccggaaaggtcgtcttcttccctcacaagggatga

SEQ ID NO: 42753 - protein, 350 aa, Pyrococcus kodakaraensis
MAEKMQAIMKTKPAYGAELVEVDVPKPGPGEVLIKVLATSICGTDLHIYEWNEWAQSRIKPPQIMGHEVAGEVVEVGPGVEDLQVGDYISVETHIVCGKCYACKHNRYHVCQNTKIFGVDMDGVFAHYAIVPAKNAWKNPKDMPPEYAALQEPLGNAVDTVLAGPIAGRSTLITGAGPLGLLGIAVAKASGAYPVIVSEPSEFRRKLAKKVGADYVVNPFEEDPVKFVMDITDGAGVEVFLEFSGAPKALEQGLKAVTPGGRVSLLGLFPREVTIDFNNLIIFKALEVHGITGRHLWETWYTVSSLIQSGKLNLDPIITHKYKGFDKFEEAFELMRAGKTGKVVFFPHKG

SEQ ID NO: 42754 - DNA, 1035 bp, Rhizobium loti
  CDS (1)..(1035): transl_table=11
atgtcgaacatgatgaaggcgctggtgaaggccaaggccgaaccgggcatctggatggaagaggtgccggtgccggagatcggccccaacgacgtgctgatcaagatcaggaagacggcgatctgcggcaccgacgtgcacatctacaattgggaccagtgggcgcagaagaccgtgccggtgccgatggtgaccggccatgaatttgtcggcacggtggccgattttggcgccgcggtcaccgaatacaaggtcggccagcgcgtctcgggcgagggccacatcgtctgcggccactgccgcaactgccgcgccgggcgagggcatctctgccgcaacacgctcggcgtcggcgtcaaccgccccggcgccttcggcgagtatctggcgatcccgcaacacaatgtcgtgccgatccccgacgatgtgccggacgagatcgccgcgatcttcgatcccctgggcaatgcggtgcatacggcattatccttcgatcttgtcggcgaggacgtgctggtcaccggcgccgggccgatcggcatcatgggcgcgctcgttgcccaatgcgtgggcgcgcgaaaagtcgtcatcaccgatatcaacccggtgcggctggcgctggcgaagaaactcggtgtccagcatgtcgtcgacgcctcgaaggaaaagctgcgcgatgtcatgccagtgctcggcatgaccgagggttttgacgtcggcctcgaaatgtcgggcgccgcccccgccttccgcgacatgatcgacaccatgaacaatggcggcaagatcgccattctgggcatcgcgcccaccggcttcgagatcgactggaacaaggtcatcttcaagatgctgcatctcaaaggcatctacggccgcgaaatgttcgagacctggtacaagatgatcgcgctggtccagggtcctctggatgtttcgggcctgatcacgcaccgcatcggcatcgacgatttccaggaggggttcgatgcgatgcggagcggcagttccggcaaggtggtgatggattggtag

SEQ ID NO: 42755 - protein, 344 aa, Rhizobium loti
MSNMMKALVKAKAEPGIWMEEVPVPEIGPNDVLIKIRKTAICGTDVHIYNWDQWAQKTVPVPMVTGHEFVGTVADFGAAVTEYKVGQRVSGEGHIVCGHCRNCRAGRGHLCRNTLGVGVNRPGAFGEYLAIPQHNVVPIPDDVPDEIAAIFDPLGNAVHTALSFDLVGEDVLVTGAGPIGIMGALVAQCVGARKVVITDINPVRLALAKKLGVQHVVDASKEKLRDVMPVLGMTEGFDVGLEMSGAAPAFRDMIDTMNNGGKIAILGIAPTGFEIDWNKVIFKMLHLKGIYGREMFETWYKMIALVQGPLDVSGLITHRIGIDDFQEGFDAMRSGSSGKVVMDW

SEQ ID NO: 42756 - DNA, 1035 bp, Rhizobium meliloti
  CDS (1)..(1035): transl_table=11
atgaccaacatgatgaaggcactggtcaagacgaagccggaggtagggctctggatggagcgcgtgccggtgccggaaatcgggccgaacgacgtcctgatccgcgtcaggaaatcggcgatctgcggcaccgacgtccacatctggaactgggatcaatgggcggagaagacgatcccagtgccgatggtcgtcggacacgaattcatgggcgaggtcgtcgaggtcgggccggccgtcagcaagcatcatgtcggcgagcgggtttccggagaaggtcacatcgtctgcggcaaatgccgcaattgccgcgcgggcagggggcatctctgccgcaacacgctcggcgtcggcgtcaaccgccccggatccttcgccgagttcgtctgccttcccgaatataatgtcgtgtcgatccccgacgacgtgccggacgagatcgccgcaatcttcgatcccttcggcaacgccgtgcatacggcgctctccttcgatctcgtcggcgaggacgttctggtcaccggtgccgggccgatcggcatcatgggggcgatggtggccaagcgttgcggtgcccgcaaggtggtgatcaccgacatcaatcccgttcgtctcgatctcgcgcgcaagctcggcatcgaccacgtcgtcgacgcgtcgaaggaaaaacttgccgacgtcatgcgggtgatcggcatgaccgagggcttcgatgtggggctggaaatgtcgggcgcggcgcccgctttccgcgacatgatcgacaagatgaacaatggcggcaagattgcgatcctcggcattgcgccggcgggcttcgagatcgactggaacaaggtcatcttcaagatgctcaacctcaagggcatctacggtcgcgaaatgttcgagacctggtacaagatgatcgccttcgtccagggcgggctcgacctctcgccgataatcacccaccgtatcggcatcgacgattttcgcgacggcttcgaggcgatgcgctcgggcaattccggcaaggtggtgatggactggtag

SEQ ID NO: 42757 - protein, 344 aa, Rhizobium meliloti
MTNMMKALVKTKPEVGLWMERVPVPEIGPNDVLIRVRKSAICGTDVHIWNWDQWAEKTIPVPMVVGHEFMGEVVEVGPAVSKHHVGERVSGEGHIVCGKCRNCRAGRGHLCRNTLGVGVNRPGSFAEFVCLPEYNVVSIPDDVPDEIAAIFDPFGNAVHTALSFDLVGEDVLVTGAGPIGIMGAMVAKRCGARKVVITDINPVRLDLARKLGIDHVVDASKEKLADVMRVIGMTEGFDVGLEMSGAAPAFRDMIDKMNNGGKIAILGIAPAGFEIDWNKVIFKMLNLKGIYGREMFETWYKMIAFVQGGLDLSPIITHRIGIDDFRDGFEAMRSGNSGKVVMDW

SEQ ID NO: 42758 - DNA, 1026 bp, Shewanella oneidensis
  CDS (1)..(1026): transl_table=11
atgaaagcactaagcaagttaaaagccgaaaaaggcatttggttagtcgatgcgcctaagcctgaaatgggccataacgatctactgatcaagattaaaaagaccgccatttgcggcaccgacatgcacatctacaactgggacgaatggtcacaaaaaaccattcctgtgcctatggtggtaggtcacgagtatgtgggagaagtggttgatatcgggcaagaagttcgcggctttaacattggtgaccgtgtttctggcgaaggccatatcacctgcggccactgccgtaactgccgcgcgggtcgcacccacttatgccgtaacacctcaggtgtgggtgtaaaccgcgaaggttcatttgccgaatacttagtgatcccagcgtttaacgccttcaaaatccccgatgatatcagcgacgatttagcctctatctttgatccattcggtaacgcagtacacacggcactgtcattcgacttagtgggcgaagatgtgttgattactggcgcgggtcctatcggtattatggctgcggccgtatgtcgccacgttggtgcgcgccatgtagtgatcaccgacgttaacgaataccgtttagaactggcccgtaaaatgggtgccacacgtgccgtaaacgttgctcaagaaaacctcaaagacgtgatgaaagaactcggcatgaccgaagggtttgacgtcggcttagaaatgtctggcgtaccttctgccttccgtgccatgttagataccatgaaccacggtggcaaaatcgcgatgctcggtattccgggtggcgaaatggccattgattggagcaaagtgatcttcaaaggtttggtcattaaaggcatttacggtcgtgaaatgttcgaaacctggtacaagatggcaagccttatccaatctggcttagatatttcgcccatcattacccatcactacaaaattgatgatttccaaaaaggcttcgacgctatgggctcgggccaatcgggtaaagtcatcctcagctgggattaa

SEQ ID NO: 42759 - protein, 341 aa, Shewanella oneidensis
MKALSKLKAEKGIWLVDAPKPEMGHNDLLIKIKKTAICGTDMHIYNWDEWSQKTIPVPMVVGHEYVGEVVDIGQEVRGFNIGDRVSGEGHITCGHCRNCRAGRTHLCRNTSGVGVNREGSFAEYLVIPAFNAFKIPDDISDDLASIFDPFGNAVHTALSFDLVGEDVLITGAGPIGIMAAAVCRHVGARHVVITDVNEYRLELARKMGATRAVNVAQENLKDVMKELGMTEGFDVGLEMSGVPSAFRAMLDTMNHGGKIAMLGIPGGEMAIDWSKVIFKGLVIKGIYGREMFETWYKMASLIQSGLDISPIITHHYKIDDFQKGFDAMGSGQSGKVILSWD

SEQ ID NO: 42760 - DNA, 1026 bp, Shigella flexneri
  CDS (1)..(1026): transl_table=11
atgaaagcgttatccaaactgaaagcggaagagggcatctggatgaccgacgtccctgtaccggaactcgggcataacgatctgctgattaaaatccgtaaaacagccatctgcgggactgacgttcacatctataactgggatgagtggtcgcaaaaaaccatcccggtgccgatggtcgtgggccatgaatatgtcggtgaagtggtaggtattggtcaggaagtgaaaggcttcaaaatcggcgatcgcgtttctggcgaaggccatatcacctgcggtcactgtcgcaactgtcgtggcggtcgtacccatctgtgccgcaacaccattggtgtcggtgttaaccgtccgggctgcttcgccgaatatctggtgattccggcgttcaacgctttcaaaatccccgacaatatctccgacgacctggcttccatttttgatcccttcggtaacgccgtgcataccgcgctgtcgttcgatctggtgggcgaagatgtgctggtttctggtgcaggtccgataggtattatggctgcggcggtggcgaaacacgttggtgcacgcaatgtggtgatcaccgatgttaacgaataccgccttgagctggcgcgcaaaatgggtatcacccgtgcggttaacgtcgcgaaagaaaaccttaatgatgtgatggctgaactgggcatgaccgaaggctttgatgtcggtctggaaatgtccggcgcgccgccagcgtttcgtaccatgctcgataccatgaaccacggcggtcgtattgcgatgctgggtattccaccgtctgatatgtctatcgactggaccaaagtgatctttaaaggcttgttcattaaaggcatttacggtcgtgagatgtttgaaacctggtacaagatggcggcgctgattcagtctggcctcgatctctcgccgatcattacccatcgtttctctatcgatgatttccagaagggctttgacgctatgcgttcgggccagtccgggaaagttattctgagctgggattaa

SEQ ID NO: 42761 - protein, 341 aa, Shigella flexneri
MKALSKLKAEEGIWMTDVPVPELGHNDLLIKIRKTAICGTDVHIYNWDEWSQKTIPVPMVVGHEYVGEVVGIGQEVKGFKIGDRVSGEGHITCGHCRNCRGGRTHLCRNTIGVGVNRPGCFAEYLVIPAFNAFKIPDNISDDLASIFDPFGNAVHTALSFDLVGEDVLVSGAGPIGIMAAAVAKHVGARNVVITDVNEYRLELARKMGITRAVNVAKENLNDVMAELGMTEGFDVGLEMSGAPPAFRTMLDTMNHGGRIAMLGIPPSDMSIDWTKVIFKGLFIKGIYGREMFETWYKMAALIQSGLDLSPIITHRFSIDDFQKGFDAMRSGQSGKVILSWD

SEQ ID NO: 42762 - DNA, 1029 bp, Silicibacter pomeroyi
  CDS (1)..(1029): transl_table=11
atgaaagcgctggagaaatccaagcctgaggaagggttgtggatggtgcaggcaccggtgcccgagatcggccctgacgatgtgctgatcaagatcaagaagaccggcatttgcggcaccgatatccatatctggaactgggacgaatgggccgcgcacacggtgccggtgccgatgatcaccggccatgaatttgcgggcgagatcgtcgagctgggccgtgatgtcaccggcctcagcatcggtcagcgggtctcgggcgaggggcatctgatcggcaccgaaagccggcagagccgggcaggcaagttccacctggacccgggcacgcgcgggatcggtgtcaacgtgcagggggcctttgcgcaatatctgcgactgcccgccttcaacgtggtgccgctgcccgaggatatcccggacgagatcggcgccatcctcgacccgctgggcaatgcggtgcacaccgcgctgagtttcgacctcttgggcgaggatgtgctgatcaccggtgccgggccgatcggcatcatggcggcggcggtggccaaacatgccggcgcccgccatgtggtgatcaccgatatcaacgccgaccggctgaaactggcgcagcacgtggtgcccagggcgcggaccgtcgatgtcacgcgcgaggatctgggcgacgtggtccacgagcttggcctgaaacaggggttcgatgtcgggctggaaatgtcgggctcgcaagcggcgctcgaccagatggtcgaggcgctggtgatgggcggcaagatcgcgttgctgggtattccgccgggcaagtcgccggtggactggtcgcgcatcgtgttcaaggcgatcaccatcaagggtgtctatggccgcgagatgttcgagacctggtacaagatgatcgccatgttgcagaacgggctggatgtgagccgggtgatcacccatcgttttggcgtcgatgagttccgcgaagggtttgcggcgatgaaatcgggcctcagcggcaaggtggtgctggactggacctga

SEQ ID NO: 42763 - protein, 342 aa, Silicibacter pomeroyi
MKALEKSKPEEGLWMVQAPVPEIGPDDVLIKIKKTGICGTDIHIWNWDEWAAHTVPVPMITGHEFAGEIVELGRDVTGLSIGQRVSGEGHLIGTESRQSRAGKFHLDPGTRGIGVNVQGAFAQYLRLPAFNVVPLPEDIPDEIGAILDPLGNAVHTALSFDLLGEDVLITGAGPIGIMAAAVAKHAGARHVVITDINADRLKLAQHVVPRARTVDVTREDLGDVVHELGLKQGFDVGLEMSGSQAALDQMVEALVMGGKIALLGIPPGKSPVDWSRIVFKAITIKGVYGREMFETWYKMIAMLQNGLDVSRVITHRFGVDEFREGFAAMKSGLSGKVVLDWT

SEQ ID NO: 42764 - DNA, 1032 bp, Thermus thermophilus
  CDS (1)..(1032): transl_table=11
atgcgcgctttggccaagctggccccggaggagggcctaaccctggtggaccgccccgtgcccgagccgggccccggggagatcctggtgcgggtggaggcggcgagcatctgcggcaccgacctccacatctggaagtgggacgcctgggcccgggggaggatcaggccccccctcgtcaccgggcacgagttcagcggggtggtggaggccgtgggccccggggtgaagcgcccccaggtgggggaccacgtgagcctagaaagccacgtggtctgccacgcctgccccgcctgccgcacggggaactaccacgtctgcttgaacacaaagatcctcggcgtggaccgggacggcggcttcgccgagtacgtggtggtgccggcggagaacgcctgggtgaaccccaaggaccttccctttgaggtggcggccatcctcgagcccttcggcaacgccgtgcacaccgtctacgcgggaagcggggtctcggggaagagcgtcctcatcacgggggcggggcccatcggcctcatggcggccatggtggcccgggcgagcggggcggggcccatcctcgtctccgacccgaacccctaccgcctggccttcgccaggccctacgccgaccggctggtgaaccccttggaggaggacctcctggaggtggtgcgccgggtgacgggaagcggggtggaggtgcttttggagttttctgggaacgaggccgccatccaccagggcctcatggccctcatccccgggggggaggcgaggatcttggggatcccttccgaccccatccgctttgacctcgccggggagctcgtgatgcgggggatcaccgccttcggcatcgccgggcggaggctctggcagacctggatgcagggcaccgccttggtctactcgggtagggtggacctaagccccctcatcacccaccgcctccccttgagccgctaccgggaggccttcggcctcctcgcctcgggccaggcggtgaaggtgatcctggacccgaaggcctaa

SEQ ID NO: 42765 - protein, 343 aa, Thermus thermophilus
MRALAKLAPEEGLTLVDRPVPEPGPGEILVRVEAASICGTDLHIWKWDAWARGRIRPPLVTGHEFSGVVEAVGPGVKRPQVGDHVSLESHVVCHACPACRTGNYHVCLNTKILGVDRDGGFAEYVVVPAENAWVNPKDLPFEVAAILEPFGNAVHTVYAGSGVSGKSVLITGAGPIGLMAAMVARASGAGPILVSDPNPYRLAFARPYADRLVNPLEEDLLEVVRRVTGSGVEVLLEFSGNEAAIHQGLMALIPGGEARILGIPSDPIRFDLAGELVMRGITAFGIAGRRLWQTWMQGTALVYSGRVDLSPLITHRLPLSRYREAFGLLASGQAVKVILDPKA

SEQ ID NO: 42766 - DNA, 1053 bp, Thermoanaerobacter tengcongensis; identical to SEQ ID NO: 42616
  CDS (10)..(1053): transl_table=11

SEQ ID NO: 42767 - protein, 347 aa, Thermoanaerobacter tengcongensis
MDGLMTAVVKQYHKEGADIVKKEIPKIGPDEVLIKVKATSICGTDVHIYVWNEWAKSRIKPPKTMGHEFVGEVVEIGENVTSVKVGDLVSAETHIVCGKCRACRTGNAHICENTLILGVDTDGAFAEYIKVPESNVWINDKNIPLEILSIQEPLGNAVHTVFSGDVVGKSVAVIGCGPIGMMAIPLLKRTGAAAIFAIEPADYRRELAHKLGATRVINPLREDVVSIIKSETEGYGADVVLDFSGNPTAIRQGLEYIAKGGRMSILGLPDNEVPIDITNNVVFKGITIQGITGRRMYDTWYTVKGLLKSGLAEDLKPIITHTFPLTEYQKGMELMIKGQCGKVVLYP

SEQ ID NO: 42768 - DNA, 1032 bp, Vibrio cholerae
  CDS (1)..(1032): transl_table=11
atgaaaatcaaagcactttcaaaactgaaaccagagcagggcatctggatgaacgaagtggacatgcctgagcttggccacaacgacctgctgatcaaaattaagaaaactgccatttgtggcactgacgtacacatttataactgggatgagtggtcacaaaaaaccattccagtgcctatggtagtcggccatgaatatgtgggtgaagtggttgggattggccaagaagtgcgtggtttccaaattggagatcgcgtttctggtgaaggtcacatcacttgtggtcactgccgtaactgccgtggtggccgtacccacctgtgccgcaacaccattggtgtgggcgtaaaccgcacgggttgtttctctgaatacttagtgatcccagcgtttaacgcattcaagatcccggatggtatttcagatgatctggcgtctattttcgacccgtttggaaacgctgtacacactgcgctttcattcgacttagtgggtgaagatgttctgatcaccggtgctggcccaatcggcattatggccgcagctgttgcgaaacatgtaggtgcgcgccatgtggtgatcaccgatgtgaacgaataccgcctcgatttagcccgtaaaatgggcgtgactcgcgctgtgaacgttgctgagcaaaacctagaagacgtgatgaaagaactcggtatgaccgaaggttttgatgtgggcttagagatgtctggtgtaccgagtgcgtttagcgccatgctaaaaaccatgaaccacggtggccgcattgctctgttaggtattccaccgtcatcgatggcgattgattggaaccaagtgatcttcaaaggccttgttattaaagggatttatggaagggaaatgtttgaaacttggtataagatggcgagcctgatccaatcgggtctcgatatcagcccaattatcactcaccacttcaaagtggatgacttccaaaaaggcttcgacatcatgcgcagcggggcttctggcaaagttatcctcgattggcagtaa

SEQ ID NO: 42769 - protein, 343 aa, Vibrio cholerae
MKIKALSKLKPEQGIWMNEVDMPELGHNDLLIKIKKTAICGTDVHIYNWDEWSQKTIPVPMVVGHEYVGEVVGIGQEVRGFQIGDRVSGEGHITCGHCRNCRGGRTHLCRNTIGVGVNRTGCFSEYLVIPAFNAFKIPDGISDDLASIFDPFGNAVHTALSFDLVGEDVLITGAGPIGIMAAAVAKHVGARHVVITDVNEYRLDLARKMGVTRAVNVAEQNLEDVMKELGMTEGFDVGLEMSGVPSAFSAMLKTMNHGGRIALLGIPPSSMAIDWNQVIFKGLVIKGIYGREMFETWYKMASLIQSGLDISPIITHHFKVDDFQKGFDIMRSGASGKVILDWQ

SEQ ID NO: 42770 - DNA, 1032 bp, Vibrio parahaemolyticus
  CDS (1)..(1032): transl_table=11
atgaaaattaaagcactatcaaagctaaagcctgaacaaggcatttggatgaccgaagtagacaaacctgaggttggccataacgacattctgatcaaaattaagaaaactgcgatttgtggtacagacgtacacatttacaactgggacgaatggtcacaaaaaaccattccagtacctatggttgtcggtcacgaatacgtgggtgaagtggtcgcgattggtcaggaagttcgtggctttgaaatcggtgaccgcgtatctggcgaaggtcacatcacgtgtggtcactgtcgtaactgtcgtggcggtcgtactcacttatgccgtaacactatcggtgtgggtgtaaaccgtgaaggcgcatttgcagaatacttggttatcccagcgttcaacgcgttcaagatcccagacgagatctctgacgatctagcgtctatctttgacccgtttggtaacgcagtacacaccgcactttctttcgaccttgtgggtgaagacgtgctgatcacaggtgctggcccaatcggcatcatggcggcagcggttgctaaacacgttggtgctcgtcatgtggttatcacagacgtaaacgaataccgtctagagcttgctcgtaaaatgggcgtaacacgtgcagtaaacgtggctgaagagaagcttgaagatgtaatggctgaactaggcatgacagaaggcttcgacgtaggtcttgaaatgtcgggtaacccagcggcattcaactcaatgctaacaacaatgaatcatggtggtcgtattgctctgttgggtattccgccatcagacatgggtatcgactggaaccaagtgatcttcaaaggtttggttatcaaaggcatttacggccgtgaaatgttcgaaacgtggtacaagatggcttcactgattcaatctggtttggatctatcgccaatcatcacgcaccactacaagattgatgatttccaagaaggctttgacgttatgcgctctggcatgtcgggcaaagttattcttgattgggaatag

SEQ ID NO: 42771 - protein, 343 aa, Vibrio parahaemolyticus
MKIKALSKLKPEQGIWMTEVDKPEVGHNDILIKIKKTAICGTDVHIYNWDEWSQKTIPVPMVVGHEYVGEVVAIGQEVRGFEIGDRVSGEGHITCGHCRNCRGGRTHLCRNTIGVGVNREGAFAEYLVIPAFNAFKIPDEISDDLASIFDPFGNAVHTALSFDLVGEDVLITGAGPIGIMAAAVAKHVGARHVVITDVNEYRLELARKMGVTRAVNVAEEKLEDVMAELGMTEGFDVGLEMSGNPAAFNSMLTTMNHGGRIALLGIPPSDMGIDWNQVIFKGLVIKGIYGREMFETWYKMASLIQSGLDLSPIITHHYKIDDFQEGFDVMRSGMSGKVILDWE

SEQ ID NO: 42772 - DNA, 1032 bp, Vibrio vulnificus
  CDS (1)..(1032): transl_table=11
atgaaaatcaaagcactatcaaagctaaagccagaagaaggcatttggatgaccgaagtggacaagcctgttcttggccacaacgatctgctgatcaaaattaagaaaaccgcgatttgtggtaccgacgtacacatctacaactgggacgaatggtcacaaaaaaccatcccagtacctatggtggttggccatgaatacgtgggtgaagtggttggcattggccaagaagttcgtggttttgagatcggtgaccgcgtttctggcgaaggtcacatcacttgtggccactgtcgtaactgccgtggtggccgcacgcacttgtgccgcaacaccattggtgtgggcgtaaaccgcacaggttgtttctctgaataccttgtgatcccagcgttcaacgcctttaaaatccctgcaaacatctctgatgatcttgcgtctatcttcgacccgtttggcaacgcagtacacactgcactgtcgttcgatctggttggtgaagatgtactgatcaccggcgctggcccaatcggcattatggcggctgcggtcgcgaagcacgttggtgcgcgccacgtcgtgatcaccgatgtgaacgaataccgtctagacctcgcacgcaaaatgggtgtgactcgcgcggtgaacgttgccgagcagaaacttgacgatgtgatggcagagctaggcatgacagaaggcttcgatgtgggcctggaaatgtcgggcaacccatcagcattcaactcaatgctgaaaaccatgaaccacggtggccgcattgcactgcttggcattccaccatcagacatgggcatcgattggaaccaagtgatcttcaaaggcttggtgatcaaaggtatctatggccgtgaaatgtttgaaacttggtacaagatggcaagcttgattcaatctggccttgacctaacaccaattatcactcaccacttcaaagtggatgatttccagcaaggcttcgacatcatgcgcagcggcatgtcaggcaaagtgatccttgattgggaataa

SEQ ID NO: 42773 - protein, 343 aa, Vibrio vulnificus
MKIKALSKLKPEEGIWMTEVDKPVLGHNDLLIKIKKTAICGTDVHIYNWDEWSQKTIPVPMVVGHEYVGEVVGIGQEVRGFEIGDRVSGEGHITCGHCRNCRGGRTHLCRNTIGVGVNRTGCFSEYLVIPAFNAFKIPANISDDLASIFDPFGNAVHTALSFDLVGEDVLITGAGPIGIMAAAVAKHVGARHVVITDVNEYRLDLARKMGVTRAVNVAEQKLDDVMAELGMTEGFDVGLEMSGNPSAFNSMLKTMNHGGRIALLGIPPSDMGIDWNQVIFKGLVIKGIYGREMFETWYKMASLIQSGLDLTPIITHHFKVDDFQQGFDIMRSGMSGKVILDWE

SEQ ID NO: 42774 - DNA, 1032 bp, Vibrio vulnificus
  CDS (1)..(1032): transl_table=11
atgaaaatcaaagcactatcaaagctaaagccagaagaaggcatttggatgaccgaagtggacaagcctgttcttggccacaacgatctgctgatcaaaattaagaaaaccgcgatttgtggtaccgacgtacacatctacaactgggacgaatggtcacaaaaaaccatcccagtacctatggtggttggtcatgaatacgtgggtgaagtggttggcattggccaagaagttcgtggttttgaaatcggcgaccgcgtttctggcgaaggtcacatcacttgtggccactgtcgtaactgccgtggtggccgcacgcacttgtgccgcaacacaattggtgtgggcgtaaaccgcacaggttgtttctctgaatatcttgtgatcccagcgttcaacgcttttaagatccctgcaaacatctctgatgatcttgcgtctatcttcgacccgtttggcaacgcagtacacactgcactgtcgttcgatctggttggtgaagacgtactgatcaccggcgctggcccaatcggcatcatggcggctgcggtagcgaagcacgttggtgcgcgccacgtcgtgatcaccgatgtgaacgaataccgtctagacctcgcacgcaaaatgggcgtgactcgcgcagtgaacgttgctgagcagaagcttgacgatgtgatggtagagctaggcatgacagaaggcttcgacgtgggcctagaaatgtcgggcaacccttcagcattcaactcaatgctgaaaaccatgaaccacggtggtcgtattgcactgctcggcattccaccatcagacatgggtatcgactggaaccaagtgatcttcaaaggcttggtgatcaaaggtatctatggccgtgaaatgtttgaaacttggtacaagatggcaagcttgattcaatctggccttgacctaacaccaattatcactcaccacttcaaagtggatgacttccagcaaggcttcgacatcatgcgcagcggcatgtcaggcaaagtgattcttgattgggaataa

SEQ ID NO: 42775 - protein, 343 aa, Vibrio vulnificus
MKIKALSKLKPEEGIWMTEVDKPVLGHNDLLIKIKKTAICGTDVHIYNWDEWSQKTIPVPMVVGHEYVGEVVGIGQEVRGFEIGDRVSGEGHITCGHCRNCRGGRTHLCRNTIGVGVNRTGCFSEYLVIPAFNAFKIPANISDDLASIFDPFGNAVHTALSFDLVGEDVLITGAGPIGIMAAAVAKHVGARHVVITDVNEYRLDLARKMGVTRAVNVAEQKLDDVMVELGMTEGFDVGLEMSGNPSAFNSMLKTMNHGGRIALLGIPPSDMGIDWNQVIFKGLVIKGIYGREMFETWYKMASLIQSGLDLTPIITHHFKVDDFQQGFDIMRSGMSGKVILDWE

SEQ ID NO: 42776 - DNA, 1023 bp, Xanthomonas campestris pv
  CDS (1)..(1023): transl_table=11
atgaaggcgctggtcaagcgcgaagcgagcaagggcatctggctggaacaggtccccgtgcccaccccgggcccgaatgaggtcctgatcaagctggaaaagaccgccatctgcggcaccgacctgcatatctacctgtgggatgagtggagccaacgcaccattacgccgggcctgaccatcggccacgagttcgtcggccgcgtggccgagctcggttcggcggtgaccggctaccaggtcggccagcgcgtgtcggccgaaggccacatcgtctgcgggcattgccgcaactgccgtggcggccgcccgcacctgtgccccaacacggtgggcatcggcgtcaacgtcaacggcgcctttgccgaatacatggtgatgccggccagcaacctgtggccgatccccgaccagatcccctccgagctggccgccttcttcgacccctacggcaacgccgcgcattgcgcgctggaattcgatgtcatcggcgaagacgtgctgatcaccggcgccggcccgatcggcatcattgccgccggcatctgcaagcacatcggtgcgcgcaatgtggtggtcaccgacgtcaacgacttccgcctcaagctggccgccgacctgggcgccacgcgcgtggtcaacgtgtccaagacctcgctcaaggacgtcatggccgacctgcacatggaaggcttcgacgtgggcctggaaatgagcggcaacccgcgcgcgttcaacgacatgctcgattgcatgtaccacggcggcaagatcgcgatgctcggcatcatgccgcgcggcgccggttgcgattgggacaagatcatcttcaagggcctcaccgtgcagggcatctacggacgcaagatgtacgagacctggtacaagatgacccagctggtgctatcgggttttccgctgcagaaagtgctgacccaccagttgtcgatcgacgagttccagaaggggttcgacctgatggaagaaggcaaggccggcaaggttgtgttgagctggaactga

SEQ ID NO: 42777 - protein, 340 aa, Xanthomonas campestris pv
MKALVKREASKGIWLEQVPVPTPGPNEVLIKLEKTAICGTDLHIYLWDEWSQRTITPGLTIGHEFVGRVAELGSAVTGYQVGQRVSAEGHIVCGHCRNCRGGRPHLCPNTVGIGVNVNGAFAEYMVMPASNLWPIPDQIPSELAAFFDPYGNAAHCALEFDVIGEDVLITGAGPIGIIAAGICKHIGARNVVVTDVNDFRLKLAADLGATRVVNVSKTSLKDVMADLHMEGFDVGLEMSGNPRAFNDMLDCMYHGGKIAMLGIMPRGAGCDWDKIIFKGLTVQGIYGRKMYETWYKMTQLVLSGFPLQKVLTHQLSIDEFQKGFDLMEEGKAGKVVLSWN

SEQ ID NO: 42778 - DNA, 1026 bp, Yersinia pestis
  CDS (1)..(1026): transl_table=11
atgaaagcactttctaaactgaaagcagaagaaggcatttggatgaccgatgtgccacagccagagctgggtcacaacgatatcatgatcaaaattcgcaaaacggctatctgtggtactgacgtacatatttataattgggatgaatggtcacaaaaaaccatccccgtacccatggtcgttggccatgaatatgtcggtgaagtggtggccattgggcaggaagttaaagggtttaatattggtgaccgggtgtctggtgaaggccatattacctgtggtcactgccgtaactgccgtggtggtcgtacccacctttgtcgtaatacggtgggtgttggcgtgaatcgccctggttcgtttgccgaatatttggtgatccctgcttttaacgcgttcaagatcccagacaatatttctgatgagcttgcggctatttttgaccccttcggcaatgcagttcataccgcgttatcttttgatttagtcggcgaggatgtgttggtctccggggctggcccaattggtattatggccgccgcagtctgtaagcatgtgggtgctcgtcatgttgtcatcgctgatgtgaatgaatatcgcctggatctggcccgtaaaatgggcgtgacccgtgccgttaacgtcagcaaagagaacctaaatgacgttatgacggaattgggcatgaccgaagggtttgatgtgggcttggagatgtcaggtgctcccccggctttccgttcattacttaattcaatgaatcatggtggtcgtatagcgatgctgggaataccgccgtctgatatgtcgatcgactggaatcaggttatctttaaggggctgtttataaaggggatttatggccgtgagatgttcgaaacctggtacaaaatggccgcgttgattcaatctggtttggacttaactccgatcattacccaccgtttccctattgatgaattccagcaagggtttgacgccatgcgttcgggtaaatcaggcaaagtggtattaagctgggattag

SEQ ID NO: 42779 - protein, 341 aa, Yersinia pestis
MKALSKLKAEEGIWMTDVPQPELGHNDIMIKIRKTAICGTDVHIYNWDEWSQKTIPVPMVVGHEYVGEVVAIGQEVKGFNIGDRVSGEGHITCGHCRNCRGGRTHLCRNTVGVGVNRPGSFAEYLVIPAFNAFKIPDNISDELAAIFDPFGNAVHTALSFDLVGEDVLVSGAGPIGIMAAAVCKHVGARHVVIADVNEYRLDLARKMGVTRAVNVSKENLNDVMTELGMTEGFDVGLEMSGAPPAFRSLLNSMNHGGRIAMLGIPPSDMSIDWNQVIFKGLFIKGIYGREMFETWYKMAALIQSGLDLTPIITHRFPIDEFQQGFDAMRSGKSGKVVLSWD

SEQ ID NO: 42780 - DNA, 1026 bp, Yersinia pseudotuberculosis
  CDS (1)..(1026): transl_table=11
atgaaagcactttctaaactgaaagcagaagaaggcatttggatgaccgatgtgccacagccagagctgggtcacaacgatatcatgatcaaaattcgcaaaacggctatctgtggtactgacgtacatatttataattgggatgaatggtcacaaaaaaccatccccgtacccatggtcgttggccatgaatatgtcggtgaagtggtggccattgggcaggaagttaaagggtttaatattggtgaccgggtgtctggtgaaggccatattacctgtggtcactgccgtaactgccgtggtggtcgtacccacctttgtcgtaatacggtgggtgttggcgtgaatcgccctggttcgtttgccgaatatttggtgatccctgcttttaacgcgttcaagatcccagacaatatttctgatgagcttgcggctatttttgaccccttcggcaatgcagttcataccgcgttatcttttgatttagtcggcgaggatgtgttggtctccggggctggcccaattggtattatggccgccgcagtctgtaagcatgtgggtgctcgtcatgttgtcatcactgatgtgaatgaatatcgcctggatctggcccgtaaaatgggcgtgacccgtgccgttaacgtcagcaaagagaacctaaatgacgttatgacggaattgggcatgaccgaagggtttgatgtgggcttggagatgtcaggtgctcccccggctttccgttcattacttaattcaatgaatcatggtggtcgtatagcgatgctgggaataccgccgtctgatatgtcgatcgactggaatcaggttatctttaaggggctgtttataaaggggatttatggccgtgagatgttcgaaacctggtacaaaatggccgcgttgattcaatctggtttggacttaactccgatcattacccaccgtttccctattgatgaattccagcaagggtttgacgccatgcgttcgggtaaatcaggcaaagtggtattaagctgggattag

SEQ ID NO: 42781 - protein, 341 aa, Yersinia pseudotuberculosis
MKALSKLKAEEGIWMTDVPQPELGHNDIMIKIRKTAICGTDVHIYNWDEWSQKTIPVPMVVGHEYVGEVVAIGQEVKGFNIGDRVSGEGHITCGHCRNCRGGRTHLCRNTVGVGVNRPGSFAEYLVIPAFNAFKIPDNISDELAAIFDPFGNAVHTALSFDLVGEDVLVSGAGPIGIMAAAVCKHVGARHVVITDVNEYRLDLARKMGVTRAVNVSKENLNDVMTELGMTEGFDVGLEMSGAPPAFRSLLNSMNHGGRIAMLGIPPSDMSIDWNQVIFKGLFIKGIYGREMFETWYKMAALIQSGLDLTPIITHRFPIDEFQQGFDAMRSGKSGKVVLSWD

SEQ ID NO: 42782 - DNA, 1077 bp, Escherichia coli
  CDS (1)..(1077): transl_table=11
atgaaagcactggctcggtttggcaaggcctttggcggctacaagatgattgatgtcccacaacccatgtgtggcccggaagatgtagtgattgaaattaaagccgcggcaatctgcggcgcagacatgaagcactacaatgtcgatagcggttctgatgagtttaactctatccgcggccatgagttcgcaggttgtattgcgcaggttggtgaaaaagtcaaagactggaaagtggggcaacgcgtcgtatcggataacagcggtcacgtttgcggtgtttgtccggcctgtgaacaaggtgattttctgtgttgtacagaaaaagtaaaccttggtctggataataatacctggggcggtggtttttccaaatattgtctggttcctggtgaaattctcaaaattcatcgtcatgcgttgtgggaaatccctgatggtgttgattatgaggacgcagccgtacttgaccctatctgtaatgcctacaaatccatcgcgcagcaatcgaaattccttcctggtcaggatgtggtcgtcatcggcactggcccactcgggctgttctccgtacaaatggcgcgaattatgggggcggtaaatatcgtcgtcgttggtctgcaagaagatgtggcggtccgcttcccggttgcaaaagaactgggtgcgacggcagtagtaaatggttctaccgaagatgtggtggcgcgctgccagcaaatttgtggcaaagacaatctgggactggtgattgaatgctccggtgccaatatcgcactgaaacaagccatcgaaatgctccgcccgaacggggaagtggtacgcgttggaatgggcttcaaacctcttgatttctcgattaatgacattaccgcctggaacaaaagcatcattgggcatatggcctatgactccacctcatggcgtaacgctatcaggctattagccagcggcgctatcaaagtcaaaccgatgatcacgcatcgtatcggcctgtcgcaatggcgcgaagggtttgatgcgatggtcgataaaaccgcaatcaaagtgatcatgacttacgactttgatgaataa

SEQ ID NO: 42783 - protein, 358 aa, Escherichia coli
MKALARFGKAFGGYKMIDVPQPMCGPEDVVIEIKAAAICGADMKHYNVDSGSDEFNSIRGHEFAGCIAQVGEKVKDWKVGQRVVSDNSGHVCGVCPACEQGDFLCCTEKVNLGLDNNTWGGGFSKYCLVPGEILKIHRHALWEIPDGVDYEDAAVLDPICNAYKSIAQQSKFLPGQDVVVIGTGPLGLFSVQMARIMGAVNIVVVGLQEDVAVRFPVAKELGATAVVNGSTEDVVARCQQICGKDNLGLVIECSGANIALKQAIEMLRPNGEVVRVGMGFKPLDFSINDITAWNKSIIGHMAYDSTSWRNAIRLLASGAIKVKPMITHRIGLSQWREGFDAMVDKTAIKVIMTYDFDE

SEQ ID NO: 42784 - DNA, 1140 bp, Oryza sativa; identical to SEQ ID NO: 14640
  CDS (1)..(1140)

SEQ ID NO: 42785 - protein, 379 aa, Oryza sativa; identical to SEQ ID NO: 14641

SEQ ID NO: 42786 - DNA, 1140 bp, Oryza sativa; identical to SEQ ID NO: 14562
  CDS (1)..(1140)

SEQ ID NO: 42787 - protein, 379 aa, Oryza sativa; identical to SEQ ID NO: 14563

SEQ ID NO: 42788 - DNA, 1143 bp, Oryza sativa; identical to SEQ ID NO: 14490
  CDS (1)..(1143)

SEQ ID NO: 42789 - protein, 380 aa, Oryza sativa; identical to SEQ ID NO: 14491

SEQ ID NO: 42790 - DNA, 1074 bp, Brassica napus
  CDS (1)..(1074)
atggggaaaatggaggtagagaggaaaacaacaggctgggctgcgagagacccttctgggttactctctccttacacttacactctcagagagacaggaccagaggatgttcacataagaatcatatgctgtggaatctgccacacagatctccatcaaaccaaaaacgatcttggcatgtcaaactaccccatggttcctgggcacgaggttgttggggaagtggtggaggtgggatcagatgtgagcaagttcaccgcaggggatatagttggagttggttgtctcgttggatgctgcggaggttgtagcccctgcgagagagatctggaacagtattgtcccaagaagatctggagctacaacgatgtttacatcgatggtcaaccaacacaaggcggtttcgctagagccaccgtcgttcaccaaaagtttgtggtgaagattccagaaggaatggctgttgagcaggcggcaccactactgtgtgccggtgtgacagtgtacagtccactggctcacttcggtctgaagcgaccaggcctaagaggaggtatactagggctaggtggagttggtcacatgggtgtgaaaatagccaaagcaatgggtcaccatgtgactgtcataagctcatcaaacaagaagaaagaagaggctttgaaagatcttggagcagatgattacgtgatcggatccgaccaatcgaagatgaacgaattggcggattcaatggattacataatcgacacggtccctgttcatcatgcacttgagccttacttgtctctgcttaggcttgatgggaaactcatactcatgggagtcataagcaatccattacaatttctcactcctatggttatgcttgggaggaaagtgataacggggagcttcattgggagcatgaaggaaacagaggagatgcttgagttctgtaaagaaaagggtttgagttcgatcatcgaagtagtgaagatggattatgtgaacactgcgtttgagagactcgagaagaacgatgtgcgttataggttcgtggttgatgtcgaaggaagcaaacttgaggcttga

SEQ ID NO: 42791 - protein, 357 aa, Brassica napus
MGKMEVERKTTGWAARDPSGLLSPYTYTLRETGPEDVHIRIICCGICHTDLHQTKNDLGMSNYPMVPGHEVVGEVVEVGSDVSKFTAGDIVGVGCLVGCCGGCSPCERDLEQYCPKKIWSYNDVYIDGQPTQGGFARATVVHQKFVVKIPEGMAVEQAAPLLCAGVTVYSPLAHFGLKRPGLRGGILGLGGVGHMGVKIAKAMGHHVTVISSSNKKKEEALKDLGADDYVIGSDQSKMNELADSMDYIIDTVPVHHALEPYLSLLRLDGKLILMGVISNPLQFLTPMVMLGRKVITGSFIGSMKETEEMLEFCKEKGLSSIIEVVKMDYVNTAFERLEKNDVRYRFVVDVEGSKLEA

SEQ ID NO: 42792 - DNA, 1074 bp, Brassica napus
  CDS (1)..(1074)
atgggagaggtccttaagaaggaggcgtacggactggctgtaaaagacgaatctggagttatctcgcctttccgtttctcaagaagggagacaggagaaaatgatgtgaggttaaaagtgttgttctgtggaatttgccacacagatttaagcatggccataaacgagtgggggtttactagttacccccttgtccccgggcatgaaatagtgggcgtggtgactgaagtcggagccaaagtgactaaattcaacgccggagacaaagtgggagttggttatatggtcagctcatgcgggtcatgtgaaacctgcattgatgaccaagagaactactgtccaaaaatgatcctaacgtccggaggcaagtattacgatgacactataacatatggtggttactccgaccatatggtttgtgaagaggactacatcatccgtattccagaaaatcttcccttagacgctaccgcgccgctactctgcgctgggaccaccgtctattccccgatgaagtatcacgggcttgacaagccgggtatgcacattggtgtggtgggactaggcggtttaggtcatgtagctgtgaaatttgctaaggctatgggtactaaggttacagttattagtacttcggataggaagagagacgaggcgttaactcggcttggtgcggatctgttcttggtgagccgtgacccggaacagatgaaggatgcaatgggtactatggatggtattattgataccgtatctgcttctcatccagttcttccgattcttgatttgcttaaatataagggtaaacttattatggttggtgcacctgataaaccgcttgagcttccggttctgcctctcatctttgggaaaaagatggtggtgggaagtatggtaggagggataaaagagactcaagagatgatggatttggccggaaaacacaacatcacggcagatattgagcttatctctgcggattatgtcaacactgccatgaaacggctcgagaaggctgacgttagataccgttttgtgattgatgttgccaacaccttgaagcctagtccttaa

SEQ ID NO: 42793 - protein, 357 aa, Brassica napus
MGEVLKKEAYGLAVKDESGVISPFRFSRRETGENDVRLKVLFCGICHTDLSMAINEWGFTSYPLVPGHEIVGVVTEVGAKVTKFNAGDKVGVGYMVSSCGSCETCIDDQENYCPKMILTSGGKYYDDTITYGGYSDHMVCEEDYIIRIPENLPLDATAPLLCAGTTVYSPMKYHGLDKPGMHIGVVGLGGLGHVAVKFAKAMGTKVTVISTSDRKRDEALTRLGADLFLVSRDPEQMKDAMGTMDGIIDTVSASHPVLPILDLLKYKGKLIMVGAPDKPLELPVLPLIFGKKMVVGSMVGGIKETQEMMDLAGKHNITADIELISADYVNTAMKRLEKADVRYRFVIDVANTLKPSP

SEQ ID NO: 42794 - DNA, 1074 bp, Brassica napus
  CDS (1)..(1074)
atgggaaaggtgcctgcgacggaggcgttcggattggccgcgaaagacgaatccggagttctctcgcctttccgtttctcaagaagggagacgggagagaaggatgtgaggttaaaagtgttgttctgtggaatttgccacactgatgtatgtatggccagaaacgagtggggatttactacttaccctctcgtccccgggcatgagattgttggcgtggtgactgaagtcggagctaaagtgattaaattcaaagccggagacaaagtcggagttggttatatgctcagctcgtgccggtcatgtgacatctgcaccgatgaccaagagaaccactgtccaaaaatgattatgacgtccggaggaaagtactacgatgacaccatgacttatggtggttactctgaccacctggtttgtgaagaggattacatcatccgtattcctgaaaatctcccgttagacgctgccgcgccgctactctgcgctggggtcacggtttattcaccgttgaagtctcacggactcgacaagcccggaatccacattggtgtggtgggactaggcggtttaggtcacgtagcagtgaaatttgccaaggctatgggtactaaggttacggttattagttcgtcagatggtaagagagacgaggcgattaatcggcttggtgcggatctgttcttggtgagccgtgacccggaagagatgaaggatgcaatggggactatggatggtattattgatacagtatctgccactcatccgcttcttccgcttcttggtttgctaaaatataagggaaaatttattatggttggtgcacccgataaaccacttgaccttccagctttaccgctcatcttagggaagaagatggtggtgggaagtatgacaggagggataaaagagtctcaagagatggttgattttgccggtaaacacaacataacggcagatattgagcttatctctgcggattatgtcaacatggctatggaacggctagaaaagggggatgttagataccgttttgtgattgatgttgccaacacaatgaagcctactccttag

SEQ ID NO: 42795 - protein, 357 aa, Brassica napus
MGKVPATEAFGLAAKDESGVLSPFRFSRRETGEKDVRLKVLFCGICHTDVCMARNEWGFTTYPLVPGHEIVGVVTEVGAKVIKFKAGDKVGVGYMLSSCRSCDICTDDQENHCPKMIMTSGGKYYDDTMTYGGYSDHLVCEEDYIIRIPENLPLDAAAPLLCAGVTVYSPLKSHGLDKPGIHIGVVGLGGLGHVAVKFAKAMGTKVTVISSSDGKRDEAINRLGADLFLVSRDPEEMKDAMGTMDGIIDTVSATHPLLPLLGLLKYKGKFIMVGAPDKPLDLPALPLILGKKMVVGSMTGGIKESQEMVDFAGKHNITADIELISADYVNMAMERLEKGDVRYRFVIDVANTMKPTP

SEQ ID NO: 42796 - DNA, 1083 bp, Brassica napus
  CDS (1)..(1083)
atggcgaaatctccagagacagagcatccgaacaaagcctttggttgggctgccaaagacaaatctggtgtactctctcctttccatttctccagaagagacaatggtgacaatgatgtgacagtgaaaatcttgtactgtggagtgtgccacactgatttacataccatcaaaaacgactggggtttctcctattatcctgtagttcccgggcatgaaatagttggaatagctacaaaagttggcaaaaacgtgactaaattcagagaaggagaccgtgttggagtaggagtgatcactggttcttgccagtcttgcgaatcttgtaaccaagatcttgaaaactactgtccccaaatgtctttcacctacaactccataggatccgatggaaccaagacctacggtggatattcggagtccattgtggtcgatcaacgttttgtcttacagtttcccgagggattgcctagcgattcgggtgcccccttgctgtgtgctggtatcactgtgtatagtccaatgaagtactatggtatgaccgagccagggaagcatttgggcgtggctggacttggtgggcttggtcatgttgctgtcaagattggtaaagcctttggtttgaaagttactgtgattagttcttctcctagtaaagaagacgaagctattaatcgacttggtgctgattcgtttcttgtctcatctgatcctcagaagatgaaggctgcaattggaactatggactatattatcgatacggtatcagcagtacatgctctgtttccattgcttggtttactcaaagtcaatggaaagcttgtcacgttaggcttacctgagaagcctcttgagctaccaatcttccctcttgttctcggaagaaaaatggtgggaggaagtgacattggagggatgaaggagacacaagagatgcttgagttctgcgctaagcataacataacggcagatattgagctgatcaagatggatgagattaacactgcgatggagaggcttgctaagtctgatgttaggtacaggttcgtgatcgacgtggctaactccttgagccctccatga

SEQ ID NO: 42797 - protein, 360 aa, Brassica napus
MAKSPETEHPNKAFGWAAKDKSGVLSPFHFSRRDNGDNDVTVKILYCGVCHTDLHTIKNDWGFSYYPVVPGHEIVGIATKVGKNVTKFREGDRVGVGVITGSCQSCESCNQDLENYCPQMSFTYNSIGSDGTKTYGGYSESIVVDQRFVLQFPEGLPSDSGAPLLCAGITVYSPMKYYGMTEPGKHLGVAGLGGLGHVAVKIGKAFGLKVTVISSSPSKEDEAINRLGADSFLVSSDPQKMKAAIGTMDYIIDTVSAVHALFPLLGLLKVNGKLVTLGLPEKPLELPIFPLVLGRKMVGGSDIGGMKETQEMLEFCAKHNITADIELIKMDEINTAMERLAKSDVRYRFVIDVANSLSPP

SEQ ID NO: 42798 - DNA, 1110 bp, Triticum aestivum
  CDS (1)..(1110)
atggcgcctacggcaacgacgacgacgacggcggcggagcagcagcagcacccgaggaaggcggtggggctcgcggcgcacgacgcatccggccacctctcgcccatccgcatcccccgaaggagcactggtgacgacgacgtggccataaaggtgctctactgcggcatctgccactccgacctgcacaccatcaagaacgactggaggaacgccatctaccccgtcgtccccgggcacgagattgccggggtggtgacggaggtcggcaagaacgtggcggggttcgcggccggcgacagggtgggcgtgggctgcatggtgaacacctgccgggcctgcgagagctgcgaggagggcgccgagaactactgcgccagggtcgtcctcacctacaactcccgcgacagggacggcgccgtcacccgcggcggctactccgacctggtcgtcgccgacgcgcgcttcgtcgtccgcttccccgacgccctgccgctcgacgtcgccgcgccgctgctctgcgcgggcgccaccgtgtacgcccccatgcggcgccacgggctgggcgcgcccggcagccacgtgggcgtgatcggcctcggcgggctcgggcacgtcgccgtcaagttcgccagggcgttcggggcggcgaaggtgacggtgatcagcacgtcgcccgggaagcgggaggaggcgctggagcggctgggcgcggacgcgttcgtcctcagcaccgacgcggcggagatgaaggccgccgcgggcaccatgcacggcatcgtcaacacggcgtccgccgccgcgtccctgcacccgtacctggcgctcctcaaaccccacggcaagatgatcctgctcggcatccccgataagcccctgcaagtctccgcattcgctctcatcggcggcggcaagactcttgccgggagctgcatggcgagcatcagcgagacgcaggagatgctagacttcgccgccgagcatggcgtggcggcggacgtcgaggtgatcggcgccggggaggtgaacgcggccatggagcgcctggccaagggcgacgtcaggtaccgcttcgtcatcgacgtcggcaacaccctcaaggcggattga

SEQ ID NO: 42799 - protein, 369 aa, Triticum aestivum
MAPTATTTTTAAEQQQHPRKAVGLAAHDASGHLSPIRIPRRSTGDDDVAIKVLYCGICHSDLHTIKNDWRNAIYPVVPGHEIAGVVTEVGKNVAGFAAGDRVGVGCMVNTCRACESCEEGAENYCARVVLTYNSRDRDGAVTRGGYSDLVVADARFVVRFPDALPLDVAAPLLCAGATVYAPMRRHGLGAPGSHVGVIGLGGLGHVAVKFARAFGAAKVTVISTSPGKREEALERLGADAFVLSTDAAEMKAAAGTMHGIVNTASAAASLHPYLALLKPHGKMILLGIPDKPLQVSAFALIGGGKTLAGSCMASISETQEMLDFAAEHGVAADVEVIGAGEVNAAMERLAKGDVRYRFVIDVGNTLKAD

SEQ ID NO: 42800 - DNA, 1074 bp, Linum usitatissimum
  CDS (1)..(1074)
atggcagagaaacaacatccggtgccggcctacggattggctgccagagaccagtctggacttgtttctcctttcaacttctccagaagagaaacaggggaaaccgatgtgaaatttaaggttctctactgtgggatttgccattccgatcttcatatgctcaagaatgaatggggctcctccacctatcccattgtccctgggcatgagatagtgggacaagtgacagaggttggaagcaaagtggagaaatacagagttggagacagagtaggcgttggatgcatggttgggtcgtgccgatcttgcaacaactgctcccaaagcatcgaaaattactgccccaagatgatccaaacctatggaggaacctaccatgatggcacccctacctacggaggctactccgacgtcatggtctgcgacgagcatttcgtggtccgagtccccgactccctgcccttagacgttgccgcacctctgctctgcgctggtatcacactttacagccctttaaagttctatggactggacaagccgggcctccacgtcggcattgtcgggctcggtggactgggccacgtgggtgtcaagtttgctaaagccatgggtgtgaaagtcaccgtgattagtacctcccctggcaagaagcaggaggcaatcgagcgacatggtgctgatgccttcttggtgagccttgaccaggaacaaatgaaggctgcaatggggacgatggatggtattatcgacacggtatcagctgttcacccaataatgccattgattgggctgttaaagacacaaggcaagttggtgttggttggtgctccagagaagcctcttgagttgccagttttccctctgctcatgggaaggaagatagtaggagggagttgcattggaggaatgaaggagacgcaagagatgcttgatttcgcagcaaagcacaacatcactgcggacattgaggttatatcagcagactatgtgaacactgcaatggagaggcttgccaagaatgatgttaaatacagattcgtcatcgatgttgccaacactatgcaagctccttga

SEQ ID NO: 42801 - protein, 357 aa, Linum usitatissimum
MAEKQHPVPAYGLAARDQSGLVSPFNFSRRETGETDVKFKVLYCGICHSDLHMLKNEWGSSTYPIVPGHEIVGQVTEVGSKVEKYRVGDRVGVGCMVGSCRSCNNCSQSIENYCPKMIQTYGGTYHDGTPTYGGYSDVMVCDEHFVVRVPDSLPLDVAAPLLCAGITLYSPLKFYGLDKPGLHVGIVGLGGLGHVGVKFAKAMGVKVTVISTSPGKKQEAIERHGADAFLVSLDQEQMKAAMGTMDGIIDTVSAVHPIMPLIGLLKTQGKLVLVGAPEKPLELPVFPLLMGRKIVGGSCIGGMKETQEMLDFAAKHNITADIEVISADYVNTAMERLAKNDVKYRFVIDVANTMQAP

SEQ ID NO: 42802 - DNA, 1101 bp, Linum usitatissimum
  CDS (1)..(1101)
atggcgaataatgatggtgaaatcgcagtgggaaagagagatggaggagaggaagagaacatggctgcttggcttctgggtatccaaaccctcaagattcagccttaccaactccctactcttggtcctcatgatgtcaaggtccggattaaggctctaggcatttgcggaagtgatgttcatcatttcaagactatgagatgtgctaatttcatagtgaagaaaccaatggtgatcggccatgaatgtgctggcatcattgaagagattggcagtgaagtcaagagcctctcaacaggtgaccgtgtagccttagagcctggcatcagttgctcaaggtgtaacctttgcaagaatggccgctacaacttgtgctccgaaatgcgattcttcggctctccacctaccaacggctctcttgccaacaaggtggtgcatcccgcaagcctatgctacaagctccccgagaacgtgagcttggaggaaggagcgatgtgcgagcccctaagtgtaggggtccacgcttgtcgtagagcacaggttggccccgagactagtgtcctgatcttgggagctggaccaatcgggctcatcaccttgctggttgctcgagcattcggatcccctcgcgttgtgatgaccgatgttgatgagacccgtctatccattgctaagagcctcggtgctgatgagactatccaagtctcgacagatccgaaggatgttagtgaggaagtgatgaaagtgcagaatgctatgggatcagggattgatgttaccttggactgtgttggatataacaagaccatgactactgctctgaatgccacacgttctggtggcaaagtttgcctaataggattagctcttagtgagatgactgtccctcttactcctgctgctgccagggaagtagatgtgattggcatatttcggtaccggaacacatggccactctgccttgatttcttgaagactggcaagatttatgtgaagccattgataactcacaggtttaagttcacacaggaggatattgactcggcgttcgagaccagtgctcgtggtgggaacgcgatcaaggttatgtttaacctgtaa

SEQ ID NO: 42803 - protein, 366 aa, Linum usitatissimum
MANNDGEIAVGKRDGGEEENMAAWLLGIQTLKIQPYQLPTLGPHDVKVRIKALGICGSDVHHFKTMRCANFIVKKPMVIGHECAGIIEEIGSEVKSLSTGDRVALEPGISCSRCNLCKNGRYNLCSEMRFFGSPPTNGSLANKVVHPASLCYKLPENVSLEEGAMCEPLSVGVHACRRAQVGPETSVLILGAGPIGLITLLVARAFGSPRVVMTDVDETRLSIAKSLGADETIQVSTDPKDVSEEVMKVQNAMGSGIDVTLDCVGYNKTMTTALNATRSGGKVCLIGLALSEMTVPLTPAAAREVDVIGIFRYRNTWPLCLDFLKTGKIYVKPLITHRFKFTQEDIDSAFETSARGGNAIKVMFNL

SEQ ID NO: 42804 - DNA, 1140 bp, Zea mays
  CDS (1)..(1140)
atggcgaccgcggggaaggtgatcaagtgcaaagctgcggtggcatgggaggccggcaagccactgtcgatcgaggaggtggaggtagcgcctccgcaggccatggaggtgcgcgtcaagatcctcttcacctcgctctgccacaccgacgtctacttctgggaggccaaggggcagactcccgtgttccctcggatctttggccatgaggctggaggtatcatagagagtgttggagagggtgtgactgacgtagctccgggcgaccatgtccttcctgtgttcactggggagtgcaaggagtgcgctcactgcaagtcggcagagagcaacatgtgtgatctgctcaggatcaacaccgaccgcggtgtgatgattgccgatggcaagtcgcggttttcaatcaatgggaagcctatctaccactttgttgggacttccaccttcagcgagtacactgtcatgcatgtcggttgtgttgcaaagatcaatcctcaggctccccttgataaagtttgcgtccttagctgtggtatttctaccggtcttggtgcatcaattaatgttgcaaaacctccgaagggttcgacagtggctgttttcggtttaggagccgttggtcttgccgctgcagaaggtgcaaggattgctggagcgtcaaggatcattggtgtcgacctgaaccccagcagattcgaagaagctaggaagttcggttgcactgaatttgtgaacccaaaggaccacaacaagccagtgcaggaggtacttgctgagatgaccaacggaggggtcgaccgcagcgtggaatgcactggcaacatcaatgctatgatccaagctttcgaatgtgttcatgatggctggggtgttgccgtgctggtgggtgtgccgcataaggacgctgagttcaagacccacccgatgaacttcctgaacgaaaggaccctgaaggggaccttctttggcaactataagccacgcactgatctgccaaatgtggtggagctgtacatgaaaaaggagctggaggtggagaagttcatcacgcacagcgtcccgttcgccgagatcaacaaggcgttcgacctgatggccaagggggagggcatccgctgcatcatccgcatggagaactag

SEQ ID NO: 42805 - protein, 379 aa, Zea mays; identical to SEQ ID NO: 14505

SEQ ID NO: 42806 - DNA, 1071 bp, Hordeum vulgare
  CDS (1)..(1071)
atggctgctgaatccgggacagagagtggcaactgcagtgcttgggcagcaaaagatccttctggactactctccccgcacactttcaaccgtaggactgtacgacatgatgatgtttctttgaggatcacacattgtggtgtctgttatgccgatgttatctggacaaaaaataggcacaatgactcggtgtaccctttagtccctgggcatgagattgctggagttgtaaccgaggttggttcagacgtcaagggcttcaagctgggtgaccatgtggctgtggggacatatgtcaactcatgccgtgactgtgacaactgcaatagcttcctcgagaaccactgctcaaaatttgttttcactttcaatggtgttgatacggatggtactgtcacaaagggaggatattccagtcacgttgtagttcatgaacggtactgctataaaatacctgatggctacccactggaaaaggccgcacctttagtttgtgctggaatcactgtgtacactccgatgacgcgacataacatgaaccagccagggaagtcacttggtgttgtcggtcttggtgggttgggtcacatggcagtgaaatttgggaaagcctttggactgaaggtgactgttttgagtacaagtgaatcgaaaagagatgaagcaatcaaccttcttggtgcagataattttgtggtttcatcagataaaaaacagatggagtccctgaaaagttccctggacttcattgtcgatactgcctctggtgaccacccatttgacccgtatcttgcgcttctgaaagttggtggcctgatggcactagttggcttccctggagaaatcagagtgcatccagcaacacttaatctgggtgcacggactttatctgggagtgtaaccggaggcacgaaggacacacaggagatgataaacttctgtgcggcaaacaaaatctacccagacattgagttgataaagatagactacatcaaccaggctctcgagaggcttgtcaaccgggatgtgaggtaccggtttgtaatcgacatagagagctctttaaagtga

SEQ ID NO: 42807 - protein, 356 aa, Hordeum vulgare
MAAESGTESGNCSAWAAKDPSGLLSPHTFNRRTVRHDDVSLRITHCGVCYADVIWTKNRHNDSVYPLVPGHEIAGVVTEVGSDVKGFKLGDHVAVGTYVNSCRDCDNCNSFLENHCSKFVFTFNGVDTDGTVTKGGYSSHVVVHERYCYKIPDGYPLEKAAPLVCAGITVYTPMTRHNMNQPGKSLGVVGLGGLGHMAVKFGKAFGLKVTVLSTSESKRDEAINLLGADNFVVSSDKKQMESLKSSLDFIVDTASGDHPFDPYLALLKVGGLMALVGFPGEIRVHPATLNLGARTLSGSVTGGTKDTQEMINFCAANKIYPDIELIKIDYINQALERLVNRDVRYRFVIDIESSLK

SEQ ID NO: 42808 - DNA, 1113 bp, Hordeum vulgare
  CDS (1)..(1113)
atggcgaaggcggtggcgaaggaggtgggggcgcaggaggcggcgcaaggcagcgcggcgctcgggtgggcggccagagacgcctccggtgtcctctccccgttcgacttctcaagaagggctcagaaggacgacgatgtgacgatcagggtgctctactgcgggatctgccacactgacctctacaccatcaagaacgagtggggcaccgccatgtaccccgtcgtccccgggcacgagatcctgggcgtcgtgaccagcgtcggcagcggcgtcagcaagttcaaggccggcgacacggtgggcgtgggctacttcgtcgggtcgtgccgctcctgcgagtgctgcggcaacgggtacgagaactactgctccggcatggtgctcacctccaacggcatcgaccccgagcacggcggcgcggtcacccaggggggcttctccgacgtcatgctcgtgaacgaggactacgtggtccgcgtcccggacgggctgccgctggacaaggccgcgccgctgctctgcgccggcgtcacggtgtacagcccgatgatgcgcttcggcctgaacgcgccggggaagcacctgggcgtcgtcggcctcgggggcctcggccacgtcgccgtcaagttcggcaaggcgttcggcatgcgggtcaccgtcatcagcacctcgcccgggaagcgcgaggaggcgctggagcggctgggcgcggacgagttcctggtgagccgggaccccgagcagatgcaggcggccgtgggcaccatggacggcatcctcgacacggtgtcggcgtggcacccgatctcgccgctgttcgcgctgatgaagccgatggggcagatggtgttcgtgggagggccgaccaagccgctggagctgccggcgtacgccatcgtgccgggcgggaagggcatcgccgggaactgcgtcggcggcatcagggactgccaggccatgctggaattcgcggcaaagcacggcatcaccgcggaggtggaggtgataaagatggactacgtcaacacggcgctcgagcggctcgcgaagaacgacgtccgctaccgcttcgtcatcgacatcgcgggcagcctcggctcaacctcgtga

SEQ ID NO: 42809 - protein, 370 aa, Hordeum vulgare
MAKAVAKEVGAQEAAQGSAALGWAARDASGVLSPFDFSRRAQKDDDVTIRVLYCGICHTDLYTIKNEWGTAMYPVVPGHEILGVVTSVGSGVSKFKAGDTVGVGYFVGSCRSCECCGNGYENYCSGMVLTSNGIDPEHGGAVTQGGFSDVMLVNEDYVVRVPDGLPLDKAAPLLCAGVTVYSPMMRFGLNAPGKHLGVVGLGGLGHVAVKFGKAFGMRVTVISTSPGKREEALERLGADEFLVSRDPEQMQAAVGTMDGILDTVSAWHPISPLFALMKPMGQMVFVGGPTKPLELPAYAIVPGGKGIAGNCVGGIRDCQAMLEFAAKHGITAEVEVIKMDYVNTALERLAKNDVRYRFVIDIAGSLGSTS

SEQ ID NO: 42810 - DNA, 1083 bp, Helianthus annuus
  CDS (1)..(1083)
atggcaacctcaccggaatccgagcatccgatcaaggcgtatggttatgcggcccgcgacacgtctggattactttcccctctcaccttctccagaagggctactggagagaaagatgtgaggttcaaagttctttactgcggaatctgtcattccgatcttcacgttgtcaaaaacgaatggggatttaccaagtacccgattactccagggcatgagattgttggtgtggtgacagaagtaggaagcaaagtggagaatttcaagattggagacaaagttggggttgggtgcttggtgggatcatgtagatcatgtcaaagttgtgcttctgactatgaacagtattgcgataagcaggtacaaacttatggtttcaccaactttgatggcacacagacgtacggtggatactccgatcacatggtttcagatgagcattttgtactccgttggccggagaacttaccacttgattctggtgcaccgttgctatgtgctgggatcacaacttacagccctctcaagtactttggattggacaagcctggtacgaaagtgggcgtggttgggctcggtgggctcggtcatgttgctgtgaagatggctaaggcatttggggctgaagttactgtttttagtacttcccctgctaaggagaaagaagcaattcagggacttaaagctgaccatttcgtaaacagtaaagatggacttcaaatgcaggctgctaagggcacactcgatggcatcatcgacacagtgtccgcaaatcatccaattgcgccattgcttaatgcacttacaccccatggaaagcttgttcttgttggtgcacctgagaagccacttgaagtagcagcattttcgttgatcatgggaaggaagcttgttgcgggtagtaacattggtggaattaaagagactcaggaaatgcttgactttgcagcaaagcatgggataactgcagatatagaggttataccgatagactatgtgaacacagcgatggaaaggctgttgaaatccgatgtgaggtaccgatttgtgatcgatgtggcgaactcgatcaaggctgaatag

SEQ ID NO: 42811 - protein, 360 aa, Helianthus annuus
MATSPESEHPIKAYGYAARDTSGLLSPLTFSRRATGEKDVRFKVLYCGICHSDLHVVKNEWGFTKYPITPGHEIVGVVTEVGSKVENFKIGDKVGVGCLVGSCRSCQSCASDYEQYCDKQVQTYGFTNFDGTQTYGGYSDHMVSDEHFVLRWPENLPLDSGAPLLCAGITTYSPLKYFGLDKPGTKVGVVGLGGLGHVAVKMAKAFGAEVTVFSTSPAKEKEAIQGLKADHFVNSKDGLQMQAAKGTLDGIIDTVSANHPIAPLLNALTPHGKLVLVGAPEKPLEVAAFSLIMGRKLVAGSNIGGIKETQEMLDFAAKHGITADIEVIPIDYVNTAMERLLKSDVRYRFVIDVANSIKAE

SEQ ID NO: 42812 - DNA, 1083 bp, Helianthus annuus
  CDS (1)..(1083)
atggcgaaatcacctgaatccgagcatccgatcaaggcctatggttatgctgctcgagacacttccggagttctttctcctctcactttctcacgaagggctacaggtgataaggatgtgaggtttaaagttttgtattgcgggatctgccattctgatctccactttgccaagaacgaatggggcatgtctacatatcccattcttcctgggcatgagatcgtgggtgtggtgacagaagtaggcaccaaggtggagaaattcaaagttggggacactgtaggggttggatgtttggtgggatcatgcggatcttgtcaaagttgtgccaatgatcttgaaagctactgtcccaaacagattctaacttacggtttcctgtaccatgatggcacacttacatacggtggctactccgatcacatggtggcagatgagcattttgtgctgcgttggcccgagaatttgccccttgattcgggtgcaccattgttatgtgccggcatcacaacttatagcccactcagacactttggactagacaagcctggtatgaaggtgggtgtggttggtcttggtgggcttggtcatgttgcggtcaagtttgccaaggcttttggagccgaggttacagtcatcagtaccagctcggctaagaagcaagaagcgcttcaaggacttaaagctgaccatttcattgttagcaaagaccctgagcaaatgcagtgtgcagcaagttctttggatggaataattgacactgtctctgcgtctcaccccattgaaccattgttgagtgtgctcaaacaagatgggaagcttgtttttctgggtgtaccagagaagccaattgagatatctacgtattctttaattatggggagaaagatcgttactggaagtgcgacgggagggctaaaggagactcaggagatgcttgattttgccgcaaaacatggcgtgactgcagatattgagctaattcccatagactatgtgaacacggctatggatcgcgtcttgaaatcggatgttagataccgatttgtcattgatgtggcgaacaccctcaaagctccatag

SEQ ID NO: 42813 - protein, 360 aa, Helianthus annuus
MAKSPESEHPIKAYGYAARDTSGVLSPLTFSRRATGDKDVRFKVLYCGICHSDLHFAKNEWGMSTYPILPGHEIVGVVTEVGTKVEKFKVGDTVGVGCLVGSCGSCQSCANDLESYCPKQILTYGFLYHDGTLTYGGYSDHMVADEHFVLRWPENLPLDSGAPLLCAGITTYSPLRHFGLDKPGMKVGVVGLGGLGHVAVKFAKAFGAEVTVISTSSAKKQEALQGLKADHFIVSKDPEQMQCAASSLDGIIDTVSASHPIEPLLSVLKQDGKLVFLGVPEKPIEISTYSLIMGRKIVTGSATGGLKETQEMLDFAAKHGVTADIELIPIDYVNTAMDRVLKSDVRYRFVIDVANTLKAP

SEQ ID NO: 42814 - DNA, 1062 bp, Brassica napus
  CDS (1)..(1062)
atgggaaaggaggcattcggattggccgcaaaagacaattctggagttctctcgactttccatttctctagaagggagacaggagagaaggatgttaggttcaaagttttgttctgtggaatctgtcactctgatttgcatatgatcaagaatgagtggggaatatctacttaccctctcgtccccgggcatgagattgttggtgtggtgactgaagtgggaagcaaagtgactaaattcaaaactggagacaaagtcggagtaggttgcatggttggctcgtgcggatcatgtgatagctgcaccgaaggtctcgagaactactgtccaaaatcgatccaaacgtacggattcaagtattacgacgacacaataacctacggtggttactccgacaacatggtttgcgacgaaggtttcatcatccgtatgcccgaaaatctcccattggacgctgctgctccgctactatgcgcggggatcacggtctactccccgctaaaacatcacgggctcgacaagcctggcatgcacattggtgtggttggactaggcggtttgggtcacgtggcggtgaaatttgctaaggctatgggtcttaaggttacggttattagtacttcggatagtaagagagacgaagcgattaataggcttggtgcggacgcgttcgtggtgagccgtgaccaaaaacagattaaggatgcaatgaggacattggatggtattattaataccgtatctgcgactcattcccttcttcctttgctcggtttgctaaagcctaagggaaaacttgttatggttggtgcaccagaaaagccactcgagctcccggtcatgcctctcatcttcgagaggaagatggtaatgggaagtatgataggagggataaaggagactcaagagatggtggatatggcaggaaaacacaacatcactgctgatattgagcttatctctgcggactatgtcaacactgccatggaacggctcgagaaggccgacgttagataccgttttgtgattgatgttgccaacacattgaagcctactccttaa

SEQ ID NO: 42815 - protein, 353 aa, Brassica napus
MGKEAFGLAAKDNSGVLSTFHFSRRETGEKDVRFKVLFCGICHSDLHMIKNEWGISTYPLVPGHEIVGVVTEVGSKVTKFKTGDKVGVGCMVGSCGSCDSCTEGLENYCPKSIQTYGFKYYDDTITYGGYSDNMVCDEGFIIRMPENLPLDAAAPLLCAGITVYSPLKHHGLDKPGMHIGVVGLGGLGHVAVKFAKAMGLKVTVISTSDSKRDEAINRLGADAFVVSRDQKQIKDAMRTLDGIINTVSATHSLLPLLGLLKPKGKLVMVGAPEKPLELPVMPLIFERKMVMGSMIGGIKETQEMVDMAGKHNITADIELISADYVNTAMERLEKADVRYRFVIDVANTLKPTP

SEQ ID NO: 42816 - DNA, 1101 bp, Brassica napus
  CDS (1)..(1101)
atgggaagtgtagaaggtggagaaaagaaggctttaggatgggctgcaagagatccttctggtgttctctctccttactcctacactttgaggagcacagggccagatgatgtgtatataaaggttatatgctgtggaatctgccatactgatatccaccagattaaaaatgatcttggaatgtccaattatcctatggttcctggacacgaggtggtaggtgaagtggttgaagtgggatcagatgtgagcaagttcaccgtaggagatgtggtcggagtcggcgttatcgtaggatgctgcggtagctgcaaaccctgcagctcagatcttgaacagtactgtaacaagagaatctggagttacaatgatgtctacaccgacggaaaaccaactcaaggtggcttcgctgacactatgatcgtcaatcagaaatttgtcgtgaagatcccggaaggtatgccggtggaacaagctgccccgctgctctgcgcgggagtaactgtgtacagtccgttgagccacttcggtctaatgtcaagcgggctcagaggagggattctagggttaggaggagttggacacatgggtgtgaagatagctaaagcaatgggacatcacgtgactgtgataagctcatcagagaggaaaagagaagaagcaatggatcatctaggagctgacgactatgtagtgagctctgatcaagcagagatgcaaagaatcgcagactctcttgactatatcatcgataccgtaccggtgtttcaccctctggagccttacttggctagtcttaaactcgatgggaaactgatcctcatgggtgttattaacactcctcttcagttcatcacccctctcgtcattcttgggaggaaagtgatatcaggaagctttattgggagcattaaggagacagaggaagtattggctttctgcaaagagaaagggcttacgtcgacaattgaagtggtgaagattgatgagcttaacactgcgtttgagaggcttcacaagaacgatgttcgttacagatttgtggttgatgttgccggaagcaatctcgtcgaggaggctgcaacaacaactacaaaatga

SEQ ID NO: 42817 - protein, 366 aa, Brassica napus
MGSVEGGEKKALGWAARDPSGVLSPYSYTLRSTGPDDVYIKVICCGICHTDIHQIKNDLGMSNYPMVPGHEVVGEVVEVGSDVSKFTVGDVVGVGVIVGCCGSCKPCSSDLEQYCNKRIWSYNDVYTDGKPTQGGFADTMIVNQKFVVKIPEGMPVEQAAPLLCAGVTVYSPLSHFGLMSSGLRGGILGLGGVGHMGVKIAKAMGHHVTVISSSERKREEAMDHLGADDYVVSSDQAEMQRIADSLDYIIDTVPVFHPLEPYLASLKLDGKLILMGVINTPLQFITPLVILGRKVISGSFIGSIKETEEVLAFCKEKGLTSTIEVVKIDELNTAFERLHKNDVRYRFVVDVAGSNLVEEAATTTTK

SEQ ID NO: 42818 - DNA, 1074 bp, Brassica napus
  CDS (1)..(1074)
atgggaaaggtgcctgcgacggaggcgttcggattggccgcgaaagacgaatccggagttctctcgcctttccgtttctcaagaagggagacgggagagaaggatgtgaggttaaaagtgttgttctgtggaatttgccacactgatgtatgtatggccagaaacgagtggggatttactacttaccctctcgtccccgggcatgagattgttggcgtggtgactgaagtcggagctaaagtgattaaattcaaagccggagacaaagtcggagttggttatatgctcagctcgtgccggtcatgtgacatctgcaccgatgaccaagagaaccactgtccaaaaatgattatgacgtccggaggaaagtactacgatgacaccatgacttatggtggttactctgaccacctggtttgtgaagaggattacatcatccgtattcctgaaaatctcccgttagacgctgccgcgccgctactctgcgctggggtcacggtttattcaccgttgaagtctcacggactcgacaagcccggaatccacattggtgtggtgggactaggcggtttaggtcacgtagcagtgaaatttgccaaggctatgggtactaaggttacggttattagttcgtcagagagtaagagagacgaggcgattaatcggcttggtgcggatctgttcttagtgagccgtgacccggaagagatgaaggatgcaatggggactatggatggtattattgatacagtatctgccactcatccgcttcttccgcttcttggtttgctaaaatataagggaaaattaattatggttggtgcacccgataaaccacttgaccttccagctttaccgctcatcttagggaagaagatggtggtgggaagtatgacaggagggataaaagagtctcaagagatggttgattttgccggtaaacacaacataacggcagatattgagcttatctctgcggattatgtcaacatggctatggaacggctagaaaagggggatgttagataccgttttgtgattgatgttgccaacacaatgaagcctactccttag

SEQ ID NO: 42819 - protein, 357 aa, Brassica napus
MGKVPATEAFGLAAKDESGVLSPFRFSRRETGEKDVRLKVLFCGICHTDVCMARNEWGFTTYPLVPGHEIVGVVTEVGAKVIKFKAGDKVGVGYMLSSCRSCDICTDDQENHCPKMIMTSGGKYYDDTMTYGGYSDHLVCEEDYIIRIPENLPLDAAAPLLCAGVTVYSPLKSHGLDKPGIHIGVVGLGGLGHVAVKFAKAMGTKVTVISSSESKRDEAINRLGADLFLVSRDPEEMKDAMGTMDGIIDTVSATHPLLPLLGLLKYKGKLIMVGAPDKPLDLPALPLILGKKMVVGSMTGGIKESQEMVDFAGKHNITADIELISADYVNMAMERLEKGDVRYRFVIDVANTMKPTP

SEQ ID NO: 42820 - DNA, 1074 bp, Brassica napus
  CDS (1)..(1074)
atgggagaggtccttaagaaggaggcgtacggactggctgtaaaagacgaatctggagttatctcgcctttccgtttctcaagaagggagacaggagaaaatgatgtgaggttaaaagtgttgttctgtggaatttgccacacagatttaagcatggccataaacgagtgggggtttactagttacccccttgtccccgggcatgaaatagtgggcgtggtgactgaagtcggagccaaagtgactaaattcaacgccggagacaaagtgggagttggttatatggtcagctcatgcgggtcatgtgaaacctgcattgatgaccaagagaactactgtccaaaaatgatcctaacgtccggaggcaagtattacgatgacactataacatatggtggttactccgaccatatggtttgtgaagaggactacatcatccgtattccagaaaatcttcccttagacgctaccgcgccgctactctgcgctgggaccaccgtctattccccgatgaagtatcacgggctcgacaagccgggtatgcacattggtgtggtgggactaggcggtttaggtcatgtagctgtgaaatttgctaaggctatgggtattaaggttacagttattagtacttcggataggaagagagacgaggcgttaactcggcttggtgcggatctgttcttggtgagccgtgacccggaacagatgaaggatgcaatgggtactatggatggtattattgataccgtatctgctactcatccagttcttccgattcttgatttgcttaaatataagggtaaacttattatggttggtgcacctgataaaccacttgagcttccggttctgcctctcatctttgggaaaaagatggtggtgggaagtatggtaggagggataaaagagactcaagagatgatggatttggccggaaaacacaacatcacggcagatattgagcttatctctgcggattatgtcaacactgccatggaacggctccagaaggctgacgttagataccgttttgtgattgatgttgccaacaccttgaagcctagtccttaa

SEQ ID NO: 42821 - protein, 357 aa, Brassica napus
MGEVLKKEAYGLAVKDESGVISPFRFSRRETGENDVRLKVLFCGICHTDLSMAINEWGFTSYPLVPGHEIVGVVTEVGAKVTKFNAGDKVGVGYMVSSCGSCETCIDDQENYCPKMILTSGGKYYDDTITYGGYSDHMVCEEDYIIRIPENLPLDATAPLLCAGTTVYSPMKYHGLDKPGMHIGVVGLGGLGHVAVKFAKAMGIKVTVISTSDRKRDEALTRLGADLFLVSRDPEQMKDAMGTMDGIIDTVSATHPVLPILDLLKYKGKLIMVGAPDKPLELPVLPLIFGKKMVVGSMVGGIKETQEMMDLAGKHNITADIELISADYVNTAMERLQKADVRYRFVIDVANTLKPSP

SEQ ID NO: 42822 - DNA, 1140 bp, Brassica napus; identical to SEQ ID NO: 14646
  CDS (1)..(1140)

SEQ ID NO: 42823 - protein, 379 aa, Brassica napus; identical to SEQ ID NO: 14647

SEQ ID NO: 42824 - DNA, 1083 bp, Brassica napus
  CDS (1)..(1083)
atggcgaaatctccagagacagagcatccgaacaaagcctttggttgggctgccaaagacaaatctggtgtactcactcctttccatttctccagaagagacaatggtgacaatgatgtgacagtgaagatcttgtattgtggagtgtgccacactgatttacataccatcaaaaacgactggggcttctcgtattatcctgtagttccagggcatgaaatagttggaatagctacaaaagttggcaaaaacgtgactaaattcagagaaggagaccgtgtaggagtaggagtgatcactggttcttgccaatcttgcgaatcttgtaaccaagatcttgaaaactactgtccccaaatgtctttcacctacaactccataggatccgatggaaccaagacctacggtggatattcggagtccattgtggtcgatcaacgttttgtcttgcagtttcccgagggattacctagcgattcgggtgcccccttgctgtgtgctggaatcactgtgtatagtccaatgaagtattatggtatgaccgagcctgggaagcatttgggtgtggctggacttggtgggcttggtcatgttgctgtcaagattggtaaagcctttggtttgaaagtcactgtgattagttcttctcctagtaaagaagacgaagctattaatcgacttggtgctgattcgtttcttgtctcatctgatcctcagaagatgaaggctgcaattggaactatggactatattatcgatacggtatcagcagtacatgctctgtttccattgcttggtttactcaaagtcaatggaaagcttgtcacgttaggcttacctgagaagcctcttgagctaccaatcttccctcttgttctcggaagaaaaatggtgggaggaagtgacattggagggatgaaggagacacaagagatgcttgaattctgcgctaagcataacataacggcagatattgaactgatcaagatggatgagattaacactgcgatggagaggcttgctaagtctgatgttaggtacaggttcgtgatcgacgtcgctaactccttgagccctccatga

SEQ ID NO: 42825 - protein, 360 aa, Brassica napus
MAKSPETEHPNKAFGWAAKDKSGVLTPFHFSRRDNGDNDVTVKILYCGVCHTDLHTIKNDWGFSYYPVVPGHEIVGIATKVGKNVTKFREGDRVGVGVITGSCQSCESCNQDLENYCPQMSFTYNSIGSDGTKTYGGYSESIVVDQRFVLQFPEGLPSDSGAPLLCAGITVYSPMKYYGMTEPGKHLGVAGLGGLGHVAVKIGKAFGLKVTVISSSPSKEDEAINRLGADSFLVSSDPQKMKAAIGTMDYIIDTVSAVHALFPLLGLLKVNGKLVTLGLPEKPLELPIFPLVLGRKMVGGSDIGGMKETQEMLEFCAKHNITADIELIKMDEINTAMERLAKSDVRYRFVIDVANSLSPP

SEQ ID NO: 42826 - DNA, 1074 bp, Brassica napus
  CDS (1)..(1074)
atgggaaaggtgcctgcgacggaggcgttcggattggccgcgaaagacgaatccggagttctctcgcctttccgtttctcaagaagggagacgggagagaaggatgtgaggttaaaagtgttgttctgtggaatttgccacactgatgtatgtatggccagaaacgagtggggatttactacttaccctctcgtccccgggcatgagattgttggcgtggtgactgaagtcggagctaaagtgattaaattcaaagccggagacaaagtcggagttggttatatgctcagctcgtgccggtcatgtgacatctgcaccgatgaccaagagaaccactgtccaaaaatgattatgacgtccggaggaaagtactacgatgacaccatgacttatggtggttactctgaccacctggtttgtgaagaggattacatcatccgtattcctgaaaatctcccgttagacgctgccgcgccgctactctgcgctggggtcacggtttattcaccgttgaagtctcacggactcgacaagcccggaatccacattggtgtggtgggactaggcggtttaggtcatgtagctgtgaaatttgctaaggctatgggtattaaggttacagttattagtacttcggataggaagagagacgaggcgttaactcggcttggtgcggatctgttcttggtgagccgtgacccggaacagatgaaggatgcaatgggtactatggatggtattattgataccgtatctgctactcatccagttcttccgattcttaatttgcttaaatataagggtaaacttattatggttggtgcacctgataaaccgcttgagcttccggttctgcctctcatctttgggaaaaagatggtggtgggaagtatggtaggagggataaaagagactcaagagatgatggatttggccggaaaacacaacatcacggcagatattgagcttatctctgcggattatgtcaacactgccatgaaacggctcgagaaggctgacgttagataccgttttgtgattgatgttgccaacaccttgaagcctagtccttaa

SEQ ID NO: 42827 - protein, 357 aa, Brassica napus
MGKVPATEAFGLAAKDESGVLSPFRFSRRETGEKDVRLKVLFCGICHTDVCMARNEWGFTTYPLVPGHEIVGVVTEVGAKVIKFKAGDKVGVGYMLSSCRSCDICTDDQENHCPKMIMTSGGKYYDDTMTYGGYSDHLVCEEDYIIRIPENLPLDAAAPLLCAGVTVYSPLKSHGLDKPGIHIGVVGLGGLGHVAVKFAKAMGIKVTVISTSDRKRDEALTRLGADLFLVSRDPEQMKDAMGTMDGIIDTVSATHPVLPILNLLKYKGKLIMVGAPDKPLELPVLPLIFGKKMVVGSMVGGIKETQEMMDLAGKHNITADIELISADYVNTAMKRLEKADVRYRFVIDVANTLKPSP

SEQ ID NO: 42828 - DNA, 1140 bp, Brassica napus; identical to SEQ ID NO: 14648
  CDS (1)..(1140)

SEQ ID NO: 42829 - protein, 379 aa, Brassica napus; identical to SEQ ID NO: 14649

SEQ ID NO: 42830 - DNA, 1140 bp, Brassica napus; identical to SEQ ID NO: 14650
  CDS (1)..(1140)

SEQ ID NO: 42831 - protein, 379 aa, Brassica napus; identical to SEQ ID NO: 14651

SEQ ID NO: 42832 - DNA, 1140 bp, Brassica napus; identical to SEQ ID NO: 14652
  CDS (1)..(1140)

SEQ ID NO: 42833 - protein, 379 aa, Brassica napus; identical to SEQ ID NO: 14653

SEQ ID NO: 42834 - DNA, 1086 bp, Zea mays
  CDS (1)..(1086)
atggaggtgacaccaaaccacaccctgaccgtgaccgggtgggcggccatgaacgagtccgccggcaaggtggagcccttcgtcttcaagagaagggagaacggccctgacgacgtgacgatcaaggtgcagtactgcggcatgtgccacacggacctgcacttcatcaacaacgactggggcatcaccacgtacccgctggtcccggggcacgagatcacgggcgtggtcaccaaggccgggcgcaacgtcacgggcttccgcgtcggcgaccgcgtcggcgtgggctgcatcgccgcctcctgcctggactgcgaccactgccgccgctccgaggagaactactgcgaccgtgtggcgctcacctacaacggcgtcttctgggacggcagcgtcacgtacggcggctactcgcgcgcgctggtggcggacaagcgcttcgtggtgcgcgtccccgacgcgctgccgctggacgccgccgcgccgctgctgtgcgcgggcgtcacggtgtacagccccatgaagcaccacggcatgctggggcaccccggcgccagcctcggcgtcgtcgggctcggcggcctcggccacgtcgccgtcaagctcgccaaggcgttcggcctccgcgtcaccgtcgtcagcacgtcgccggccaaggaggccgaggccagggcccggctcggcgccgaccgcttcgtcgtcagcaccgacgacgcgcagatgcgggacgcggccaggtccctcgactacgtcatcgacaccgtctccgccaagcactcgctcggacccatcctggacctgctcaaggtcagcggcaagctcgtgctcgtcgccgcgccggaccagcccgtcgagctcccctccttcccgctcatcttcgggaagaggaccgtcagcgggagcatgacgggagggatcagggagacgcaggagatgctcgacctctgcgcccgccacaacatcacctgcgacatcgagctcgtctccacggacgggatcaacgccgcgctcgcgcgcctcgcgcgcaacgacgtccgataccgcttcgtcatcgacatcgccggcgactccacctcaaaactatag

SEQ ID NO: 42835 - protein, 361 aa, Zea mays
MEVTPNHTLTVTGWAAMNESAGKVEPFVFKRRENGPDDVTIKVQYCGMCHTDLHFINNDWGITTYPLVPGHEITGVVTKAGRNVTGFRVGDRVGVGCIAASCLDCDHCRRSEENYCDRVALTYNGVFWDGSVTYGGYSRALVADKRFVVRVPDALPLDAAAPLLCAGVTVYSPMKHHGMLGHPGASLGVVGLGGLGHVAVKLAKAFGLRVTVVSTSPAKEAEARARLGADRFVVSTDDAQMRDAARSLDYVIDTVSAKHSLGPILDLLKVSGKLVLVAAPDQPVELPSFPLIFGKRTVSGSMTGGIRETQEMLDLCARHNITCDIELVSTDGINAALARLARNDVRYRFVIDIAGDSTSKL

SEQ ID NO: 42836 - DNA, 1083 bp, Glycine max
  CDS (1)..(1083)
atggctaaatctccagaaactgaacttcccgtcgaagctttcggttgggctgcttcagacacttctggcacccttgcaccttttcatttctccagaagagaaaatggcgttgatgacgtcactctcaagattctcttctgcggggtttgccactcggatctccacactctcaaaaacgactggggtttcaccacttaccctgtcgttcctgggcatgaaattgttggtgttgtgacaaaagttggcaacaatgtgaaaaacttcaaagtgggtgataaagttggagttggtgtgatagtggagtcttgcaaggaatgtgaaagttgccaacaagatctggagagttactgtccccgccctgtttttacctataactctccttattatgatgggacacgaaccaaaggtggttattctaacatcatggttgtgcaccagcgttatgtgctccgatttcctgagaacttgcctcttgatgctggtgctcctctgctgtgtgctgggataactgtgtatagcccgatgaaatattatgggatgacagagccaggcaaacatttgggagtggcagggcttggtgggttaggtcatgttgcaatcaaacttgctaaggcgtttgggctgaaagttactgtcatcagtagctctcctaacaagcaagctgaggccattgaccgactcggggctgattctttccttgtttcatcagaccctgcaaaaatgaaggtggctttgggaaccatggactatatcatagacacaatttctgctgttcattccctgattccactgcttggtctgctgaagctgaatgggaagctagttactgtagggttgcctaacaagccccttgagcttcctatctttccattagttgcaggacggaaacttataggggggagcaactttggagggatcaaagaaactcaggaaatgcttgatttctgcgcaaagcacaacataactgcagatattgagctgattaagatggatcagatcaacacagccatggaaaggcttagcaaagctgatgtgaaatatcgctttgtgattgatgtggcgaactctttcgcaagtttgtag

SEQ ID NO: 42837 - protein, 360 aa, Glycine max
MAKSPETELPVEAFGWAASDTSGTLAPFHFSRRENGVDDVTLKILFCGVCHSDLHTLKNDWGFTTYPVVPGHEIVGVVTKVGNNVKNFKVGDKVGVGVIVESCKECESCQQDLESYCPRPVFTYNSPYYDGTRTKGGYSNIMVVHQRYVLRFPENLPLDAGAPLLCAGITVYSPMKYYGMTEPGKHLGVAGLGGLGHVAIKLAKAFGLKVTVISSSPNKQAEAIDRLGADSFLVSSDPAKMKVALGTMDYIIDTISAVHSLIPLLGLLKLNGKLVTVGLPNKPLELPIFPLVAGRKLIGGSNFGGIKETQEMLDFCAKHNITADIELIKMDQINTAMERLSKADVKYRFVIDVANSFASL

SEQ ID NO: 42838 - DNA, 1080 bp, Glycine max
  CDS (1)..(1080)
atggcagcacaagctgaaattgagcatcctaggaaagcattcggatgggcagctagggattcttccggtcttctctcccctttcaatttctgcagaagggaacccggtgagaaagatgtggcattcagagtgttgtactgtgggatatgccactcggacctccacagcataaagaacgaatggggtacttccatctatccaatggttcctgggcatgaggtagctggtgtagtaacagaggtgggaagcaaagtagagaagttcaaagttggggacaaggttggtgtgggatgcctggttgattcctgccgcacctgccaaaactgttgtgacaatcttgagaattattgtcctcaatctacgttcacatatggtgccaaatatagagatggaaccatcacatatggaggctactctgactcaatggttgctgatgagcattttgtggttcgcattccagatagattaccacttgatgctgctgcacctcttctttgtgctggcatcactgtgtatagccctctcagatattatggacttgacaagcctggtctgcatgtgggtgtggttggtcttggtggactaggccatatggctgtcaagtttgccaaagcttttggtgctaaggtcacagtaataagtacttcaccaaacaaaaaggaagaagcaatacaaaatcttggagctgattcctttctaataagccgggaccaagatcagatgcaggctgcaatgggtactttggatggtattattgacacagtttctgccgttcatcctctcttacctctcattggtttgctcaagtctcatggaaagcttgtaatggttggtgcaccggagaagcctctggaactgcctgtttttcctttacttgcggggagaaagatagttgctggcactctgattggagggctaatggagacgcaagaaatgattgattttgcagcgaaacacaatgtgaaacctgacattgaagtcattcctatggactatgtcaacacagcaatggagcgcctccttaaagcagatgttaaatatcgatttgttattgatattggaaacacactgaaattctga

SEQ ID NO: 42839 - protein, 359 aa, Glycine max
MAAQAEIEHPRKAFGWAARDSSGLLSPFNFCRREPGEKDVAFRVLYCGICHSDLHSIKNEWGTSIYPMVPGHEVAGVVTEVGSKVEKFKVGDKVGVGCLVDSCRTCQNCCDNLENYCPQSTFTYGAKYRDGTITYGGYSDSMVADEHFVVRIPDRLPLDAAAPLLCAGITVYSPLRYYGLDKPGLHVGVVGLGGLGHMAVKFAKAFGAKVTVISTSPNKKEEAIQNLGADSFLISRDQDQMQAAMGTLDGIIDTVSAVHPLLPLIGLLKSHGKLVMVGAPEKPLELPVFPLLAGRKIVAGTLIGGLMETQEMIDFAAKHNVKPDIEVIPMDYVNTAMERLLKADVKYRFVIDIGNTLKF

SEQ ID NO: 42840 - DNA, 1086 bp, Glycine max
  CDS (1)..(1086)
atggcagtgcaacctgaaattgagcatcccaggaaggcctatggatgggcagctagggatacatctggtgttctctcccctttttggttctctagaaggaaaacaggggagaaagacgtgacatttaaagtgttgtattgtggagtatgccactcggaccttcacaagttgaaaaatgaatggagtgattccatctatccccttgtccctggccgtgagattgttggagaagtgacagaggtgggaagcaaagtagacaagttcaaggttggagacaaagtagctgcgggatgcttggttgggtcctgccactcatgccaaaactgtgtcaacaatcttgagaattattgccaacaagtgattcccacatatggtgcaaagtatgtggatggcaccatcacatatgggggattctcagacttcatggtagcagatgagcactttgttgtcaacattccaagtgccctacctcttgatgctgcagctcctctcctttgtgcagggatcacagtgtatggtcctttgagatattttgggcttgacaaacctggcatgcatctgggtgtggttggtcttggtggactaggccatctggctgtcaaatttgcaaaagcccttggcttgaaggtcactgtcatcagtacctctcctaaaaagaaaaatgaagccatacaacatcttggagctgatttttttgtggtcagtagagaccaagatcaaatgcaggctgcaatgtgcaccttggatggtataattgatactgtttctgcagtccaccctctcatgcccttgattgatctattgaagtctcatgggaaactagtagctgttggggcaccggagaaacctctggaattgcttctcccacctttaattttggggagaaaaagtatagcgggtagttacattggaggaatcaaggagacacaagaaatgattaatttcgctgctgaacacaatgttagaccggaaattgaagtaattcctatggattatgtgaacacagcaatggagcgtctccagaaagccgacgttaaatatcgatttgtgattgacattggaaacacattgaaaccacactattag

SEQ ID NO: 42841 - protein, 361 aa, Glycine max
MAVQPEIEHPRKAYGWAARDTSGVLSPFWFSRRKTGEKDVTFKVLYCGVCHSDLHKLKNEWSDSIYPLVPGREIVGEVTEVGSKVDKFKVGDKVAAGCLVGSCHSCQNCVNNLENYCQQVIPTYGAKYVDGTITYGGFSDFMVADEHFVVNIPSALPLDAAAPLLCAGITVYGPLRYFGLDKPGMHLGVVGLGGLGHLAVKFAKALGLKVTVISTSPKKKNEAIQHLGADFFVVSRDQDQMQAAMCTLDGIIDTVSAVHPLMPLIDLLKSHGKLVAVGAPEKPLELLLPPLILGRKSIAGSYIGGIKETQEMINFAAEHNVRPEIEVIPMDYVNTAMERLQKADVKYRFVIDIGNTLKPHY

SEQ ID NO: 42842 - DNA, 1071 bp, Glycine max
  CDS (1)..(1071)
atggcaaatgaactacccgtcaaagcttttggttgggctgcttcagacacttctggcacccttgccccttttcatttctccagaagggaaaatggcgtcgatgacgtcactctcaagattctcttctgcggggtttgccactctgatctccacactctcaaaaacgactggggtttcaccacctaccctgtcgttcctgggcatgaaattgttggtgttgtgacagaagttggaaacaatgtgaaaaacttcaaagtgggtgataaagttggagttggtgtgatagtggagtcttgcaaggaatgtgaaaattgccaacaggatctggagaattactgtccccgccctgtgtttacctataactctccttattatgatgggacacgaacccaaggtggttattctaacattgtggtcgtgcaccagcgttatgtgctccggtttcctgagaacttgccccttgatgctggtgctcctctgctgtgtgctgggataactgtgtatagcccaatgaaatattatgggatgacagagccaggcaaacatttgggagtggcagggcttggtgggttaggccatgttgcaatcaaacttgctaaggcttttgggctcaaagttactgtcattagtagttctccaaacaagcaagctgaggccattgaccgactcggggctgattttttccttgtttcatcagaccctgcaaaaatgaaggctgctttgggaaccatggactatatcatagacacaatttctgctgttcattccttgattccactgcttggtctgctgaagctgaatgggaagctagttactgtagggttgcctaacaaaccccttgagcttcctatctttcctttagttgcaggacgaaagcttataggggggagcaactttggagggctgaaagaaactcaggaaatgcttgatttctgcggaaagcacaacataactgcagatattgagctgattaagatggatcagatcaacacagccatggaaaggcttagcagagctgatgtgaaatatcgctttgtgattgatgtggcgagctctttctcaagtttttag

SEQ ID NO: 42843 - protein, 356 aa, Glycine max
MANELPVKAFGWAASDTSGTLAPFHFSRRENGVDDVTLKILFCGVCHSDLHTLKNDWGFTTYPVVPGHEIVGVVTEVGNNVKNFKVGDKVGVGVIVESCKECENCQQDLENYCPRPVFTYNSPYYDGTRTQGGYSNIVVVHQRYVLRFPENLPLDAGAPLLCAGITVYSPMKYYGMTEPGKHLGVAGLGGLGHVAIKLAKAFGLKVTVISSSPNKQAEAIDRLGADFFLVSSDPAKMKAALGTMDYIIDTISAVHSLIPLLGLLKLNGKLVTVGLPNKPLELPIFPLVAGRKLIGGSNFGGLKETQEMLDFCGKHNITADIELIKMDQINTAMERLSRADVKYRFVIDVASSFSSF

SEQ ID NO: 42844 - DNA, 1074 bp, Glycine max
  CDS (1)..(1074)
atgggtagccttgaagcggaaagaacaacagtaggattggcagcaagagacccttcagggattctctccccatacacctacaatctaagaaacacaggccctgatgatgtttacataaaagttcactactgtggaatttgccattctgatctccaccagattaaaaatgatcttggcatgtccaactatcccatggtcccaggacatgaagtggttggtgaggtactggaggtggggtcagacgttagcaggttcagagtgggagagttggtgggagttggactcctcgtaggttgctgcaaaaactgccagccatgccaacaagacattgagaattactgcagcaagaagatctggtcttacaatgatgtttatgtcgatggaaaacccacgcagggtggctttgctgaaaccatggtcgttgagcaaaagtttgtggtgaaaattccagagggtttggcgccagagcaagtggcaccattactgtgtgcgggtgtgacagtgtacagtccactggtacactttgggctgaaagagagtgggctgagaggtggaatattggggcttggaggagtgggacacatgggggtgaagatagcaaaggcactgggtcaccatgtgactgtgataagctcttctgacaagaagaaacaggaggcacttgagcaccttggagctgatcaatatcttgttagctctgatgtcactgccatgcaggaagctgctgattcacttgactacatcattgacactgtgcctgttggtcaccctcttgagccttatctctctttgctcaaacttgatggcaagttgatcttgatgggtgtcatcaacacccctcttcaatttgttagccccatggtcatgctagggaggaggtcaatcacgggaagctttattgggagcatgaaggagacagaggagatgttggagttctggaaagagaagggtctgagttcgatgattgaagtggtaaacatggattacattaacaaagcctttgaaaggttggagaagaacgatgtgagatacaggtttgtagtggatgtcaaaggcagcaaacttgttgattag

SEQ ID NO: 42845 - protein, 357 aa, Glycine max
MGSLEAERTTVGLAARDPSGILSPYTYNLRNTGPDDVYIKVHYCGICHSDLHQIKNDLGMSNYPMVPGHEVVGEVLEVGSDVSRFRVGELVGVGLLVGCCKNCQPCQQDIENYCSKKIWSYNDVYVDGKPTQGGFAETMVVEQKFVVKIPEGLAPEQVAPLLCAGVTVYSPLVHFGLKESGLRGGILGLGGVGHMGVKIAKALGHHVTVISSSDKKKQEALEHLGADQYLVSSDVTAMQEAADSLDYIIDTVPVGHPLEPYLSLLKLDGKLILMGVINTPLQFVSPMVMLGRRSITGSFIGSMKETEEMLEFWKEKGLSSMIEVVNMDYINKAFERLEKNDVRYRFVVDVKGSKLVD

SEQ ID NO: 42846 - DNA, 1074 bp, Glycine max
  CDS (1)..(1074)
atgggtagtcttgaagcggaaagaacaacagtaggattggcagcaagagacccttcagggattctctccccatacacctacaatctaagaaacacaggccctgatgatgtttacattaaagttcactactgtggagtttgccattctgatctccaccagattaaaaatgatcttggcatgtccaactatcccatggtcccaggacatgaagtggttggtgaggtactggaggtgggatcaaacgttagcaggttcagagtgggagagttggtgggagttggactcctcgtaggttgctgcaaaaactgccagccatgccaacaagacattgagaattactgcagcaagaagatctggtcttacaatgatgtttatgtcgatggaaaacccacacagggtggctttgctgaaaccatgatcgttgagcaaaagtttgtggtgaagattccagagggtttggcgccagagcaagtggcaccattactgtgtgcgggtgtgacagtgtacagtccactggtacactttgggctgaaagagagtgggctaagaggtggaatattggggcttggaggagtgggacacatgggggtgaagatagcaaaggcactgggtcatcatgtgactgtgataagctcttctgacaagaagaaacaagaggcacttgaacaccttggagctgatcaatatctcgttagctctgatgtcactgccatgcaggaagctgctgattcacttgactacatcattgacactgtgcctgttggtcaccctcttgagccttatctctctttgctcaaacttgatggcaagttgatcttgatgggtgtcatcaacacccctcttcaatttgttagccccatggtcatgctagggaggaggtcaatcacgggaagctttattgggagcatgaaggagagagaggagatgttggagttctggaaagagaagggtctgagttcgatgattgaagtggtaaacatggattacattaacaaagcctttgaaaggttggagaagaacgatgtgagatacaggtttgtagtggatgtcaaaggcagcaaacttgttgattag

SEQ ID NO: 42847 - protein, 357 aa, Glycine max
MGSLEAERTTVGLAARDPSGILSPYTYNLRNTGPDDVYIKVHYCGVCHSDLHQIKNDLGMSNYPMVPGHEVVGEVLEVGSNVSRFRVGELVGVGLLVGCCKNCQPCQQDIENYCSKKIWSYNDVYVDGKPTQGGFAETMIVEQKFVVKIPEGLAPEQVAPLLCAGVTVYSPLVHFGLKESGLRGGILGLGGVGHMGVKIAKALGHHVTVISSSDKKKQEALEHLGADQYLVSSDVTAMQEAADSLDYIIDTVPVGHPLEPYLSLLKLDGKLILMGVINTPLQFVSPMVMLGRRSITGSFIGSMKEREEMLEFWKEKGLSSMIEVVNMDYINKAFERLEKNDVRYRFVVDVKGSKLVD

SEQ ID NO: 42848 - DNA, 1143 bp, Glycine max; identical to SEQ ID NO: 14654
  CDS (1)..(1143)

SEQ ID NO: 42849 - protein, 380 aa, Glycine max; identical to SEQ ID NO: 14655

SEQ ID NO: 42850 - DNA, 1128 bp, Glycine max; identical to SEQ ID NO: 14656
  CDS (1)..(1128)

SEQ ID NO: 42851 - protein, 375 aa, Glycine max; identical to SEQ ID NO: 14657

SEQ ID NO: 42852 - DNA, 1167 bp, Glycine max; identical to SEQ ID NO: 14662
  CDS (1)..(1167)

SEQ ID NO: 42853 - protein, 388 aa, Glycine max; identical to SEQ ID NO: 14663

SEQ ID NO: 42854 - DNA, 1161 bp, Glycine max; identical to SEQ ID NO: 14664
  CDS (1)..(1161)

SEQ ID NO: 42855 - protein, 386 aa, Glycine max; identical to SEQ ID NO: 14665

SEQ ID NO: 42856 - DNA, 1140 bp, Glycine max; identical to SEQ ID NO: 14666
  CDS (1)..(1140)

SEQ ID NO: 42857 - protein, 379 aa, Glycine max; identical to SEQ ID NO: 14667

SEQ ID NO: 42858 - DNA, 1143 bp, Glycine max; identical to SEQ ID NO: 14668
  CDS (1)..(1143)

SEQ ID NO: 42859 - protein, 380 aa, Glycine max; identical to SEQ ID NO: 14669

SEQ ID NO: 42860 - DNA, 1083 bp, Glycine max
  CDS (1)..(1083)
atggctaaatctccagaaactgaacttcccgtcgaagctttcggttgggctgcttcagacacttctggcacccttgcaccttttcatttctccagaagagaaaatggcgttgatgacgtcactctcaagattctcttctgcggggtttgccactcggatctccacactctcaaaaacgactggggtttcaccacttaccctgtcgttcctgggcatgaaattgttggtgttgtgacaaaagttggcaacaatgtgaaaaacttcaaagtgggtgataaagttggagttggtgtgatagtggagtcttgcaaggaatgtgaaagttgccaacaagatctggagagttactgtccccgccctgtttttacctataactctccttattatgatgggacacgaaccaaacgtggttattctaacatcatggttgtgcaccagcgttatgtgctccgatttcctgagaacttgcctcttgatgctggtgctcctctgctgtgtgctgggataactgtgtatagcccgatgaaatattatgggatgacagagccaggcaaacatttgggagtggcagggcttggtgggttaggtcatgttgcaatcaaacttgctaaggcgtttgggctgaaagttactgtcatcagtagctctcctaacaagcaagctgaggccattgaccgactcggggctgattctttccttgtttcatcagaccctgcaaaaatgaaggtggctttgggaaccatggactatatcatagacacaatttctgctgttcattccctgattccactgcttggtctgctgaagctgaatgggaagctagttactgtagggttgcctaacaagccccttgagcttcctatctttccattagttgcaggacggaaacttataggggggagcaactttggagggatcaaagaaactcaggaaatgcttgatttctgcgcaaagcacaacataactgcagatattgagctgattaagatggatcagatcaacacagccatggaaaggcttagcaaagctgatgtgaaatatcgctttgtgattgatgtggcgaactctttcgcaagtttgtag

SEQ ID NO: 42861 - protein, 360 aa, Glycine max
MAKSPETELPVEAFGWAASDTSGTLAPFHFSRRENGVDDVTLKILFCGVCHSDLHTLKNDWGFTTYPVVPGHEIVGVVTKVGNNVKNFKVGDKVGVGVIVESCKECESCQQDLESYCPRPVFTYNSPYYDGTRTKRGYSNIMVVHQRYVLRFPENLPLDAGAPLLCAGITVYSPMKYYGMTEPGKHLGVAGLGGLGHVAIKLAKAFGLKVTVISSSPNKQAEAIDRLGADSFLVSSDPAKMKVALGTMDYIIDTISAVHSLIPLLGLLKLNGKLVTVGLPNKPLELPIFPLVAGRKLIGGSNFGGIKETQEMLDFCAKHNITADIELIKMDQINTAMERLSKADVKYRFVIDVANSFASL

SEQ ID NO: 42862 - DNA, 1095 bp, Glycine max
  CDS (1)..(1095)
atgggtaaggggggaatgtcaattgatgaacatggagaaggcaaagaagagaatatggctgcttggcttgttggaatgaacactctcaagattcagcctttcaagcttcctactttgggaccccatgatgtcagagttagaatgaaggctgttggtatctgtgggagtgatgttcactacctcaagacactgaggtgtgctcactttatagttaaagaaccaatggttattggtcatgagtgtgctgggatcatagaagaagttggtagtcaggtaaagagtttggtgcctggtgaccgtgtggcaattgagcctgggatcagttgttggcattgcaaccattgcaaacacggtcgatataacttatgcgatgatatgaagttttttgctactccaccagttcatggttccctggctaatcagatagtgcatcctgcagacctatgttttaagctgccagacaacgtgagcctagaggagggagcaatgtgtgaacccttaagtgttggtgttcatgcttgtaggagagctaatattggaccagaaacatatgtgttaatcatgggagcaggacctataggacttgttacaatgcttgcagctcgtgcttttggggcacccaggactgtcattgtggatgtagatgactatcgtttatctgttgcaaaatcacttggtgccgatgacattgttaaagtctcaacaaacattcaggatgtggctgaagaagttgtgcagatacagaaggttatgggagctgatatagatgttacctttgattgtgctggttttgacaaaaccatgtctacagcactgagtgctactcagccaggtggcaaagtttgtctagtgggaatgggacattctgaaatgactgtcccactcaccccagctgcagcaagggaagttgatgtgcttggagtttttcgctatatgaacacatggcctctttgccttgagtttctaaggagtggaaaaatcgatgtaaaaccccttataactcataggtttgggttttctcaaaaggaagtggaagaagcctttgaaacaagtgctcgtggtggtaacgccatcaaggttatgttcaatctttag

SEQ ID NO: 42863 - protein, 364 aa, Glycine max
MGKGGMSIDEHGEGKEENMAAWLVGMNTLKIQPFKLPTLGPHDVRVRMKAVGICGSDVHYLKTLRCAHFIVKEPMVIGHECAGIIEEVGSQVKSLVPGDRVAIEPGISCWHCNHCKHGRYNLCDDMKFFATPPVHGSLANQIVHPADLCFKLPDNVSLEEGAMCEPLSVGVHACRRANIGPETYVLIMGAGPIGLVTMLAARAFGAPRTVIVDVDDYRLSVAKSLGADDIVKVSTNIQDVAEEVVQIQKVMGADIDVTFDCAGFDKTMSTALSATQPGGKVCLVGMGHSEMTVPLTPAAAREVDVLGVFRYMNTWPLCLEFLRSGKIDVKPLITHRFGFSQKEVEEAFETSARGGNAIKVMFNL

SEQ ID NO: 42864 - DNA, 1071 bp, Glycine max
  CDS (1)..(1071)
atggcaaatgaactacccgtcaaagcttttggttgggctgcttcagacacttctggcacccttgccccttttcatttctccagaagggaaaatggcgtcgatgacgtcactctcaagattctcttctgcggggtttgccactctgatctccacactctcaaaaacgactggggtttcaccacctaccctgtcgttcctgggcatgaaattgttggtgttgtgacagaagttggaaacaatgtgaaaaacttcaaagtgggtgataaagttggagttggtgtgatagtggagtcttgcaaggaatgtgaaaattgccaacaggatctggagaattactgtccccgccctgtgtttacctataactctccttattatgatgggacacgaacccaaggtggttattctaacattgtggtcgtgcaccagcgttatgtgctccggtttcctgagaacttgccccttgatgctggtgctcctctgctgtgtgctgggataactgtgtatagcccaatgaaatattatgggatgacagagccaggcaaacatttgggagcggcagggcttggtgggttaggccatgttgcaatcaaacttgctaaggcttttgggctcaaagttactgtcatcagtagctctcctaacaagcaagctgaggccattgaccgactcggggctgattctttccttgtttcatcagaccctgcaaaaatgaaggtggctttgggaaccatggactatatcatagacacaatttctgctgttcattccctgattccactgcttggtctgctgaagctgaatgggaagctagttactgtagggttgcctaacaagccccttgagcttcctatctttccattagttgcaggacggaaacttataggggggagcaactttggagggatcaaagaaactcaggaaatgcttgatttctgcgcaaagcacaacataactgcagatattgagctgattaagatggatcagatcaacacagccatggaaaggcttagcaaagctgatgtgaaatatcgctttgtgattgatgtggcgaactctttcgcaagtttgtag

SEQ ID NO: 42865 - protein, 356 aa, Glycine max
MANELPVKAFGWAASDTSGTLAPFHFSRRENGVDDVTLKILFCGVCHSDLHTLKNDWGFTTYPVVPGHEIVGVVTEVGNNVKNFKVGDKVGVGVIVESCKECENCQQDLENYCPRPVFTYNSPYYDGTRTQGGYSNIVVVHQRYVLRFPENLPLDAGAPLLCAGITVYSPMKYYGMTEPGKHLGAAGLGGLGHVAIKLAKAFGLKVTVISSSPNKQAEAIDRLGADSFLVSSDPAKMKVALGTMDYIIDTISAVHSLIPLLGLLKLNGKLVTVGLPNKPLELPIFPLVAGRKLIGGSNFGGIKETQEMLDFCAKHNITADIELIKMDQINTAMERLSKADVKYRFVIDVANSFASL

SEQ ID NO: 42866 - DNA, 1089 bp, Glycine max
  CDS (1)..(1089)
atggcgtcgtcacaaccagagatggagcatccaaagaaggtttttggttgggctgctcgggactcatctgggcttctctccccattcaacttctccagaagagaaacgggggagaaagatttggtattcaaagtgcaatactgtggaatatgccactcagatctacatatgttaaagaacgagtggggcaacacaacctatcctctggttcctgggcacgagattgctggtgtggtaacagaagttggaagcaaggtgcaaaagttcaaagttggagaccgggtaggtgtggggtgcatgattggatcctgtcgttcatgtgaaagctgtgatgaaaatcttgagaattactgccccaaaatgattctcacatacggtgtcaagtattttgatggcaccataacacatggaggctactctgacttgatggttgcggatgaacactttgtggttagaattccggataacctaccacttgatgctgctgctcctctcctctgtgctgggatcactgtgtatagccctttgagatactatggacttgacaagcctggtctgaatcttggtgtggttggtcttggtggacttggtcacatggctgtcaagtttgccaaagctcttggagctaatgtcacagtgattagcacatctcctaacaaaaagaaggaagccattgagaacataggagctgactcatttgtggttagccgtgaacaagatcagatgcaggctgtaatgggaaccatggatggtatcattgacacagtttctgctgtccatcctcttgtgcctttgattggcctgttgaagcctcatggtaaactagtcatggttggtgcaccagagaagcctttggagttgccagtattttctttacttatggggaggaaaatggttggtggcagtagcatcggagggatgaaagagacgcaagaaatgattgattttgctgctaagcatggagtgaagcctgatattgaggttattcccatagattatgtgaacactgcaatagagcgcctcgccaaagcagatgtgaaatatcgatttgtaattgacattggaaacacgttgaagccaagctcttga

SEQ ID NO: 42867 - protein, 362 aa, Glycine max
MASSQPEMEHPKKVFGWAARDSSGLLSPFNFSRRETGEKDLVFKVQYCGICHSDLHMLKNEWGNTTYPLVPGHEIAGVVTEVGSKVQKFKVGDRVGVGCMIGSCRSCESCDENLENYCPKMILTYGVKYFDGTITHGGYSDLMVADEHFVVRIPDNLPLDAAAPLLCAGITVYSPLRYYGLDKPGLNLGVVGLGGLGHMAVKFAKALGANVTVISTSPNKKKEAIENIGADSFVVSREQDQMQAVMGTMDGIIDTVSAVHPLVPLIGLLKPHGKLVMVGAPEKPLELPVFSLLMGRKMVGGSSIGGMKETQEMIDFAAKHGVKPDIEVIPIDYVNTAIERLAKADVKYRFVIDIGNTLKPSS

SEQ ID NO: 42868 - DNA, 1284 bp, Glycine max
  CDS (1)..(1284)
atggcatcagcaatgtttcgtaggaacatcatcacccactactccaagtttgcttcttctttgtcttcgttgcctcgccattcctcaatctacaaccctctctctatgtctgtttcttcatttcatagcgaaagtgttggtggtggtggtgggttgccatcttccatgcgtggagctgtgtattgggaaccgaacaagccgctaaccatcgaggaatttcacatgcctcgccccaaggccggtgaagttctcatcaaaacaaaggcctgtggagtatgccactctgatctacatgttatgaaaggtgaaattccgtttaccagtccttgtgttgtggggcatgagattaccggtgaggttgttgaacatggagcactcactgacagcaaaaccatagaaaggcttccagttggatctcgagttgttggggccttcatcatgccttgtggcaactgctcctactgttcaaagggccatgatgatctatgtgaagctttctttgcctataaccgggcaaaaggaaccctctatgatggtgaaactcgactcttttttcgaaacagtggaaaaccagcatacatgtatagtatgggagggcttgctgaatactgtgttgtgccagcaaatggagtgtctgtgttaccagactcattgccatatacagagtctgcaattctaggatgtgctgtttttactgcttacggcgctatggctcatgcagctcaagtgcgtcctggtgattctgttgctgttattggaactggaggtgttggttctagttgtttacagatagctagagcctttggtgcctcagatataattgctgtggatgtacgggatgaaaagctacagaaagcaaagacatttggtgctactcacactgtaaattcagcaaaggaagatcccattgaaaagatacttgaaattactggtggaaagggtgttgatgttgctgtggaagccttggggaaaccacagacatttgctcaatgtacacaaagtgtgaaggatgggggaaaagctgtgatgattggactggcacaagctggttctttaggagaggtggatataaatcggcttgttcgcagaaagatacaagttattggctcctatgggggcagggcaaggcaagatcttccaaagttaattagactggcagaaacaggtatcttcaatcttggccatgctgtttcaagaacatacacttttgaggaggcgggaaaagcattccaagatctcaatgaaggaaaaattgtcggtcgagctgtgattgagataatatag

SEQ ID NO: 42869 - protein, 427 aa, Glycine max
MASAMFRRNIITHYSKFASSLSSLPRHSSIYNPLSMSVSSFHSESVGGGGGLPSSMRGAVYWEPNKPLTIEEFHMPRPKAGEVLIKTKACGVCHSDLHVMKGEIPFTSPCVVGHEITGEVVEHGALTDSKTIERLPVGSRVVGAFIMPCGNCSYCSKGHDDLCEAFFAYNRAKGTLYDGETRLFFRNSGKPAYMYSMGGLAEYCVVPANGVSVLPDSLPYTESAILGCAVFTAYGAMAHAAQVRPGDSVAVIGTGGVGSSCLQIARAFGASDIIAVDVRDEKLQKAKTFGATHTVNSAKEDPIEKILEITGGKGVDVAVEALGKPQTFAQCTQSVKDGGKAVMIGLAQAGSLGEVDINRLVRRKIQVIGSYGGRARQDLPKLIRLAETGIFNLGHAVSRTYTFEEAGKAFQDLNEGKIVGRAVIEII

SEQ ID NO: 42870 - DNA, 1095 bp, Glycine max
  CDS (1)..(1095)
atgggtaaggggggaatgtcaattgatgaacatggagaaggcaaagaagagaatatggctgcttggcttgttggaatgaacactctcaagattcagcctttcaagcttcctactttgggaccccatgatgtcagagttagaatgaaggctgttggtatctgtgggagtgatgttcactacctcaagacactgaggtgtgctcactttatagttaaagaaccaatggttattggtcatgagtgtgctgggatcatagaagaagttggtagtcaggtaaagagtttggtgcctggtgaccgtgtggcaattgagcctgggatcagttgttggcattgcaaccattgcaaacacggtcgatataacttatgcgatgatatgaagttttttgctactccaccagttcatggttccctggctaatcagatagtgcatcctgcagacctatgttttaagctgccagacaacgtgagcctagaggagggagcaatgtgtgaacccttaagtgttggtgttcatgcttgtagaagagctaatattggaccagaaacatatgtgttgatcatgggagcagggcccataggacttgttacaatgctggcagctcgtgcgtttggggcacccaaaacagtcattgtggatgttgatgaccatcgtttatctgttgcaaaatctcttggtgcagatgatattattaaagtctcaacaaacattaaggatgtggctgaagaagttgtgcagatacagaaggttatgggagctgatatagatgttacctttgattgtgctggttttgacaaaaccatgtctacagcactgagtgctactcagccaggtggcaaagtttgtctagtgggaatgggacattctgaaatgactgtcccactcaccccagctgcagcaagggaagttgatgtgcttggagtttttcgctatatgaacacatggcctctttgccttgagtttctaaggagtggaaaaatcgatgtaaaaccccttataactcataggtttgggttttctcaaaaggaagtggaagaagcctttgaaacaagtgctcgtggtggtaacgccatcaaggttatgttcaatctttag

SEQ ID NO: 42871 - protein, 364 aa, Glycine max
MGKGGMSIDEHGEGKEENMAAWLVGMNTLKIQPFKLPTLGPHDVRVRMKAVGICGSDVHYLKTLRCAHFIVKEPMVIGHECAGIIEEVGSQVKSLVPGDRVAIEPGISCWHCNHCKHGRYNLCDDMKFFATPPVHGSLANQIVHPADLCFKLPDNVSLEEGAMCEPLSVGVHACRRANIGPETYVLIMGAGPIGLVTMLAARAFGAPKTVIVDVDDHRLSVAKSLGADDIIKVSTNIKDVAEEVVQIQKVMGADIDVTFDCAGFDKTMSTALSATQPGGKVCLVGMGHSEMTVPLTPAAAREVDVLGVFRYMNTWPLCLEFLRSGKIDVKPLITHRFGFSQKEVEEAFETSARGGNAIKVMFNL

SEQ ID NO: 42872 - DNA, 1140 bp, Glycine max; identical to SEQ ID NO: 14670
  CDS (1)..(1140)

SEQ ID NO: 42873 - protein, 379 aa, Glycine max; identical to SEQ ID NO: 14671

SEQ ID NO: 42874 - DNA, 1071 bp, Glycine max
  CDS (1)..(1071)
atggcaaatgaactacccgtcaaagcttttggttgggctgcttcagacacttctggcacccttgccccttttcatttctccagaagggaaaatggcgtcgatgacgtcactctcaagattctcttctgcggggtttgccactctgatctccacactctcaaaaacgactggggtttcaccacctaccctgtcgttcctgggcatgaaattgttggtgttgtgacagaagttggaaacaatgtgaaaaacttcaaagtgggtgataaagttggagttggtgtgatagtggagtcttgcaaggaatgtgaaaattgccaacaggatctggagaattactgtccccgccctgtgtttacctataactctccttattatgatgggacacgaacccaaggtggttattctaacattgtggtcgtgcaccagcgttatgtgctccggtttcctgagaacttgccccttgatgctggtgctcctctgctgtgtgctgggataactgtgtatagcccaatgaaatattatgggatgacagagccaggcaaacatttgggagtggcagggcttggtgggttaggccatgttgcaatcaaacttgctaaggcttttgggctcaaagttactgtcatcagtagctctcctaacaagcaagctgaggccattgaccgactcggggctgattctttccttgtttcatcagaccctgcaaaaatgaaggtggctttgggaaccatggactatatcatagacacaatttctgctgttcattccctgattccactgcttggtctgctgaagctgaatgggaagctagttactgtagggttgcctaacaagccccttgagcttcctatctttccattagttgcaggacggaaacttataggggggagcaactttggagggatcaaagaaactcaggaaatgcttgatttctgcgcaaagcacaacataactgcagatattgagctgattaagatggatcagatcaacacagccatggaaaggcttagcaaagctgatgtgaaatatcgctttgtgattgatgtggcgaactctttcgcaagtttgtag

SEQ ID NO: 42875 - protein, 356 aa, Glycine max
MANELPVKAFGWAASDTSGTLAPFHFSRRENGVDDVTLKILFCGVCHSDLHTLKNDWGFTTYPVVPGHEIVGVVTEVGNNVKNFKVGDKVGVGVIVESCKECENCQQDLENYCPRPVFTYNSPYYDGTRTQGGYSNIVVVHQRYVLRFPENLPLDAGAPLLCAGITVYSPMKYYGMTEPGKHLGVAGLGGLGHVAIKLAKAFGLKVTVISSSPNKQAEAIDRLGADSFLVSSDPAKMKVALGTMDYIIDTISAVHSLIPLLGLLKLNGKLVTVGLPNKPLELPIFPLVAGRKLIGGSNFGGIKETQEMLDFCAKHNITADIELIKMDQINTAMERLSKADVKYRFVIDVANSFASL

SEQ ID NO: 42876 - DNA, 1140 bp, Glycine max; identical to SEQ ID NO: 14672
  CDS (1)..(1140)

SEQ ID NO: 42877 - protein, 379 aa, Glycine max; identical to SEQ ID NO: 14673

SEQ ID NO: 42878 - DNA, 1152 bp, Glycine max
  CDS (1)..(1152)
atgatgtgtctcaacacccacctagtatctctacagctgcgagagggtctgattaattctctagttatggctgagagcagagcgaatcacacagtgagcgtatttgggtgggcagctcatgattcgtcgggcaagattaccccctacagcttcaaaagacggcagaacggtgtgaacgatgtgacaataaagatcctctactgtgggatctgccacacggatctccactgtgctaaaaatgaatggggcatcactatgtaccctgtggtacccggacacgagatcattggggaggtaactaaggttgggaccaatgtgaaggggttcatggaaggagacagagtgggtgtgggctgtttggcggcttcatgtttggaatgtcaccactgcaagaccgatcaggaaaactactgccaagacctccaatttgtctacaatggaatcttctgggatggcaccatcacctatggtggctactcccaaatctttgtcgcggattacagatatgtggtacacattccggcaagcctaccaatggatgcagcggctcctctgctatgcgcaggaataacagtgttcaatcctttgaaagaccacgatttggtagcatcaccgggaaagaagattggggtggttggtctgggaggccttgggcacattgccgttaaatttggcaaggctttcggccaccatgttaccgtcatcagcacttctccctccaaggaggctgaagctaagcagcgtttgggtgctgatgatttcattgtcagctccaaccctaaacaattacaggctgcaaggagaagcatagatttcatattggacactgtttcggcagagcactctctgttgcccatcttggaattgctcaaagtcaacgggaccttatttctcgtgggtgcaccagacaagcccttacaattgccagctttcccattgatatttggcaagagatcagtgaaaggtgggatcatagggggaataaaagagacgcaggaaatgttggaggtttgtgcaaagtacaatataacgagtgacattgaattaatcacaccagacagaatcaacgaggctatggagcgccttgctaagaatgatgtgcgctaccgtttcgtcattgatattgctaatgctgccgcttccaacaactaa

SEQ ID NO: 42879 - protein, 383 aa, Glycine max
MMCLNTHLVSLQLREGLINSLVMAESRANHTVSVFGWAAHDSSGKITPYSFKRRQNGVNDVTIKILYCGICHTDLHCAKNEWGITMYPVVPGHEIIGEVTKVGTNVKGFMEGDRVGVGCLAASCLECHHCKTDQENYCQDLQFVYNGIFWDGTITYGGYSQIFVADYRYVVHIPASLPMDAAAPLLCAGITVFNPLKDHDLVASPGKKIGVVGLGGLGHIAVKFGKAFGHHVTVISTSPSKEAEAKQRLGADDFIVSSNPKQLQAARRSIDFILDTVSAEHSLLPILELLKVNGTLFLVGAPDKPLQLPAFPLIFGKRSVKGGIIGGIKETQEMLEVCAKYNITSDIELITPDRINEAMERLAKNDVRYRFVIDIANAAASNN

SEQ ID NO: 42880 - DNA, 1146 bp, Glycine max; identical to SEQ ID NO: 14674
  CDS (1)..(1146)

SEQ ID NO: 42881 - protein, 381 aa, Glycine max; identical to SEQ ID NO: 14675

SEQ ID NO: 42882 - DNA, 1152 bp, Zea mays; identical to SEQ ID NO: 14676
  CDS (1)..(1152)

SEQ ID NO: 42883 - protein, 383 aa, Zea mays; identical to SEQ ID NO: 14677

SEQ ID NO: 42884 - DNA, 1071 bp, Triticum aestivum
  CDS (1)..(1071)
atggcgaaaggcatgcctgctatcggttgggcggcgagggacacgtccggtgtcctctccccctacagcttctcacgaagggctctgaaggacgacgatgtcacgatcaaagtgctcttctgcgggatctgccacaccgacctccacatcgccaagaacgagtggggcaacgccctctaccccgtcgtccccgggcatgagattgttggcgtcgtcaccgaggttggccccggcgtcaagaacttcaaggccggggacgcggtgggcgtgggctacttcgtcgactcctgccgctcctgcgtgagctgcggcagcgggcacgagaaccactgccccacgctcgtgctcacctccaacgccgtggactacgacggcgccaccacccagggaggcttctccgacgtcctcgtcgtcgaccagggctacgtcgtccgcgtcccggagggcctgcccctggacggggcggcgccgctgctctgcgccggcgtcacggtgtacagccccatgatggagttcggcctcaacgcgccggggaagcacctgggcgtggtcggcctcgggggcctcggccacatggccgtcaagttcggcaaggccttcgggatgaccgtcaccgtgatcagctcgtcgccgaggaagcgcgaggaggccgtcgagcggctcggcgccgacgcgttcttggtcagccaggaccccgagcaaatgaaggcggcggccggcacgatggacggcatcatcgacacggtgtcggcggggcacccgatcgtgccgcttctggagctgctaaagccgagggggcagctggtggtggtgggcgcgcccagcacgccgctggagcttcctgcctacgccatcatcggtggcggcaagcgcgtggccgggaacctcgtgggcagcatcggcagctgccaggcgatgctggacttcgcggggaagcacggcatcaccgccgacgtcgaggtcgtcaagatggactacgtcaatacggcggtcgagcggctggagaggaacgacgtgagataccgcttcgtcatcgacgtcgccggcagccagctgggcgccgccgcttag

SEQ ID NO: 42885 - protein, 356 aa, Triticum aestivum
MAKGMPAIGWAARDTSGVLSPYSFSRRALKDDDVTIKVLFCGICHTDLHIAKNEWGNALYPVVPGHEIVGVVTEVGPGVKNFKAGDAVGVGYFVDSCRSCVSCGSGHENHCPTLVLTSNAVDYDGATTQGGFSDVLVVDQGYVVRVPEGLPLDGAAPLLCAGVTVYSPMMEFGLNAPGKHLGVVGLGGLGHMAVKFGKAFGMTVTVISSSPRKREEAVERLGADAFLVSQDPEQMKAAAGTMDGIIDTVSAGHPIVPLLELLKPRGQLVVVGAPSTPLELPAYAIIGGGKRVAGNLVGSIGSCQAMLDFAGKHGITADVEVVKMDYVNTAVERLERNDVRYRFVIDVAGSQLGAAA

SEQ ID NO: 42886 - DNA, 1074 bp, Zea mays
  CDS (1)..(1074)
atggcgggaggcaaggaggcgcacgggtgggcagccagggatgtctctggtcacctctccccttaccacttctcacggagggttcagagagacgacgacgtcaccatcaaggtgctcttctgcgggctttgccacactgacctccatgtcatcaagaacgagtttggcaacgccaagtaccccgtcgttcccgggcacgagatcgtcggcgtcgtcacggacgtcggctccggcgtcacaagcttcaagcccggcgacacggtgggcgtgggctacttcgtcgactcctgccgcagctgcaacagctgcagcaaggggtacgagagctactgcccgcagctcgtggagacgtccaacggcgtgagcctggacgacgacggcggcgccaccaccaagggcggcttctccgacgccctcgtcgtccaccagcgctacgtggtgcgggtcccggccagcctgccgcccgccggggccgcgccgctgctgtgcgccggcgtcaccgtgttcagccccatggtgcagtacggcctgaacgcgccggggaagcacctgggcgtcgtcggcctcggcggcctcggccacctggccgtccgcttcggcaaggcgttcgggatgaaggtcaccgtcatcagcacgtcgctgggcaagcgggacgaggccctcggccgcctcggcgccgacgcgttcctggtcagccgcgaccccgagcagatgagggcggcggcgggcaccttggacggcgtcatcgacacggtgtcggccgaccaccctgtcgtgccgctgctggacctgctcaagccgatgggccagatggtcgtcgtcggcctgcccaccaagccgctccaggtgcctgccttcagcctcgtcgccggcgggaagcgcgtggccgggagtgccggcggcggcgtcggggagtgccaggccatgctcgactttgccggcgagcacgggatcaccgcggatgtggaggtcgtcgggatggactacgtcaataccgccatccagcgcctagagaggaacgatgtcaggtaccgcttcgttgtcgacgtcgcgggcagcaagattggaggctag

SEQ ID NO: 42887 - protein, 357 aa, Zea mays
MAGGKEAHGWAARDVSGHLSPYHFSRRVQRDDDVTIKVLFCGLCHTDLHVIKNEFGNAKYPVVPGHEIVGVVTDVGSGVTSFKPGDTVGVGYFVDSCRSCNSCSKGYESYCPQLVETSNGVSLDDDGGATTKGGFSDALVVHQRYVVRVPASLPPAGAAPLLCAGVTVFSPMVQYGLNAPGKHLGVVGLGGLGHLAVRFGKAFGMKVTVISTSLGKRDEALGRLGADAFLVSRDPEQMRAAAGTLDGVIDTVSADHPVVPLLDLLKPMGQMVVVGLPTKPLQVPAFSLVAGGKRVAGSAGGGVGECQAMLDFAGEHGITADVEVVGMDYVNTAIQRLERNDVRYRFVVDVAGSKIGG

SEQ ID NO: 42888 - DNA, 1245 bp, Zea mays
  CDS (1)..(1245)
atgtcatatcattgtcgcgtcctcgtccccgttccatttcattatccccccggagctggtgcgcgagtcggagctggtgcagggtcacccttcccctcggcctcaagagctctgcggttgccgcggccaagggcgtccgtggagaagcgggagcaggtggcggcgatggaagagcaaggcggccaggcggcgctcgggtgggcggccagggacgactccggcgtcctctccccctacagcttctccagaagggttcctaaagacgacgatgtcacgatcaaggtgctctactgcgggatctgccacaccgacctgcacgtcatcaagaacgactggcgaaacgccatgtacccagtcgtcccggggcacgagatcgtgggcgtggtgaccggcgtcggcggcggcgtcacgcggttcaaggccggcgacacggtcggcgtgggctacttcgtggggtcctgccgctcctgcgacagctgcggcaagggggacgacaactactgcgcggggatcgtgctcacctccaacggcgtcgaccacgcgcacggcggcgcgcccaccagggggggattctccgacgtcctggtcgcgagcgagcactacgtggtccgcgtccccgacggcctggcgctggaccgcaccgcgccgctgctctgcgccggcgtcaccgtgtacagccccatgatgcgccacggcctcaacgagcccggcaagcacctcggcgtcgtcggcctcggcggcctcggccacgtcgccgtcaagttcggcaaggccttcgggatgaaggtcaccgtcatcagcacgtccgccagcaagcgccaggaggccatcgagaacctcggcgcggacgagttcctcatcagccgggacgaggaccagatgaaggcggcgacggggaccatggacggcatcatcgacacggtgtcggcgtggcacccgatcacgccgctgctggcgctgctgaagccgctggggcagatggtggtcgtgggcgcgccgagcaagccgctcgagctgccggcctacgccatcgtgccgggcgggaagggcgtggctgggaacaatgtcggcagcgtcagggactgccaggccatgctcgagttcgcggggaagcacggcatcggggccgaggtcgaggtcatcaagatggactacgtcaacacggccatggagcggctcgagaagaacgacgtccgctaccgcttcgtcatcgacgtcgccggcagcctcggctctgccgcctag

SEQ ID NO: 42889 - protein, 414 aa, Zea mays
MSYHCRVLVPVPFHYPPGAGARVGAGAGSPFPSASRALRLPRPRASVEKREQVAAMEEQGGQAALGWAARDDSGVLSPYSFSRRVPKDDDVTIKVLYCGICHTDLHVIKNDWRNAMYPVVPGHEIVGVVTGVGGGVTRFKAGDTVGVGYFVGSCRSCDSCGKGDDNYCAGIVLTSNGVDHAHGGAPTRGGFSDVLVASEHYVVRVPDGLALDRTAPLLCAGVTVYSPMMRHGLNEPGKHLGVVGLGGLGHVAVKFGKAFGMKVTVISTSASKRQEAIENLGADEFLISRDEDQMKAATGTMDGIIDTVSAWHPITPLLALLKPLGQMVVVGAPSKPLELPAYAIVPGGKGVAGNNVGSVRDCQAMLEFAGKHGIGAEVEVIKMDYVNTAMERLEKNDVRYRFVIDVAGSLGSAA

SEQ ID NO: 42890 - DNA, 1077 bp, Zea mays
  CDS (1)..(1077)
atggcgggaggcaaggaagcgcacgggtgggcagccagggatgtctctggtcacctctccccttaccacttctcacggagggttcagagagacgacgacgtcaccatcaaggtgctcttctgcgggctttgccacactgacctccacgtcatcaagaacgagtttggcaacgccaagtaccccgtcgttcccgggcacgagatcgtcggcgtcgtcaccgacgtcggctccggcgtcacaagcttcaagcccggcgacacggtgggcgtgggctacttcgtcgactcctgccgcagctgcgacagctgcagcaaggggtacgagagctactgcccgcagctcgtggagacgtccaacggcgtgagcctggacgacgatgacggcggcgccaccaccaagggcggcttctccgacgccctcgtcgtccaccagcgctacgtggtgcgggtcccggccagcctgccgcccgccggggccgcgccgctgctgtgcgccggcgtcaccgtgttcagccccatggtgcagtacggcctgaacgcgccggggaagcacctgggcgtcgtcggcctcggcggcctcggccacctggccgtccgcttcggcaaggcgttcgggatgaaggtcaccgtcatcagcacgtcgctgggcaagcgggacgaggccctcggccgcctcggtgccgacgcgttcctggtcagccgcgaccccgagcagatgagggcggcggcgggcaccttggacggcgtcatcgacacggtgtcggccgaccaccctgtcgtgccgctgctggacctgctcaagccgatgggccagatggtcgtcgtcggcctgcccaccaagccgctccaggtgcctgccttcagcctcgtcgccggcgggaagcgcgtggccgggagtgccggcggcggcgtcggggagtgccaggccatgctcgactttgccggcgagcacgggatcaccgcggatgtggaggtcgtcgggatggactacgtcaataccgccatccagcgcctagagaggaacgatgtcaggtaccgcttcgttgtcgacgtcgcgggcagcaagattggaggctag

SEQ ID NO: 42891 - protein, 358 aa, Zea mays
MAGGKEAHGWAARDVSGHLSPYHFSRRVQRDDDVTIKVLFCGLCHTDLHVIKNEFGNAKYPVVPGHEIVGVVTDVGSGVTSFKPGDTVGVGYFVDSCRSCDSCSKGYESYCPQLVETSNGVSLDDDDGGATTKGGFSDALVVHQRYVVRVPASLPPAGAAPLLCAGVTVFSPMVQYGLNAPGKHLGVVGLGGLGHLAVRFGKAFGMKVTVISTSLGKRDEALGRLGADAFLVSRDPEQMRAAAGTLDGVIDTVSADHPVVPLLDLLKPMGQMVVVGLPTKPLQVPAFSLVAGGKRVAGSAGGGVGECQAMLDFAGEHGITADVEVVGMDYVNTAIQRLERNDVRYRFVVDVAGSKIGG

SEQ ID NO: 42892 - DNA, 1080 bp, Zea mays
  CDS (1)..(1080)
atggctcccactcccactcacacggcggcggcggtggcgctcgccgcgcacgactcgtccggccacctcgcgccgctcaccatcacccgcaggagcaccggggacgacgatgtagcgataaagatcctgtactgtgggatgtgtcactctgaccttcacagcatcaagaacgagtggcacaacgccacgtaccccatggtccctggtcacgagatcgccggagtggtgacggaggtgggcaagaacgtgaccagcttcaaggccggggaccgcgtcggcgtgggctgcatggtgaactcgtgccagtcgtgcggcagctgcgacgaggacttcgagaacagctgccgggccgtcatcttcacctacaactccgtcgaccgcgacggcaccgtcacctacggcggctactccagcagcgtggtggtgcacgagcgcttcgtggtccggttccccgacgcgatgccgctggatcggggggcgccgctgctgtgcgcgggcatcacagtgtacagccccatgaagtaccacggcctgaacgtgccggggaagcacgtcggcgtgatggggctgggaggcctgggccacgtcgccgtcaagttcgccaaggcgttcggggccaaggtcacggtcatcagcacgtcgcctgggaagaagcaggaggcgctcgaccggcttggcgccgacgccttcgtcgtcagcaaggacgccgaagaaatgaaggcggctgcgagcaccatggacggcatcatcaacacggtgtcggcgaacctcaccttggccccgtacatgggcctgctcaagcccaacggcaagatgatcatggtcggcctgcccaccaagcctctcgagatcccgccctttgatctcatcattgggaacaagaccctggccgggagctgcatcggcggcatgagggacacgcaggagatgatcaacgtggcggccaagcacggcgtgacggcggacatagaactggtggccgcggactacgtgaacacggccatggagcgcctggccaaggctgacgtcaggtaccgcttcgtcatcgacatcggcaacaccctcaagaattcagagtga

SEQ ID NO: 42893 - protein, 359 aa, Zea mays
MAPTPTHTAAAVALAAHDSSGHLAPLTITRRSTGDDDVAIKILYCGMCHSDLHSIKNEWHNATYPMVPGHEIAGVVTEVGKNVTSFKAGDRVGVGCMVNSCQSCGSCDEDFENSCRAVIFTYNSVDRDGTVTYGGYSSSVVVHERFVVRFPDAMPLDRGAPLLCAGITVYSPMKYHGLNVPGKHVGVMGLGGLGHVAVKFAKAFGAKVTVISTSPGKKQEALDRLGADAFVVSKDAEEMKAAASTMDGIINTVSANLTLAPYMGLLKPNGKMIMVGLPTKPLEIPPFDLIIGNKTLAGSCIGGMRDTQEMINVAAKHGVTADIELVAADYVNTAMERLAKADVRYRFVIDIGNTLKNSE

SEQ ID NO: 42894 - DNA, 1113 bp, Zea mays
  CDS (1)..(1113)
atggcaccggtggaggcggagcagcaccggcggagggcgttggcgctcgcggcgcacgacgcctccggcgccgtctcccccatccgcatctcgcgaagggacactggagatgacgatgttgccatacagatactgtactgcgggatatgccactctgacctgcacaccatcaagaacgagtggaagaacgccaactaccctgttgtccctgggcacgagatcgccgggctgatcaccgaggttggcaagaacgtgaagaggttcaacgtcggagacaaggttggcgtcgggtgcatggtcaacacatgccagtcctgcgagagctgcgagggagggcacgagaactactgctccaagatcatcttcacctacaactcccacgacagggacggcaccgtcacctacggtggctactctgacatggttgtcgtcaacgagcgcttcgtcatccggttccctgatggcatgcccctcgacagaggcgcgccgctgctctgtgcagggataaccgtgtacaaccccatgaagcaccacgggctaaacgaggcaggcaagcacatcggcgtggttggactcggggggcttgggcacgtcgccgtgaagttcgcgaaggcgttcgggatgagggtgaccgtgatcagcacgtccccggggaagagggaggaagctatggagacgcttggtgcagacgcctttgttgtcagcggtgatgctaaccagatgaaggctgcgaagggcacaatggatggcattatgaacacggcctctgcaagcatgtccatgtacgcttaccttgctctcctcaagccccagggcaagatgatcctgcttggcctgcctgagaagcctctgcagatctctgccttctctttggttactgggggcaagactctggccgggagctgcatggggagcatcagggacacgcaggagatgatggacttcgcagccaagcacgggttggcagcggacatcgaactgatcggcaccgaagaagttaatgaggccatggaacgcctcgccaagggcgaggtcaggtaccgcttcgtcatcgacatcggcaacaccctcaacgcggcatcactagggagctcgccggtcccagctctgtag

SEQ ID NO: 42895 - protein, 370 aa, Zea mays
MAPVEAEQHRRRALALAAHDASGAVSPIRISRRDTGDDDVAIQILYCGICHSDLHTIKNEWKNANYPVVPGHEIAGLITEVGKNVKRFNVGDKVGVGCMVNTCQSCESCEGGHENYCSKIIFTYNSHDRDGTVTYGGYSDMVVVNERFVIRFPDGMPLDRGAPLLCAGITVYNPMKHHGLNEAGKHIGVVGLGGLGHVAVKFAKAFGMRVTVISTSPGKREEAMETLGADAFVVSGDANQMKAAKGTMDGIMNTASASMSMYAYLALLKPQGKMILLGLPEKPLQISAFSLVTGGKTLAGSCMGSIRDTQEMMDFAAKHGLAADIELIGTEEVNEAMERLAKGEVRYRFVIDIGNTLNAASLGSSPVPAL

SEQ ID NO: 42896 - DNA, 1254 bp, Zea mays
  CDS (1)..(1254)
atggccatgtccgcttcctcctcctcgcgcgccctcctccgccggatcggcggcgcgctcctccgccgctccttctcctcctcatccgccgccgccgccgcagggtaccacgtcgcgggcgggcccagctacatgcgcggcgccgtcttctgggagcccggccgcccgctcacgctcgaggagttccgcatgccgcggcccaaggccggcgagctcctcatcaagaccaaagcctgcggggtctgtcactccgatctccatgtcctcaaaggcgagctccctttctccacgccctgtgtcgtgggccatgagatcactggagaggtggttgaccatggcacgcacactcctgttgagatcatcaacaggttcccagtcggaagtcacgtcgtcggcgccttcataatgccatgtgggaactgcttctactgcgttaagggccaagaagatctgtgtgagtctttcttcgcgtataatcgtgccaaggggacactctatgatggcgagacacggctgtttctaaggggcaatgggaaaccggtgtacatgtatagtatgggagggcttgcagagtattgtgttgtcccagccaatgcgctagcagttctccctgactcactgccatacacagaatcagcaattttaggatgtgcagtgtttaccgcgtatggtgccctgaggcatgctgctgaaatgcggcctggtgattcagtagctgtgatcggagttggaggggttgggtcaagctgtttacagatagcaaaagcctttggagcttcccaagtcattgcagtggatgtccttgatgagaagcttcagaacgctacaacacttggagcaacccacactgtaaatgcagcaaaagatgatgcagttgaaaggataaaggaaattactgatggtaggggtgtagatgtggctatagaggcacttggtaaggcgttaacattttcccagtgcgccaagagcgtgcgtgatggaggcaaagctgttatgatcgggcttgctgcaacgaacgtaatgggagaggttgatataacccgtcttgtccgacgacaggtgaaaatcattggctcatatggcgcaagggctaggcaagaccttcctcagatagtgaagctcgcggagagtggtgccttcaatctccaaaacaccatatcaaggaaatgcaaatttgaggaggcgaatggcgcctatgaggatctcaatcagggcaagatcgtaggacgagctgtggttgagatcatggagtga

SEQ ID NO: 42897 - protein, 417 aa, Zea mays
MAMSASSSSRALLRRIGGALLRRSFSSSSAAAAAGYHVAGGPSYMRGAVFWEPGRPLTLEEFRMPRPKAGELLIKTKACGVCHSDLHVLKGELPFSTPCVVGHEITGEVVDHGTHTPVEIINRFPVGSHVVGAFIMPCGNCFYCVKGQEDLCESFFAYNRAKGTLYDGETRLFLRGNGKPVYMYSMGGLAEYCVVPANALAVLPDSLPYTESAILGCAVFTAYGALRHAAEMRPGDSVAVIGVGGVGSSCLQIAKAFGASQVIAVDVLDEKLQNATTLGATHTVNAAKDDAVERIKEITDGRGVDVAIEALGKALTFSQCAKSVRDGGKAVMIGLAATNVMGEVDITRLVRRQVKIIGSYGARARQDLPQIVKLAESGAFNLQNTISRKCKFEEANGAYEDLNQGKIVGRAVVEIME

SEQ ID NO: 42898 - DNA, 1140 bp, Zea mays; identical to SEQ ID NO: 14682
  CDS (1)..(1140)

SEQ ID NO: 42899 - protein, 379 aa, Zea mays; identical to SEQ ID NO: 14683

SEQ ID NO: 42900 - DNA, 1098 bp, Zea mays
  CDS (1)..(1098)
atggagcaaggcggcaagatggcccatgggtgggctgccagggatgcctccggcctcctctccccttacagcttctcaagaagggttcagggggacgacgacgtgacgatcaaggtgctcttctgcggcatctgccacaccgacctccacatcatcaagaacgagtggggcaatgccatgtaccctgtcgtccccgggcacgaggtcgtcggcgtcgtcacggacgtcggccatggcgtcagcaagttcaaggccggggacacggtgggcgtgggctacttcgtcgactcctgccgctcctgcgagagctgcagcacggggcacgagaactactgccccgacctcgtactctcctccaacggcgtggaccaccaccaccacgacggcggcgcgagcgcgagcgcgaccaccaaggggggcttctccgacgtgctggtcgtcagccaggacttcgtggtccgggtgccagagagcctgcctccggacggcgccgcgccgctgctctgcgccggagtcacggtgtacagcccgatggtgcagtacgcgctcaacgggccgggcaagcacctcggcgtcgtcggcctcgggggcctaggccatctggccgtcaagtttgggaaggcgttcggcatgacggtcaccgtcatcagctcgtcgcctgccaagcgcgaggaggcgctcggacgccttggcgccgacgcgttcttggtgagccacgacgcctcgcaaatgaaggctgcagccgccacgatggacggcatcatcgacacggtctcggcggggcaccagatcgtgccgctgctggcgctgctgaagcccatggggcagatggtggtggtcggcgcgccgagcacgccgctggagctgccggcgtacgccatcatcacgggcgggaagcgggtggccgggaacggcgtcgggagtgtcgcggactgccaggcgatgctggacttcgcggcggagcatggcgtcaccgctgacaccgaggtcgtgccgatggactacgtcaacaccgccatcgagcggctggagaagaacgatgtcaggtaccgcttcgtcgtcgacgtcgcgggcagccagatggataccgttgcttag

SEQ ID NO: 42901 - protein, 365 aa, Zea mays
MEQGGKMAHGWAARDASGLLSPYSFSRRVQGDDDVTIKVLFCGICHTDLHIIKNEWGNAMYPVVPGHEVVGVVTDVGHGVSKFKAGDTVGVGYFVDSCRSCESCSTGHENYCPDLVLSSNGVDHHHHDGGASASATTKGGFSDVLVVSQDFVVRVPESLPPDGAAPLLCAGVTVYSPMVQYALNGPGKHLGVVGLGGLGHLAVKFGKAFGMTVTVISSSPAKREEALGRLGADAFLVSHDASQMKAAAATMDGIIDTVSAGHQIVPLLALLKPMGQMVVVGAPSTPLELPAYAIITGGKRVAGNGVGSVADCQAMLDFAAEHGVTADTEVVPMDYVNTAIERLEKNDVRYRFVVDVAGSQMDTVA

SEQ ID NO: 42902 - DNA, 1146 bp, Zea mays; identical to SEQ ID NO: 14686
  CDS (1)..(1146)

SEQ ID NO: 42903 - protein, 381 aa, Zea mays; identical to SEQ ID NO: 14687

SEQ ID NO: 42904 - DNA, 1086 bp, Zea mays
  CDS (1)..(1086)
atggaggtgacaccaaaccacaccctgaccgtgaccgggtgggcggccatgaacgagtccgccggcaaggtggagcccttcgtcttcaagagaagggagaacggccctgacgacgtgacgatcaaggtgcagtactgcggcatgtgccacacggacctgcacttcatcaacaacgactggggcatcaccacgtacccgctggtcccggggcacgagatcacgggcgtggtcaccaaggccgggcgcaacgtcacgggcttccgcgtcggcgaccgcgtcggcgtgggctgcatcgccgcctcctgcctggactgcgaccactgccgccgctccgaggagaactactgcgaccgtgtggcgctcacctacaacggcgtcttctgggacggcagcgtcacgtacggcggctactcgcgcgcgctggtggcggacaagcgcttcgtggtgcgcgtccccgacgcgctgccgctggacgccgccgcgccgctgctgtgcgcgggcgtcacggtgtacagccccatgaagcaccacggcatgctggggcaccccggcgccagcctcggcgtcgtcgggctcggcggcctcggccacgtcgccgtcaagctcgccaaggcgttcggcctccgcgtcaccgtcgtcagcacgtcgccggccaaggaggccgaggccagggcccggctcggcgccgaccgcttcgtcgtcagcaccgacgacgcgcagatgcgggacgcggccaggtccctcgactacgtcatcgacaccgtctccgccaagcactcgctcggacccatcctggacctgctcaaggtcagcggcaagctcgtgctcgtcgccgcgccggaacagcccgtcaagctcccctccttcccgctcatcttcgggaagaggaccgtcagcgggagcatgacgggagggatcagggagacgcaggagatgctcgacctctgcgcccgccacaacatcacctgcgacatcgagctcgtctccacggacgggatcaacgccgcgctcgcgcgcctcgcgcgcaacgacgtccgataccgcttcgtcatcgacatcgccggcgactccacctcaaaactatag

SEQ ID NO: 42905 - protein, 361 aa, Zea mays
MEVTPNHTLTVTGWAAMNESAGKVEPFVFKRRENGPDDVTIKVQYCGMCHTDLHFINNDWGITTYPLVPGHEITGVVTKAGRNVTGFRVGDRVGVGCIAASCLDCDHCRRSEENYCDRVALTYNGVFWDGSVTYGGYSRALVADKRFVVRVPDALPLDAAAPLLCAGVTVYSPMKHHGMLGHPGASLGVVGLGGLGHVAVKLAKAFGLRVTVVSTSPAKEAEARARLGADRFVVSTDDAQMRDAARSLDYVIDTVSAKHSLGPILDLLKVSGKLVLVAAPEQPVKLPSFPLIFGKRTVSGSMTGGIRETQEMLDLCARHNITCDIELVSTDGINAALARLARNDVRYRFVIDIAGDSTSKL

SEQ ID NO: 42906 - DNA, 1140 bp, Zea mays; identical to SEQ ID NO: 14688
  CDS (1)..(1140)

SEQ ID NO: 42907 - protein, 379 aa, Zea mays; identical to SEQ ID NO: 14689

SEQ ID NO: 42908 - DNA, 1254 bp, Zea mays
  CDS (1)..(1254)
atggccatgtccgcttcctcctcctcgcgcgccctcctccgccggatcggcggcgcgctcctccgccgctccttctcctcctcatccgccgccgccgccgcagggtaccacgtcgcgggcgggcccagctacatgcgcggcgccgtcttctgggagcccggccgcccgctcacgctcgaggagttccgcatgccgcgccccaaggccggcgagctcctcatcaagaccaaagcctgcggggtctgccactccgatctccatgtcctcaaaggcgagctccctttctccacgccctgtgtcgtgggccatgagatcactggagaggtggttgaccatggcacgcacactcctgctgagatcatcaacaggttcccagtcggaagtcacgtcgtcggcgccttcataatgccatgtgggaactgcttctactgcgttaagggccaagaagatctgtgcgagtctttcttcgcgtataatcgtgccaaggggacactctatgatggcgagacacggctgtttctaagaggcaatgggaaaccggtgtacatgtatagtatgggagggcttgcagagtattgtgttgtcccggccaatgcgctagcagttctccctgactcactgccatacacagaatcagcaattttaggatgtgcagtgtttaccgcgtatggtgccctgaggcatgctgctgaaatgcggcctggtgattcagtagctgtgatcggagttggaggggttgggtcaagctgtttacagatagcaaaagcctttggagcttcccaagtcattgcagtggatgtccttgatgagaagctccagaacgctacaacacttggagcaacccacactgtaaatgcagcaaaagctgatgcagttgaaaggataaaggaaattactgatggtaggggtgtagatgtggctatagaggcacttggtaaggcgttaacattttcccagtgcgccaagagcgtgcgtgatggaggcaaagctgttatgatcgggcttgctgcaacgaacgtaatgggagaggttgatataacccgtcttgtccgacgacaggtgaaaatcattggctcatatggcgcaagggccaggcaagaccttcctcagatagtgaagctcgcggagagtggtgccttcaatctccagaacaccatatcaaggaaatgcaaattcgaggaggcgaatggcgcctatgaggatctcaatcagggcaagatcgtaggacgagctgtggttgagatcatgcagtga

SEQ ID NO: 42909 - protein, 417 aa, Zea mays
MAMSASSSSRALLRRIGGALLRRSFSSSSAAAAAGYHVAGGPSYMRGAVFWEPGRPLTLEEFRMPRPKAGELLIKTKACGVCHSDLHVLKGELPFSTPCVVGHEITGEVVDHGTHTPAEIINRFPVGSHVVGAFIMPCGNCFYCVKGQEDLCESFFAYNRAKGTLYDGETRLFLRGNGKPVYMYSMGGLAEYCVVPANALAVLPDSLPYTESAILGCAVFTAYGALRHAAEMRPGDSVAVIGVGGVGSSCLQIAKAFGASQVIAVDVLDEKLQNATTLGATHTVNAAKADAVERIKEITDGRGVDVAIEALGKALTFSQCAKSVRDGGKAVMIGLAATNVMGEVDITRLVRRQVKIIGSYGARARQDLPQIVKLAESGAFNLQNTISRKCKFEEANGAYEDLNQGKIVGRAVVEIMQ

SEQ ID NO: 42910 - DNA, 1080 bp, Zea mays
  CDS (1)..(1080)
atggaagagcaaggcggccaggcggcgctcgggtgggcggccagggacgactccggcgtcctctccccctacagcttctccagaagggttcctaaagacgacgatgtcacgatcaaggtgctctactgcgggatctgccacaccgacctgcacgtcatcaagaacgactggcgaaacgccatgtacccagtcgtcccggggcacgagatcgtgggcgtggtgaccggcgtcggcggcggcgtcacgcggttcaaggccggcgacacggtcggcgtgggctacttcgtggggtcctgccgctcctgcgacagctgcggcaagggggacgacaactactgcgcggggatcgtgctcacctccaacggcgtcgaccacgcgcacggcggcgcgcccaccagggggggattctccgacgtcctggtcgcgagcgagcactacgtggtccgcgtccccgacggcctggcgctggaccgcaccgcgccgctgctctgcgccggcgtcaccgtgtacagccccatgatgcgccacggcctcaacgagcccggcaagcacctcggcgtcgtcggcctcggcggcctcggccacgtcgccgtcaagttcggcaaggccttcgggatgaaggtcaccgtcatcagcacgtccgccagcaagcgccaggaggccatcgagaacctcggcgcggacgagttcctcatcagccgggacgaggaccagatgaaggcggcgacggggaccatggacggcatcatcgacacggtgtcggcgtggcacccgatcacgccgctgctggcgctgctgaagccgctggggcagatggtggtcgtgggcgcgccgagcaagccgctcgagctgccggcctacgccatcgtgccgggcgggaagggcgtggctgggaacaatgtcggcagcgtcagggactgccaggccatgctcgagttcgcggggaagcacggcatcggggccgaggtcgaggtcatcaagatggactacgtcaacacggccatggagcggctcgagaagaacgacgtccgctaccgcttcgtcatcgacgtcgccggcagcctcggctctgccgcctag

SEQ ID NO: 42911 - protein, 359 aa, Zea mays
MEEQGGQAALGWAARDDSGVLSPYSFSRRVPKDDDVTIKVLYCGICHTDLHVIKNDWRNAMYPVVPGHEIVGVVTGVGGGVTRFKAGDTVGVGYFVGSCRSCDSCGKGDDNYCAGIVLTSNGVDHAHGGAPTRGGFSDVLVASEHYVVRVPDGLALDRTAPLLCAGVTVYSPMMRHGLNEPGKHLGVVGLGGLGHVAVKFGKAFGMKVTVISTSASKRQEAIENLGADEFLISRDEDQMKAATGTMDGIIDTVSAWHPITPLLALLKPLGQMVVVGAPSKPLELPAYAIVPGGKGVAGNNVGSVRDCQAMLEFAGKHGIGAEVEVIKMDYVNTAMERLEKNDVRYRFVIDVAGSLGSAA

SEQ ID NO: 42912 - DNA, 1062 bp, Zea mays
  CDS (1)..(1062)
atgggaaaggaggcatttggattggccgcgaaagacaattctggagttctctcgcctttccatttctctagaagggagacaggagagaaggatgttaggttcaaagttttgttctgtggaatctgtcactctgatttgcatatgatcaagaatgagtggggaatatctacttaccctctcgtccccgggcatgagattgttggtgtggtgactgaagtgggaagcaaagtgactaaattcaaaactggagacaaagtcggagtaggttgcatggttggctcgtgcggatcatgtgatagctgcaccgaaggtctcgagaactactgtccaaaatcgatccaaacgtacggattcaagtattacgacgacacaataacctacggtggttactccgacaacatggtttgcgacgaaggtttcatcatccgtatgcccgaaaatctcccattggacgctgctgctccgctactatgcgcggggatcacggtctactccccgctgaaacatcacgggctcgacaagcctggcatgcacattggtgtggttggactaggcggtttgggtcatgtggcggtgaaatttgctaaggctatgggtcttaaggttacggttattagtacttcggatagtaagagagatgaagcgattaataggcttggtgcggacgcgttcgtggtgagccgtgaccaaaaacagattaaggatgcaatgaggacattggatggtattattaataccgtatctgcgactcattcccttcttcctttgctcggtttgctaaagcctaagggaaaacttgttatggttggtgcaccagaaaagccactcgagctcccggtcatgcctctcatcttcgagaggaagatggtaatgggaagtatgataggagggataaaggagactcaagagatggtggatatggcaggaaaacacaacatcactgctgatattgagcttatctctgcggactatgtcaacactgccatggaacggctcgagaaggccgacgttagataccgttttgtgattgatgttgccaacacattgaagcctactccttaa

SEQ ID NO: 42913 - protein, 353 aa, Zea mays
MGKEAFGLAAKDNSGVLSPFHFSRRETGEKDVRFKVLFCGICHSDLHMIKNEWGISTYPLVPGHEIVGVVTEVGSKVTKFKTGDKVGVGCMVGSCGSCDSCTEGLENYCPKSIQTYGFKYYDDTITYGGYSDNMVCDEGFIIRMPENLPLDAAAPLLCAGITVYSPLKHHGLDKPGMHIGVVGLGGLGHVAVKFAKAMGLKVTVISTSDSKRDEAINRLGADAFVVSRDQKQIKDAMRTLDGIINTVSATHSLLPLLGLLKPKGKLVMVGAPEKPLELPVMPLIFERKMVMGSMIGGIKETQEMVDMAGKHNITADIELISADYVNTAMERLEKADVRYRFVIDVANTLKPTP

SEQ ID NO: 42914 - DNA, 1146 bp, Zea mays; identical to SEQ ID NO: 14690
  CDS (1)..(1146)

SEQ ID NO: 42915 - protein, 381 aa, Zea mays; identical to SEQ ID NO: 14691

SEQ ID NO: 42916 - DNA, 1212 bp, Zea mays; identical to SEQ ID NO: 14692
  CDS (1)..(1212)

SEQ ID NO: 42917 - protein, 403 aa, Zea mays; identical to SEQ ID NO: 14693

SEQ ID NO: 42918 - DNA, 1149 bp, Zea mays; identical to SEQ ID NO: 14694
  CDS (1)..(1149)

SEQ ID NO: 42919 - protein, 382 aa, Zea mays; identical to SEQ ID NO: 14695

SEQ ID NO: 42920 - DNA, 1254 bp, Zea mays
  CDS (1)..(1254)
atggccatgtcctcgtcgcgcgccctcctccgccggatcgggggggctctccgccgccgctccttctccgacgccgcggccggccccgactccgccgccgtagggtaccacgtcgcgggcgggcccagctacatgcgcggcgccgtgttctgggagcccgggcgcccgctcacgctggaggagttccacatgccgcgacccaaggccggcgagctcctcatcaagaccaaagcctgcggggtgtgccactccgacctccacgtcctgaaaggcgagctccctttctccagcccctgcgtcgtgggccacgagatcaccggcgaggtcgtcgaccatggcacgcacacccccgcggagatcatcagcaggttcccagtaggaagccacgtcgtcggcgcgttcataatgccatgtgggaactgcttctactgcgttaagggccaagaggacctgtgcgagtccttcttcgcgtacaaccgcgccaaagggacgctctacgacggcgagacgcggctgttcctacggggcaacgggaagccggtgtacatgtacagcatgggaggccttgcggagtactgcgtggtgccagccaacgcgctggcggtcctccccgcctcgctgccgtacacggagtcggcgatcctggggtgcgcggtgttcaccgcgtacggcgccctgaggcacgccgccgagatgcgggcgggcgactcggtggccgtgatcggagtcggaggggtcggatcgagctgtctgcagatagcaaaggcctttggagcttccgaggtcatcgcggtggacgttctcgacgagaagctccggaacgccacaacgctcggcgcgacgcacactgtgaacgcggcgaaagaggacgccgttgagaggataaaggagatcactggcggtaggggtgtcgacgtggctgtcgaggcgctcggtaaggcgctcacgttttcccagtgcgccaggagcgtgcgcgacggaggcaaggcggtgatgatcgggctcgcggcgacgaatgtggtgggggaggtcgacataacccgcctcgtccggcgacaggtgaagatcatcggctcgtacggcgcgagggccaggcaggaccttccgcagatagtgaagctggcggagagcggcgccttcagcctccggaacaccgtatcgaggaagtgcaggttcgaggaggcgaacggcgcctacgaggacctcgaccagggcaagatcgtcggccgagctgtggtcgagatcatggagtga

SEQ ID NO: 42921 - protein, 417 aa, Zea mays
MAMSSSRALLRRIGGALRRRSFSDAAAGPDSAAVGYHVAGGPSYMRGAVFWEPGRPLTLEEFHMPRPKAGELLIKTKACGVCHSDLHVLKGELPFSSPCVVGHEITGEVVDHGTHTPAEIISRFPVGSHVVGAFIMPCGNCFYCVKGQEDLCESFFAYNRAKGTLYDGETRLFLRGNGKPVYMYSMGGLAEYCVVPANALAVLPASLPYTESAILGCAVFTAYGALRHAAEMRAGDSVAVIGVGGVGSSCLQIAKAFGASEVIAVDVLDEKLRNATTLGATHTVNAAKEDAVERIKEITGGRGVDVAVEALGKALTFSQCARSVRDGGKAVMIGLAATNVVGEVDITRLVRRQVKIIGSYGARARQDLPQIVKLAESGAFSLRNTVSRKCRFEEANGAYEDLDQGKIVGRAVVEIME

SEQ ID NO: 42922 - DNA, 1245 bp, Zea mays
  CDS (1)..(1245)
atgtcatatcattgtcgcgtcctcgtccccgttccatttcattatccccccggagctggtgcgcgagtcggagctggtgcagggtcacccttcccctcggcctcaagagctctgcggttgccgcggccaagggcgtccgtggagaagcgggagcaggtggcggcgatggaagagcaaggcggccaggcggcgctcggatgggcggccagggacgactccggcgtcctctccccctacagcttctccagaagggttcctaaagacgacgatgtcacgatcaaggtgctctactgcgggatctgccacaccgacctgcacgtcatcaagaacgactggcgaaacgccatgtacccagtcgtcccggggcacgagatcgtgggcgtggtgaccggcgtcggcggcggcgtcacgcggttcaaggccggcgacacggtcggcgtgggctacttcgtggggtcctgccgctcctgcgacagctgcggcaagggggacgacaactactgcgcggggatcgtgctcacctccaacggcgtcgaccacgcgcacggcggcgcgcccaccagggggggattctccgacgtcctggtcgcgagcgagcactacgtggtccgcgtccccgacggcctggcgctggaccgcaccgcgccgctgctctgcgccggcgtcaccgtgtacagccccatgatgcgccacggcctcaacgagcccggcaagcacctcggcgtcgtcggcctcggcggcctcggccacgtcgccgtcaagttcggcaaggccttcgggatgaaggtcaccgtcatcagcacgtccgccagcaagcgccaggaggccatcgagaacctcggcgcggacgagttcctcatcagccgggacgaggaccagatgaaggcggcgacggggaccatggacggcatcatcgacacggtgtcggcgtggcacccgatcacgccgctgctggcgctgctgaagccgctggggcagatggtgatcgtgggcgcgccgagcaagccgctcgagctgccggcctacgccatcgtgccgggcgggaagggcgtggctgggaacaatgtcggcagcgtcagggactgccaggccatgctcgagttcgcggggaagcacggcatcggggccgaggtcgaggtcatcaagatggactacgtcaacacggccatggagcggctcgagaagaacgacgtccgctaccgcttcgtcatcgacgtcgccggcagcctcggctctgccgcctag

SEQ ID NO: 42923 - protein, 414 aa, Zea mays
MSYHCRVLVPVPFHYPPGAGARVGAGAGSPFPSASRALRLPRPRASVEKREQVAAMEEQGGQAALGWAARDDSGVLSPYSFSRRVPKDDDVTIKVLYCGICHTDLHVIKNDWRNAMYPVVPGHEIVGVVTGVGGGVTRFKAGDTVGVGYFVGSCRSCDSCGKGDDNYCAGIVLTSNGVDHAHGGAPTRGGFSDVLVASEHYVVRVPDGLALDRTAPLLCAGVTVYSPMMRHGLNEPGKHLGVVGLGGLGHVAVKFGKAFGMKVTVISTSASKRQEAIENLGADEFLISRDEDQMKAATGTMDGIIDTVSAWHPITPLLALLKPLGQMVIVGAPSKPLELPAYAIVPGGKGVAGNNVGSVRDCQAMLEFAGKHGIGAEVEVIKMDYVNTAMERLEKNDVRYRFVIDVAGSLGSAA

SEQ ID NO: 42924 - DNA, 1104 bp, Zea mays
  CDS (1)..(1104)
atggggagcctggcgtccgagaggaaggtggtcgggtgggccgccagggacgccaccggacacctctccccctactcctacaccctcaggaacacaggccctgaagatgtggtggtgaaggtgctctactgcgggatctgccacacggacatccaccaggccaagaaccacctcggggcttcaaagtatcctatggtccctgggcacgaggtggtcggcgaggtggtggaggtcgggcccgaggtggccaagtacggcgtcggcgacgtggtaggcgtcggggtgatcgttgggtgctgccgcgagtgcagcccctgcaaggccaacgttgagcagtactgcaacaagaagatctggtcatacaacgacgtctacactgatggacggcccacgcagggtggattcgcctccaccatggtcgtcgaccagaagtttgtggtgaagatcccggcgggtctggctccggagcaagcggcgccgctgctgtgcgctggcgtgacggtgtacagcccgctgaagcactttgggctgacgaccccgggcctccgtggcggcatcctgggcctcggcggcgtgggccacatgggcgtgaaggtagccaaggccatgggccaccacgtgacggtgatcagctcgtcgtccaagaagcgcgcggaggcaatggaccacctcggcgcggacgcgtacctagtgagctcggacgccgcggccatggcggcggccgccgactcgctggactacatcatcgacacggtgcccgtgcaccacccgctggagccgtacctggcgctgctgaagctggacggcaagctcgtgctgctgggcgtcatcggcgagcccctgagcttcgtgtcgcccatggtgatgctggggcggaaggccatcacggggagcttcatcggcagcatcgacgagaccgctgaggtgcttcagttctgcgtcgacaaggggctcacctcccagatcgaggtggtcaagatggggtacgtgaacgaggcgctggagcggctggagcgcaacgacgtccgctaccgcttcgtcgtcgacgtcgccggtagcaacgtcgaggcggaggcggcggcggcggatgcggccagcaactga

SEQ ID NO: 42925 - protein, 367 aa, Zea mays
MGSLASERKVVGWAARDATGHLSPYSYTLRNTGPEDVVVKVLYCGICHTDIHQAKNHLGASKYPMVPGHEVVGEVVEVGPEVAKYGVGDVVGVGVIVGCCRECSPCKANVEQYCNKKIWSYNDVYTDGRPTQGGFASTMVVDQKFVVKIPAGLAPEQAAPLLCAGVTVYSPLKHFGLTTPGLRGGILGLGGVGHMGVKVAKAMGHHVTVISSSSKKRAEAMDHLGADAYLVSSDAAAMAAAADSLDYIIDTVPVHHPLEPYLALLKLDGKLVLLGVIGEPLSFVSPMVMLGRKAITGSFIGSIDETAEVLQFCVDKGLTSQIEVVKMGYVNEALERLERNDVRYRFVVDVAGSNVEAEAAAADAASN

SEQ ID NO: 42926 - DNA, 25 bp, Artificial sequence
  primer
atgaaagcgttatccaaactgaaag

SEQ ID NO: 42927 - DNA, 24 bp, Artificial sequence
  primer
ttaatcccagctcagaataacttt

SEQ ID NO: 42928 - protein, 346 aa, Artificial sequence
  consensus sequence
  Variant (2)..(3): Xaa in position 2 to 3 is any amino acid
  Variant (5)..(16): Xaa in position 5 to 16 is any amino acid
  Variant (17)..(26): Xaa in position 17 to 26 is any or no amino acid
  Variant (28)..(30): Xaa in position 28 to 30 is any amino acid
  Variant (34)..(35): Xaa in position 34 to 35 is any amino acid
  Variant (37)..(41): Xaa in position 37 to 41 is any amino acid
  Variant (43)..(44): Xaa in position 43 to 44 is any amino acid
  Variant (46)..(49): Xaa in position 46 to 49 is any amino acid
  Variant (50)..(55): Xaa in position 50 to 55 is any or no amino acid
  Variant (58)..(58): Xaa in position 58 is any amino acid
  Variant (60)..(66): Xaa in position 60 to 66 is any amino acid
  Variant (67)..(71): Xaa in position 67 to 71 is any or no amino acid
  Variant (73)..(74): Xaa in position 73 to 74 is any amino acid
  Variant (76)..(77): Xaa in position 76 to 77 is any amino acid
  Variant (79)..(85): Xaa in position 79 to 85 is any amino acid
  Variant (87)..(93): Xaa in position 87 to 93 is any amino acid
  Variant (94)..(125): Xaa in position 94 to 125 is any or no amino acid
  Variant (127)..(170): Xaa in position 127 to 170 is any amino acid
  Variant (171)..(183): Xaa in position 171 to 183 is any or no amino acid
  Variant (185)..(190): Xaa in position 185 to 190 is any amino acid
  Variant (192)..(192): Xaa in position 192 is any amino acid
  Variant (194)..(195): Xaa in position 194 to 195 is any amino acid
  Variant (197)..(206): Xaa in position 197 to 206 is any amino acid
  Variant (208)..(226): Xaa in position 208 to 226 is any amino acid
  Variant (227)..(230): Xaa in position 227 to 230 is any or no amino acid
  Variant (232)..(247): Xaa in position 232 to 247 is any amino acid
  Variant (248)..(267): Xaa in position 248 to 267 is any or no amino acid
  Variant (269)..(289): Xaa in position 269 to 289 is any amino acid
  Variant (290)..(314): Xaa in position 290 to 314 is any or no amino acid
  Variant (316)..(320): Xaa in position 316 to 320 is any amino acid
  Variant (322)..(341): Xaa in position 322 to 341 is any amino acid
  Variant (342)..(345): Xaa in position 342 to 345 is any or no amino acid
CXXDXXXXXXXXXXXXXXXXXXXXXXPXXXGHEXXGXXXXXGXXVXXXXXXXXXXGDXVXXXXXXXXXXXXCXXCXXCXXXXXXXCXXXXXXXXXXXXXXXXXXXXXXXXXXXXXXXXXXXXXXXGXXXXXXXXXXXXXXXXXXXXXXXXXXXXXXXXXXXXXXXXXXXXXXXXXXXXXXXXXGXXXXXXGXGXXGXXXXXXXXXXGXXXXXXXXXXXXXXXXXXXXXXXGXXXXXXXXXXXXXXXXXXXXXXXXXXXXXXXXXXXXDXXXXXXXXXXXXXXXXXXXXXXXXXXXXXXXXXXXXXXXXXXXXXXGXXXXXGXXXXXXXXXXXXXXXXXXXXXXXXG

SEQ ID NO: 42929 - protein, 21 aa, Artificial sequence
  protein pattern
  Variant (2)..(4): Xaa in position 2 to 4 is any amino acid
  Variant (8)..(9): Xaa in position 8 to 9 is any amino acid
  Variant (11)..(12): Xaa in position 11 to 12 is any or no amino acid
  Variant (14)..(15): Xaa in position 14 to 15 is any amino acid
  Variant (16)..(17): Xaa in position 16 to 17 is any or no amino acid
  Variant (19)..(20): Xaa in position 19 to 20 is any amino acid
  Variant (21)..(21): Xaa in position 21 is Ala, Asp, Gly, Ser, Thr or Val
PXXXGHEXXGXXVXXXXGXXX

SEQ ID NO: 42930 - protein, 13 aa, Artificial sequence
  protein pattern
  Variant (2)..(3): Xaa in position 2 to 3 is any amino acid
  Variant (4)..(4): Xaa in position 4 is Ile, Leu or Val
  Variant (5)..(5): Xaa in position 5 is Ala, Gly, Leu or Val
  Variant (6)..(6): Xaa in position 6 is Ile or Val
  Variant (7)..(7): Xaa in position 7 is any amino acid
  Variant (9)..(9): Xaa in position 9 is any amino acid
  Variant (11)..(11): Xaa in position 11 is any amino acid
  Variant (12)..(12): Xaa in position 12 is Ile, Leu or Val
GXXXXXXGXGXXG

SEQ ID NO: 42931 - DNA, 480 bp, Escherichia coli
  CDS (1)..(480): transl_table=11
atgcaaaaacgggcgatttatccgggtactttcgatcccattaccaatggtcatatcgatatcgtgacgcgcgccacgcagatgttcgatcacgttattctggcgattgccgccagccccagtaaaaaaccgatgtttaccctggaagagcgtgtggcactggcacagcaggcaaccgcgcatctggggaacgtggaagtggtcgggtttagtgatttaatggcgaacttcgcccgtaatcaacacgctacggtgctgattcgtggcctgcgtgcggtggcagattttgaatatgaaatgcagctggcgcatatgaatcgccacttaatgccggaactggaaagtgtgtttctgatgccgtcgaaagagtggtcgtttatctcttcatcgttggtgaaagaggtggcgcgccatcagggcgatgtcacccatttcctgccggagaatgtccatcaggcgctgatggcgaagttagcgtaa

SEQ ID NO: 42932 - protein, 159 aa, Escherichia coli
MQKRAIYPGTFDPITNGHIDIVTRATQMFDHVILAIAASPSKKPMFTLEERVALAQQATAHLGNVEVVGFSDLMANFARNQHATVLIRGLRAVADFEYEMQLAHMNRHLMPELESVFLMPSKEWSFISSSLVKEVARHQGDVTHFLPENVHQALMAKLA

SEQ ID NO: 42933 - DNA, 483 bp, Listeria monocytogenes
  CDS (1)..(483): transl_table=11
atgggtgacaaaattgccgttattcccgggacatttgatccgattacgaatggtcacttagatattattgaacgtgcagcgaagatttttgatgtgttatatgtttctgttttaaacaattcatccaaaaaaccacttttcacgatagaggagcgaatggaaatgattagacaagtaaccgctcatttgccaaatgtacaagtggaaagtgcgagtggattgactgttgattatgctgctacgcgcggggctacggcaattgtcaggggacttcgagcggtgagtgattttgaatacgagatgcaaattgcttcgatgaaccgaacgctaaatgcggatatcgaaactttttttgtcatgactaatacgaaatattcttttttaagttccagtatggtaaaagaagtggcgcagtatcaaggcgatatcagcgaacttgtgccagaaatcgtgaacaaagcagtacaagcaaaattcaagtaa

SEQ ID NO: 42934 - protein, 160 aa, Listeria monocytogenes
MGDKIAVIPGTFDPITNGHLDIIERAAKIFDVLYVSVLNNSSKKPLFTIEERMEMIRQVTAHLPNVQVESASGLTVDYAATRGATAIVRGLRAVSDFEYEMQIASMNRTLNADIETFFVMTNTKYSFLSSSMVKEVAQYQGDISELVPEIVNKAVQAKFK

SEQ ID NO: 42935 - DNA, 480 bp, Pseudomonas aeruginosa
  CDS (1)..(480): transl_table=11
atgaaccgagtgctgtacccaggcaccttcgatcccatcaccaagggtcacggcgatctgatcgaacgtgcttcacggcttttcgaccatgtgatcatcgcggtcgccgccagccccaagaagaaccccctgttcagcctggaacagcgggttgcgctggcccaggaggtcaccaagcacctgccgaacgtcgaggtggtgggcttctccaccctgctggcgcacttcgtcaaggagcagaaggcgaatgtcttcctccgcggcctgcgcgcggtttccgacttcgagtacgagttccagctggccaacatgaaccgccagctcgcccccgacgtggaaagcatgttcctcaccccgtcggagaagtattccttcatttcctcgacgctggtccgggaaatcgccgctctcggcggggatatcagcaagttcgtgcatccggccgtggcagacgccctggcggaacgtttcaagcgctga

SEQ ID NO: 42936 - protein, 159 aa, Pseudomonas aeruginosa
MNRVLYPGTFDPITKGHGDLIERASRLFDHVIIAVAASPKKNPLFSLEQRVALAQEVTKHLPNVEVVGFSTLLAHFVKEQKANVFLRGLRAVSDFEYEFQLANMNRQLAPDVESMFLTPSEKYSFISSTLVREIAALGGDISKFVHPAVADALAERFKR

SEQ ID NO: 42937 - DNA, 510 bp, Xanthobacter autotrophicus Py2
  CDS (1)..(510): transl_table=11
atgagcgcccatacgccccgcaccgccatctatggcggctcgttcgatccgttgaccaacggccacctggacgtggtgcgctccgcctgccgcctcgccgaccggctggtgctggcggtgggcatccatcccggcaaggcgccgctgttctcggcgcaggagcggctggagatgctgcgcgaggtctgcgagccggtggcggcgcaggagaatgcgacgctggagaccatcaccttcgacggtctcatcacctccactgcccaggggctcggcgcgacgctgctcatccgcggcctgcgcgacggcaccgaccttgattatgagatgcagatggcgggcatgaacggggtgctcgcccccgccatccagaccgtgttcctgcccgcctcgccgcgggtgcgccccatcaccgccacgctcgtgcggcagatcgcggccatgggcggggacgtttccgccttcgtgccggccgaagtgctggcgcgcctcaaggacaagttcccgcgctag

SEQ ID NO: 42938 - protein, 169 aa, Xanthobacter autotrophicus Py2
MSAHTPRTAIYGGSFDPLTNGHLDVVRSACRLADRLVLAVGIHPGKAPLFSAQERLEMLREVCEPVAAQENATLETITFDGLITSTAQGLGATLLIRGLRDGTDLDYEMQMAGMNGVLAPAIQTVFLPASPRVRPITATLVRQIAAMGGDVSAFVPAEVLARLKDKFPR

SEQ ID NO: 42939 - DNA, 486 bp, Photorhabdus luminescens subsp. laumondii TTO1
  CDS (1)..(486): transl_table=11
ttgatgaaaaccaaagccatttatcccggaacatttgatcctgttacctacggtcatatcgatatcgtcacccgcgccgcagatatgtttgaccatgttctatttgcgatcgccaacagtgccagaaagaatcctatgtttactctggatgaacgcattaccctggcaaaagaggtaacttcacatctggataatgtggaggtgataggtttctgtgaattaatggctaattttgcaaaaaaacaacaagcaaatattcttatccgtggtcttcgttcagtatctgattttgagtatgaatggcagcttgccaatatgaaccgccactttatgcccgaattagagagcgtttttctgctgccatcacaaaatctctcgtttttatcttcatccttgattaaagatgtcgctctccacgatggcgatatctcatcattcttgccagaacctatcgcccaagccatgctaaaaaaactgggcaagtaa

SEQ ID NO: 42940 - protein, 161 aa, Photorhabdus luminescens subsp. laumondii TTO1
MMKTKAIYPGTFDPVTYGHIDIVTRAADMFDHVLFAIANSARKNPMFTLDERITLAKEVTSHLDNVEVIGFCELMANFAKKQQANILIRGLRSVSDFEYEWQLANMNRHFMPELESVFLLPSQNLSFLSSSLIKDVALHDGDISSFLPEPIAQAMLKKLGK

SEQ ID NO: 42941 - DNA, 474 bp, Prochlorococcus marinus str. MIT 9303
  CDS (1)..(474): transl_table=11
atgagggccctttacccaggcagctttgaccctttaacactgggtcatctggatttgattgagcgtggctgcgcactcttcggcgaggttgtggtagcggttttaagcaaccctgccaaaacgccagcattcaccttgcaacagaggtttaaccagattcatgtggctacagcacattgcaagggcgtaagcgtgatcagctttgatggcctcacagtgagatgtgctcgtcacaaccaggttgatctgatcctgcgtggtcttcgtgcgatgagtgattttgagtatgagctccaaattgctcatacaaaccgctccctggctccagattttgagacaatcttccttgcgactgcagctcatcacagctttctcagtagttctatggtgaaggaagtcgcccgttttggtggcaatattgatcacatggtgcctgaggtggtggcacaagacctccacaggttatttaattga

SEQ ID NO: 42942 - protein, 157 aa, Prochlorococcus marinus str. MIT 9303
MRALYPGSFDPLTLGHLDLIERGCALFGEVVVAVLSNPAKTPAFTLQQRFNQIHVATAHCKGVSVISFDGLTVRCARHNQVDLILRGLRAMSDFEYELQIAHTNRSLAPDFETIFLATAAHHSFLSSSMVKEVARFGGNIDHMVPEVVAQDLHRLFN

SEQ ID NO: 42943 - DNA, 492 bp, Herminiimonas arsenicoxydans
  CDS (1)..(492): transl_table=11
atggtcacagctatctatccaggaacattcgatccacttacgcgtggccatgaagatctggtgcgtcgtgcatccggcctgttcgataaattgatcgtcggtgttgccgatagcaagaacaaaaaaccattcttttcactggaagaacgtctgacgatttccaatgaagtactgggtcattatcctaacgtgcacgtcgaaagtttttccggcttgctgaaggatttcgtgcgtaggcacgatgcgcgcgtgattgtgcgcggcctgcgtgcggtatccgattttgaatacgaattccagatggccggcatgaaccgctatttgctgccggatgtggaaacgctgttcctgactccctccgatcagtatcagttcatctctggtacgatagtccgtgagattgccgcactgggcggcgatgtatcgaagtttgtttttccttccgtcgacaaatggctgaaagaaaaaatcgctgcgcaagagcagggataa

SEQ ID NO: 42944 - protein, 163 aa, Herminiimonas arsenicoxydans
MVTAIYPGTFDPLTRGHEDLVRRASGLFDKLIVGVADSKNKKPFFSLEERLTISNEVLGHYPNVHVESFSGLLKDFVRRHDARVIVRGLRAVSDFEYEFQMAGMNRYLLPDVETLFLTPSDQYQFISGTIVREIAALGGDVSKFVFPSVDKWLKEKIAAQEQG

SEQ ID NO: 42945 - DNA, 495 bp, Bradyrhizobium sp. ORS278
  CDS (1)..(495): transl_table=11
atgcaacgcattgcgctctatccgggctcgttcgatcccgtcaccaacggccatctcgacgtggtccgccaagccgtccatctctgcgacaagctcatcgtcgcggtcggcgtgcatcacggcaagaagccgctgttctcgaccgaggagcggctggcgatggcccatgaggtgttcggcccggtcgcgtccgcagccggctgcgcgttcgacgcctcgacctatgacaatctcacggtgacggcagcgcagcaggcgggcgcgatcctgatgatccgcggcctgcgcgacggtaccgatctcgactacgagatgcaactcgccggcatgaaccagacgatggcgccgtcgatccagaccgtgttcgtgccggcgtccgtcccggtgcgtccgatcacggcgagtctcgtccgccagatcgccgcgatgggcggcgagatctcgcatttcgtcccgccgtcggtggtggccccgctgaaagccaagttcgcctga

SEQ ID NO: 42946 - protein, 164 aa, Bradyrhizobium sp. ORS278
MQRIALYPGSFDPVTNGHLDVVRQAVHLCDKLIVAVGVHHGKKPLFSTEERLAMAHEVFGPVASAAGCAFDASTYDNLTVTAAQQAGAILMIRGLRDGTDLDYEMQLAGMNQTMAPSIQTVFVPASVPVRPITASLVRQIAAMGGEISHFVPPSVVAPLKAKFA

SEQ ID NO: 42947 - DNA, 492 bp, Dichelobacter nodosus VCS1703A
  CDS (1)..(492): transl_table=11
atgcgcattgctttatatcccggaaccttcgatccaattactttgggacatcaagaaatcattgagcgcggcagttttttatgcgaccgcctatatattggcgttgcggtgggacatcataaaaaaactttattttcattatcagaacgttgtgagctggttaacggcgtattagcggatttaaccttgcattgtccggtagaagttgtgccgtattgcggtttacttgcaactttgtatcaaaaactacacgctaacattttaatccgcggattgcgcagcgcaggcgattttgaatatgaacgccaattgttttacgccaatcaacatctcaacgcacaaatcgaaaccgtttttttgctaccagcgccgcaatattcctttatttcatcaacgcttgttcgcgaattagcacaattaaacggcgcgctcgacgggctggttcatgacattgtgaaaaaaaaattacgcttgaatagtggcggacaatag

SEQ ID NO: 42948 - protein, 163 aa, Dichelobacter nodosus VCS1703A
MRIALYPGTFDPITLGHQEIIERGSFLCDRLYIGVAVGHHKKTLFSLSERCELVNGVLADLTLHCPVEVVPYCGLLATLYQKLHANILIRGLRSAGDFEYERQLFYANQHLNAQIETVFLLPAPQYSFISSTLVRELAQLNGALDGLVHDIVKKKLRLNSGGQ

SEQ ID NO: 42949 - DNA, 534 bp, Bartonella henselae str. Houston-1
  CDS (1)..(534): transl_table=11
gtgcggattgaaatgatgaaaattgctctttatgcaggttccttcgatcctcttacaaatggtcatcttgatattttaaaagccagtttcgttttggctgacaaggtgattgtggctataggtatacaggctaaaaaagaatcactttttagttttgaagagcgtgttgatttaattactcaggcaggaaaagagttgttaaatatggggtctgatcggttacaggttatttcgtttgagactcttttgattgataaggctcgggaaattggtgcttcttttcttattcgcggattacgtgatggcactgatcttgattatgaaatgcaaatggcggggatgaatggtctcatggctcctgaattgcaaactgtttttttgccggcaggcgttttggggcgtgtaataacttctacattggtacgacagattgcctctatgggaggtgatgtggcaccttttgtgcctgcgaatgttgctagagctttgcatttaaaatttcaatcttcaagggggagtgattgtgtctcttag

SEQ ID NO: 42950 - protein, 177 aa, Bartonella henselae str. Houston-1
MRIEMMKIALYAGSFDPLTNGHLDILKASFVLADKVIVAIGIQAKKESLFSFEERVDLITQAGKELLNMGSDRLQVISFETLLIDKAREIGASFLIRGLRDGTDLDYEMQMAGMNGLMAPELQTVFLPAGVLGRVITSTLVRQIASMGGDVAPFVPANVARALHLKFQSSRGSDCVS

SEQ ID NO: 42951 - DNA, 495 bp, Bacillus licheniformis ATCC 14580
  CDS (1)..(495): transl_table=11
atggctagcattgccgtttgtcccggaagttttgatccggtgacttttggacatttggatatcatcaggcgcggggcgaaagtgtttgataaagtttatgtatgcgttttgaacaattcttcgaagaagccgctgtttacagtggaagaacgctgtgggctgcttcgcgaagtgacgcaggatatcccgaatgtgcaagtggaatcttttcaggggcttttgattgattatgcaaagagcaagcaggcaaacgtcatcctgcgggggcttagagcggtatctgactttgaatacgagatgcagggaacctcgatgaacaaagtgctcgatgaaaatattgaaacgttttttatgatgacgaataaccaatactcgttcctcagttcaagcattgtcaaagaagtggcaaaatataaaggttcagtcgcagaactcgtgccggaagcggtcgaggctgcacttgaaaaaaagtttgcaaaaaatgagcggccgtaa

SEQ ID NO: 42952 - protein, 164 aa, Bacillus licheniformis ATCC 14580
MASIAVCPGSFDPVTFGHLDIIRRGAKVFDKVYVCVLNNSSKKPLFTVEERCGLLREVTQDIPNVQVESFQGLLIDYAKSKQANVILRGLRAVSDFEYEMQGTSMNKVLDENIETFFMMTNNQYSFLSSSIVKEVAKYKGSVAELVPEAVEAALEKKFAKNERP

SEQ ID NO: 42953 - DNA, 600 bp, Legionella pneumophila subsp. pneumophila str. Philadelphia 1
  CDS (1)..(600): transl_table=11
ttgtcaaacgttttatcgcattcattgcttacctcaattccatttttttatagtttttcaatttacaatacgctagactgcttctatatgcaaatggtaattaacgagatgaaacaaaaagcaatctaccctggaacatttgaccctgtaaccaatggccatattgatattattactcgggccagcactatttttcctgaattgatagttgctgtagcgagtaataaaaacaagcggccttatttatcttgggaaagcagaattagtttactggaagagtccgttggacatttaactggcgtgagagttgtgggttttgataatttgctaattgattttgtattagaacaaaacgcaggcattattttacgtggattgagagctgtttctgattttgaatatgaatttcaactggctggaatgaacagaaaactatctaaaaaggtagagacattatttttaacccccgcagagcatttaatgtatatctcatccactttagttcgtgaaattgcagccttaaatggtgatatttctcaatttgttccacccaatgtagttagagaattaaaaaagagacaaaatgaaagatcattataa

SEQ ID NO: 42954 - protein, 199 aa, Legionella pneumophila subsp. pneumophila str. Philadelphia 1
MSNVLSHSLLTSIPFFYSFSIYNTLDCFYMQMVINEMKQKAIYPGTFDPVTNGHIDIITRASTIFPELIVAVASNKNKRPYLSWESRISLLEESVGHLTGVRVVGFDNLLIDFVLEQNAGIILRGLRAVSDFEYEFQLAGMNRKLSKKVETLFLTPAEHLMYISSTLVREIAALNGDISQFVPPNVVRELKKRQNERSL

SEQ ID NO: 42955 - DNA, 498 bp, Silicibacter pomeroyi DSS-3
  CDS (1)..(498): transl_table=11
atgagagtggctttgtatcccggtacctttgatccgatcacactgggtcacgtcgatatcatccgccgcgccgccgcgctggtggacaagctggtgatcggggtcgcgatcaaccgcgacaaggggccgctgttcacgctcgaagagcgggtggcgatgatcgaggccgaatgcgccgcgctcagcgccgagaccgggaccgagatcgtggcccatccgttcgagaatctgctgatcgactgcgcccgcgacgtgggggcccagatcatcgtgcgcggcctgcgcgcggtggccgatttcgagtatgagttccagatggtcggcatgaaccgcgcgctggacgacagtgtcgagaccgtgttcctgatggccgatgcccgccgtcaggcgatcgcctcgaagctggtgaaggaaatcgcgcggctggggggcgacgtgtcgaaattcgtgccaccccgggtcaacgatgccctcaaggagcggctggggcgggcctag

SEQ ID NO: 42956 - protein, 165 aa, Silicibacter pomeroyi DSS-3
MRVALYPGTFDPITLGHVDIIRRAAALVDKLVIGVAINRDKGPLFTLEERVAMIEAECAALSAETGTEIVAHPFENLLIDCARDVGAQIIVRGLRAVADFEYEFQMVGMNRALDDSVETVFLMADARRQAIASKLVKEIARLGGDVSKFVPPRVNDALKERLGRA

SEQ ID NO: 42957 - DNA, 516 bp, Neisseria gonorrhoeae FA 1090
  CDS (1)..(516): transl_table=11
atgttaccgaatacaccgcgccgcgccgtttatgccggcagtttcgatccgcccacattggggcatctgtggatgatacggcaggcgcaatctatgtttgacgaactcatcgtcgccatcggcatcaatcccgacaaacgcaacacctataccgtcgctgaaaggcaggatatgttgtgcgccattaccgacaacttcccaaacgtcagaattgaagtgtttcaaaaccggtttttggtgcattacgcccgtgaggtagatgcgggattcatcgtgcgcggcatccgttccacctccgattatgaatacgaacgctccatgcgccatatcaacagcgacctcgcacccgaaatatctaccgtattcctcatgccgccgcgcgaaatcgccgaagtgtcgtccactatgatcaaaggactggtcgggcccgagggctggatggaaaccgtcaaaagatatgtgccgccggccgtgtaccaaaaaatgattgcagaacatcacaacaacaatgcctga

SEQ ID NO: 42958 - protein, 171 aa, Neisseria gonorrhoeae FA 1090
MLPNTPRRAVYAGSFDPPTLGHLWMIRQAQSMFDELIVAIGINPDKRNTYTVAERQDMLCAITDNFPNVRIEVFQNRFLVHYAREVDAGFIVRGIRSTSDYEYERSMRHINSDLAPEISTVFLMPPREIAEVSSTMIKGLVGPEGWMETVKRYVPPAVYQKMIAEHHNNNA

SEQ ID NO: 42959 - DNA, 513 bp, Psychrobacter arcticus 273-4
  CDS (1)..(513): transl_table=11
atgagctcttctgctacttcttcaaaattgcataccaagattttataccctggcacctttgaccccattaccaatggtcatgtggacttagtcacgcgcgcgaccaaattatttgatgaggtggtgattgcggtggcatctggtcaccataaaaagccgttatttaactttgaagaacgcgtggcgttggtcgaaacggtctttattgatttgccgcaggtatccgtcataggttttgagggtttgttggtcgattttatgcgtgaaaaaaacgccaccgccgtgttgcgtggtttgcgtgtgatgtcagactttgagtatgagtttcaattggcgaatatgaaccgcgagcttgatgagaattttgaagccgtatttttgacgccttcacagaattactcatttatctcatcgactatgattcgagaaattgccaaacttggcggtgatgtaacgaaatttgtaccgccttgtgtttccgaagcttttattcaaaagctcggtagtaaatag

SEQ ID NO: 42960 - protein, 170 aa, Psychrobacter arcticus 273-4
MSSSATSSKLHTKILYPGTFDPITNGHVDLVTRATKLFDEVVIAVASGHHKKPLFNFEERVALVETVFIDLPQVSVIGFEGLLVDFMREKNATAVLRGLRVMSDFEYEFQLANMNRELDENFEAVFLTPSQNYSFISSTMIREIAKLGGDVTKFVPPCVSEAFIQKLGSK

SEQ ID NO: 42961 - DNA, 471 bp, Colwellia psychrerythraea 34H
  CDS (1)..(471): transl_table=11
atgataagagctatatatccgggtacttttgatccagtaactaatggccatagtgacctaattgttcgtgccagtaagttatttagtgaggtaattattggtgtagcttcaagccccagtaaacagcctcgttttgatttagaacaacgagttgccatgcttgagcaggttacccaggacctaacaaatgtaactgttgttggctttagtggtttattagttgattttgctaagcaatatcaagctaaggtacttattcgtggcttacgagccgtctctgactttgagtatgaatttcaactggccaacatgaatcgtcgcttatcctcagaacttgagagtgtatttctaacaccagcagaagagaattcatttatttcttcaaccttggtaaaagaagtcgcccttcacaaaggtgacgttggccaatttgttcaccctgtagtaaaagcggcactcgataaaatctaa

SEQ ID NO: 42962 - protein, 156 aa, Colwellia psychrerythraea 34H
MIRAIYPGTFDPVTNGHSDLIVRASKLFSEVIIGVASSPSKQPRFDLEQRVAMLEQVTQDLTNVTVVGFSGLLVDFAKQYQAKVLIRGLRAVSDFEYEFQLANMNRRLSSELESVFLTPAEENSFISSTLVKEVALHKGDVGQFVHPVVKAALDKI

SEQ ID NO: 42963 - DNA, 564 bp, Pseudomonas syringae pv. phaseolicola 1448A
  CDS (1)..(564): transl_table=11
ttggcgcttattacgcagcttggcccatcgggaaggctgcgataccatccgagtcccacaacggactccgaccaggacgacgcgatgaaccgagtgttgtacccaggcaccttcgacccgattaccaagggccatggagatttggtcgagcgcgcctcgcgcctgttcgaccacgtggtcattgcggttgccgccagcccgaagaaaaacccgctgtttcctctggaacaacgcgtcgaactggcccgcgaagtcaccaaacacctgcccaacgtggaagtcgtcggcttctcgacgctgctcgcgcattttgccaaggaacagaatgccaacgtctttctgcgcggccttcgcgcggtatcagacttcgagtacgagtttcagctggccaacatgaatcgtcagctggcaccggacgtcgaaagcctgttcctcacgccgtcagagcgctactcgttcatttcctcgacgttggtgcgtgaaatcgcggcgttgggcggtgatatcaccaaattcgttcatcctgctgtcgctcaggcgctgaccgaacgtttcaagcgctag

SEQ ID NO: 42964 - protein, 187 aa, Pseudomonas syringae pv. phaseolicola 1448A
MALITQLGPSGRLRYHPSPTTDSDQDDAMNRVLYPGTFDPITKGHGDLVERASRLFDHVVIAVAASPKKNPLFPLEQRVELAREVTKHLPNVEVVGFSTLLAHFAKEQNANVFLRGLRAVSDFEYEFQLANMNRQLAPDVESLFLTPSERYSFISSTLVREIAALGGDITKFVHPAVAQALTERFKR

SEQ ID NO: 42965 - DNA, 495 bp, Dechloromonas aromatica RCB
  CDS (1)..(495): transl_table=11
ttgaacaaactcaaccatcgcgttgcgatctacccaggcaccttcgacccgatcacccggggccacgaagatctggtccgtcgcgcttcgacgctgttcgacaagctgattctggccatcgccgaaagcccgtcgaagaagccacgcttcccgctggccgaccgcgtcgaaatggcccaggaaattctcggtgacctgaataatgtcgaaatcgtcggcttcaacacactgctgatgaacttcgtccacgaaaagggcgccaaggtcgtcgtccgcggcctgcgcgccgtgtccgattttgaatacgaattccagatggcgggcatgaaccgcagcgtctaccccgaggtcgaaaccgtgtttctgacgccgggcgagcagtacatgtttatctccgctaccatggtgcgtgaaattgcgcgcctgggtggcgatgtcagcaaatttgtgcaaccttgtgtagaaaagcgcctgcgggcgacaaccactgcttaa

SEQ ID NO: 42966 - protein, 164 aa, Dechloromonas aromatica RCB
MNKLNHRVAIYPGTFDPITRGHEDLVRRASTLFDKLILAIAESPSKKPRFPLADRVEMAQEILGDLNNVEIVGFNTLLMNFVHEKGAKVVVRGLRAVSDFEYEFQMAGMNRSVYPEVETVFLTPGEQYMFISATMVREIARLGGDVSKFVQPCVEKRLRATTTA

SEQ ID NO: 42967 - DNA, 495 bp, Thermobifida fusca YX
  CDS (1)..(495): transl_table=11
gtgcgccgtgtcgtctgccctggatctttcgatcccgtcaccaatggccatatcgacatcatccgccgagcggcgaaacagaacgaagaagtcattgtcgcggtgctggtgaacgtcaataaacgtgggcttttcacggcggacgagaagctcgagatgctccgggaagcgaccaaggagttcgacaacgtcaccgtcgccaagttcgacgggctgctcgtcgacttctgccgggcccacgacgtctccgcgatcgtgcggagcctccgctcggtcagcgacttcgactacgagctgcagatcgcccaaatgaactaccagctctcggggatcgacacgctgtttttgaccgcgaatcccaagtattcgttcctcagctccagcctggtgcgggagatcgcccagtacaacggggacgtgagcgcgctggtcccgccctatgtggaggagcgcctgcgcgccaagtacgccgagctggccaagaagaacggctag

SEQ ID NO: 42968 - protein, 164 aa, Thermobifida fusca YX
MRRVVCPGSFDPVTNGHIDIIRRAAKQNEEVIVAVLVNVNKRGLFTADEKLEMLREATKEFDNVTVAKFDGLLVDFCRAHDVSAIVRSLRSVSDFDYELQIAQMNYQLSGIDTLFLTANPKYSFLSSSLVREIAQYNGDVSALVPPYVEERLRAKYAELAKKNG

SEQ ID NO: 42969 - DNA, 483 bp, Thiobacillus denitrificans ATCC 25259
  CDS (1)..(483): transl_table=11
atgctgaccgccgtctatccaggcaccttcgaccccatcacgcgcggccacgaggacctcgtgcgacgcgccgtccgcctcttcgaccgcgtcgtcgtcgcggtcgcggagtcgaggaacaaacgcccgttcttcagcatggacgagcgtgtcgcgatgacacgcgaagtcctcgccgacgtgccgcaggtccgggtcgagggcttctcggggcttctgatcgacttcgtcgccgagcagggcgcgatcgccgtgctccgcggtttgcgcgccgcgtcggacttcgaatacgagttccagctcgcggggatgaaccggaacctgaagccggacatcgagacgctgttcctgaccccgtccgagcaatacatgttcatctcggcgagcatgatccgcgagatcgcgcagttcggcggcgacgtcacgcccttcgttcacccgttggtcgcgcggcgattaagtgagaaaataagagaaaactga

SEQ ID NO: 42970 - protein, 160 aa, Thiobacillus denitrificans ATCC 25259
MLTAVYPGTFDPITRGHEDLVRRAVRLFDRVVVAVAESRNKRPFFSMDERVAMTREVLADVPQVRVEGFSGLLIDFVAEQGAIAVLRGLRAASDFEYEFQLAGMNRNLKPDIETLFLTPSEQYMFISASMIREIAQFGGDVTPFVHPLVARRLSEKIREN

SEQ ID NO: 42971 - DNA, 639 bp, Anabaena variabilis ATCC 29413
  CDS (1)..(639): transl_table=11
ttgaattgtttccccccattccccggatataatcacctcaataactttgatacatctaaaattgtgattgctgtttatcctggtagctttgatccgatcactttaggacacctcgatattattcagcgtggtagccgtttatttgatttggtgattgtcgccgtcttgcgaaatcctaataaagtaccattatttagcgtgcaggaacgcctagaacagattcgcagaaccactaagcatttaccaaacgtagaagccgatggttttgatggtctgactgttaattatgcccaacagcgacaagcacaggttttattaaggggtttacgagcgatttctgattttgaggtcgagttacagatggcccatactaataaaactctttctactcaaattgagacagtttttttagcaacatcaaatgagtatagttttttaagtagtagtgtggtaaaagagattgcaagatttggtggttccgtcgatcatcttgtccccccacacatagctttagatatatacaaatgctacaaccacaattatccaacggcgaatccaactacaacggaaattactccccctcaccagaatatggcaacggcagccccccaggagatactccaggaacaggaaatgtag

SEQ ID NO: 42972 - protein, 212 aa, Anabaena variabilis ATCC 29413
MNCFPPFPGYNHLNNFDTSKIVIAVYPGSFDPITLGHLDIIQRGSRLFDLVIVAVLRNPNKVPLFSVQERLEQIRRTTKHLPNVEADGFDGLTVNYAQQRQAQVLLRGLRAISDFEVELQMAHTNKTLSTQIETVFLATSNEYSFLSSSVVKEIARFGGSVDHLVPPHIALDIYKCYNHNYPTANPTTTEITPPHQNMATAAPQEILQEQEM

SEQ ID NO: 42973 - DNA, 480 bp, Pseudomonas fluorescens PfO-1
  CDS (1)..(480): transl_table=11
atgaaccgagtgttgtacccaggtaccttcgaccctattaccaagggccatggcgatctggtcgaacgcgcctcgcgcctgttcgaccatgtgatcatcgccgtcgccgccagccccaagaagaatccgctgttcccgctggaacaacgggtcgagctggcccgcgaggtcaccaaacacctgccgaacgtggaagtggtcggcttctcgacgctgctggcgcattttgccaaagagcagaacgccaacgtgttcctccgtggcctgcgcgcggtgtcggacttcgagtacgaattccagctggccaacatgaaccgccagttggcgccggatgtggagagcctgtttctcaccccgtccgagcgttattcgttcatttcctcgaccctggtgcgggaaatcgcggccctgggcggcgacatcagcaagttcgtccacccggcggtggccgacgccctgaccctgcgcttcaagaagtaa

SEQ ID NO: 42974 - protein, 159 aa, Pseudomonas fluorescens PfO-1
MNRVLYPGTFDPITKGHGDLVERASRLFDHVIIAVAASPKKNPLFPLEQRVELAREVTKHLPNVEVVGFSTLLAHFAKEQNANVFLRGLRAVSDFEYEFQLANMNRQLAPDVESLFLTPSERYSFISSTLVREIAALGGDISKFVHPAVADALTLRFKK

SEQ ID NO: 42975 - DNA, 489 bp, Rhodobacter sphaeroides 2.4.1
  CDS (1)..(489): transl_table=11
atgcgcatcggtctttatcccggcaccttcgatccgctgacgctcggccacctggacatcatccagcgcgcgatggcgctggtcgatcgcctcgtgatcggggtcgccatcaaccgggacaaggggccgctcttctcgctggaagagcgcgtgcggatggtcgagaccgagtgccgcgccatcgccgccaatggcggcgagatcgtggtgcatccgttcgagaacctgctgatcgactgcgcccgcgacgtgggcgcctcggtgatcgtgcgcggcctgcgcgcggtcgccgacttcgaatacgagttccagatggtcggcatgaaccgcgcgctcgacgccgggatcgagaccgtcttcctgatggccgacgcgcggcgtcaggccatcgcctccaagctcgtcaaggagatcgcccgcctcggcggcgatgtctcgagcttcgtcacgccggacgtaggcgcggcgctggtcgccaaatatcgctga

SEQ ID NO: 42976 - protein, 162 aa, Rhodobacter sphaeroides 2.4.1
MRIGLYPGTFDPLTLGHLDIIQRAMALVDRLVIGVAINRDKGPLFSLEERVRMVETECRAIAANGGEIVVHPFENLLIDCARDVGASVIVRGLRAVADFEYEFQMVGMNRALDAGIETVFLMADARRQAIASKLVKEIARLGGDVSSFVTPDVGAALVAKYR

SEQ ID NO: 42977 - DNA, 489 bp, Carboxydothermus hydrogenoformans Z-2901
  CDS (1)..(489): transl_table=11
ttgcgcatagcagtttatccgggtagttttgatcctataaccaacggtcatctggatattattgaaagagcggccgagctttttgaccgtttaattgttgctattgccaaaaatccaatgaaaaaacctttatttaccctggaagaacgcttggatatgttgcgggaaacgttgaaatattaccctaatattgaaatcgatagttttgagggcttaacggttaattatttaaaagccaaaaacgctcaggttataattcggggacttagagctatttcggattttgaaaatgaatttatgatggctttaaccaataaaaagttggtgccgtgggttgaaactatttttttaatgaccaaagcagaatattcgttcataagttcaagtgctgtaaaggaagtagctatgtatggaggatgtttaaaaggattggtacctgaatatgtcgaattaaaattaagggaaaaatttcagaaggaagggtgttaa

SEQ ID NO: 42978 - protein, 162 aa, Carboxydothermus hydrogenoformans Z-2901
MRIAVYPGSFDPITNGHLDIIERAAELFDRLIVAIAKNPMKKPLFTLEERLDMLRETLKYYPNIEIDSFEGLTVNYLKAKNAQVIIRGLRAISDFENEFMMALTNKKLVPWVETIFLMTKAEYSFISSSAVKEVAMYGGCLKGLVPEYVELKLREKFQKEGC

SEQ ID NO: 42979 - DNA, 513 bp, Desulfovibrio desulfuricans G20
  CDS (1)..(513): transl_table=11
atggggtcaactgacggaaaaatagccatatatcccggaacgtttgatccgctgactaatggacatgccagcctgatacaacgtggctgccagattttcgatcatatcgtggtcgcagtggccaatgatacacccaaaactccgcttttcaccattgatgagcgtgtccagatggctcaggaagcgctggaaggcgtgggcagcattacagtggagcctttttccggcctgctggttgactatgcggaaagaagaggtgcgggggtcatattgcgcggtctcagggctgtctccgactttgaatatgagtttcagctggctttaatgaaccgcaaaatgaaacggcatatccagacagtctttctgatgaccgactataagtggctttacatcagttccaccattatcaaggctgcggccagtctgggcggagatatcaaaggacttgttccggacaatgtctaccgcagactgcgtgaaaaatacggctacccttatccgcttaacgggtag

SEQ ID NO: 42980 - protein, 170 aa, Desulfovibrio desulfuricans G20
MGSTDGKIAIYPGTFDPLTNGHASLIQRGCQIFDHIVVAVANDTPKTPLFTIDERVQMAQEALEGVGSITVEPFSGLLVDYAERRGAGVILRGLRAVSDFEYEFQLALMNRKMKRHIQTVFLMTDYKWLYISSTIIKAAASLGGDIKGLVPDNVYRRLREKYGYPYPLNG

SEQ ID NO: 42981 - DNA, 519 bp, Rhodospirillum rubrum ATCC 11170
  CDS (1)..(519): transl_table=11
atgatgccgactgaacgcatcgcggtttatccggggaccttcgacccggtcaccaacggtcatctcgacatcatcagccgggcggcgcggctggttgatcgtctgaccgttggcgtcgccgtcaatgccggcaagggcccgctgttttcgctcgaggaacgggtggagatggtgcgggtggcggttgacaagctgccgaccaacggggcgacgatcaccgtcgtcccgtttgccaatctgctgatggatttcgcctgtgcccagggagcctcgatgatctttcgcgggctgcgggcgatttccgattttgaatacgaatttcagatgtgcggcatgaattcccgccttaattccaaggtggagacggtttttttgatggcctcggaacgcagccagttcatctcgtcgcgcttcgtcaaggaaatcggccgtcttggcggggatatcggcggcttcgtccccgcccatgtccgcgatcgcttgctcgaccgcttcgaggaagacgccgaatccgcctga

SEQ ID NO: 42982 - protein, 172 aa, Rhodospirillum rubrum ATCC 11170
MMPTERIAVYPGTFDPVTNGHLDIISRAARLVDRLTVGVAVNAGKGPLFSLEERVEMVRVAVDKLPTNGATITVVPFANLLMDFACAQGASMIFRGLRAISDFEYEFQMCGMNSRLNSKVETVFLMASERSQFISSRFVKEIGRLGGDIGGFVPAHVRDRLLDRFEEDAESA

SEQ ID NO: 42983 - DNA, 483 bp, Moorella thermoacetica ATCC 39073
  CDS (1)..(483): transl_table=11
ttgaaggtggctgtatatccaggcacctttgacccgattactaacgggcacctggatattatccggcgggcggtaagtatctttgaccgggttgtggtgggggtggctgccgataattataaaaagaccctgttttccctggaagaaagggtggagctggtcaggaccgtcaccagggatatacccggtgtaacggtaaagtctttttctggactcctggtcgattttgcccgccgggaagaggccgtggctatcgtcagggggctgcgggcagtttccgattttgaatatgaattccagatgtcgataatgaataaaaagctggccagtgacctggagacggtttttctcatgacggctaccgagtattccttcttaagctcaagtatcattcgccaggcagcctccctgggggggtgtatccatggcctggtgccacctgaagtcgagcgagttttgctaaaacgttacggttttttgtag

SEQ ID NO: 42984 - protein, 160 aa, Moorella thermoacetica ATCC 39073
MKVAVYPGTFDPITNGHLDIIRRAVSIFDRVVVGVAADNYKKTLFSLEERVELVRTVTRDIPGVTVKSFSGLLVDFARREEAVAIVRGLRAVSDFEYEFQMSIMNKKLASDLETVFLMTATEYSFLSSSIIRQAASLGGCIHGLVPPEVERVLLKRYGFL

SEQ ID NO: 42985 - DNA, 498 bp, Syntrophus aciditrophicus SB
  CDS (1)..(498): transl_table=11
atgaagaagattgctgtttaccccggttctttcgatcctattacgaatggtcatctcgatatcattaaaaggggcttgtcgatgtttgacgagcttattgtcctcattgcatacaacgcagcaaagtcgtctctgtttactgttcaggaacggatagaaatgattcaggaagcactccatgacagaaaaggtgtccgcgtcgacagttatgacggtcttctggtggattacgtccgcaaagaagggggaaatgtcattcttcgggggctgagagccatgtcagagttcgaatatgagtttcagcttgctttgatgaatcgtcgcctgaatcgcaacattgaaacggttttcctcatgacaggctataagtggttttatacaagctcgacaattatcaaagaggcctcccgccttggaggctctccgaaaggtcttgtaccggaggtggttttcagaaaaatgcaggaaaaatatccactaatgaataagggtaaatga

SEQ ID NO: 42986 - protein, 165 aa, Syntrophus aciditrophicus SB
MKKIAVYPGSFDPITNGHLDIIKRGLSMFDELIVLIAYNAAKSSLFTVQERIEMIQEALHDRKGVRVDSYDGLLVDYVRKEGGNVILRGLRAMSEFEYEFQLALMNRRLNRNIETVFLMTGYKWFYTSSTIIKEASRLGGSPKGLVPEVVFRKMQEKYPLMNKGK

SEQ ID NO: 42987 - DNA, 489 bp, Frankia sp. CcI3
  CDS (1)..(489): transl_table=11
atgaggagggcagcctgtcccggttcatttgatccgatcaccaacggtcatctcgacatcatcgtccgagcgagcagactcttcgacgaggtcgtggtcgccgtatcgatcaacaagaacaaggtcaccttgttcaccgtcgacgagcggatggagctcatcagagaggccctgcgtgatcatccgatggcgccgtccaacgtcctggtagatgcgtcccacgggctgatcgtcgatttttgtcggagtaggggtatccagtcgatcgtcaaaggactgcgtgcggtcagcgacttcgactatgagcttcagatggcgcagatgaacaattcgcttgcgggcgtggagactcttttcatgagtacgaacccgcaatatgcctttctgtcctccagtctggtgaaggaggtcgcgcgttacggaggtgacgtgtcggggctggtaccggatgtggtactcaaacagctccgtgagcgcctcgctcagtaa

SEQ ID NO: 42988 - protein, 162 aa, Frankia sp. CcI3
MRRAACPGSFDPITNGHLDIIVRASRLFDEVVVAVSINKNKVTLFTVDERMELIREALRDHPMAPSNVLVDASHGLIVDFCRSRGIQSIVKGLRAVSDFDYELQMAQMNNSLAGVETLFMSTNPQYAFLSSSLVKEVARYGGDVSGLVPDVVLKQLRERLAQ

SEQ ID NO: 42989 - DNA, 513 bp, Novosphingobium aromaticivorans DSM 12444
  CDS (1)..(513): transl_table=11
atggccgaacgtatcggcgtataccccggaactttcgatccgatcacgctcgggcatctcgacatcatccgtcgcggcgccaagctggtcgacaagctgatcatcggcgtgactaccaacccgtcgaagaacccgatgttcaccccggacgagcgcatggacagcgtccgtcgcgaagtggcggcgcaaggcatcgacaatgtcgaggtcgtcggcttcaacgcgctgctgatgaagttcgcgcgtgcgcagggcgccagcgtgatcgtgcgcgggctgcgggccgtcgccgacttcgagtacgaataccagatggccggcatgaaccagcagctcgatgccgagatcgagacggtattcctcatggcggacgtcagcttgcagccgatcgcgtcaaagctggtcaaggaaatcgcgctgttcggtggcgacatttccgacttcgtgacgcccactatccgcgacgaggtggttgcccgcgtggacagtatcgggcggctgggcgactactga

SEQ ID NO: 42990 - protein, 170 aa, Novosphingobium aromaticivorans DSM 12444
MAERIGVYPGTFDPITLGHLDIIRRGAKLVDKLIIGVTTNPSKNPMFTPDERMDSVRREVAAQGIDNVEVVGFNALLMKFARAQGASVIVRGLRAVADFEYEYQMAGMNQQLDAEIETVFLMADVSLQPIASKLVKEIALFGGDISDFVTPTIRDEVVARVDSIGRLGDY

SEQ ID NO: 42991 - DNA, 507 bp, Anaplasma phagocytophilum HZ
  CDS (1)..(507): transl_table=11
gtgactaagagattagggatatatcccgggacttttgatcccataacttttggacatatagatataatcaagagagcatgtactcttgttgatgagttggttattggtgtagcaaggagtgtacagaagagcactattttttcagcagaattgcgtgccgaaatgatacagcgcgagatgcacgttttggaatgcaagagcgttgtgaaggttgaggttttcgatggtttgttaactgcgtttgccaaacaaaaaaaggctctaatgatcattagagggttacgtgcagttacagattttgattatgaatttcagatgagctggataaattacaaattgacaccaggtatcgagactgttttcctccccgcggcagaggagactcagtttatctcttcgagttttgtcaaggaagttgcaagattaggaggagatgtgagtgtatttgtgccacataatgttcatgagcacctgagagatttctataataattcttctgcgaagtaa

SEQ ID NO: 42992 - protein, 168 aa, Anaplasma phagocytophilum HZ
MTKRLGIYPGTFDPITFGHIDIIKRACTLVDELVIGVARSVQKSTIFSAELRAEMIQREMHVLECKSVVKVEVFDGLLTAFAKQKKALMIIRGLRAVTDFDYEFQMSWINYKLTPGIETVFLPAAEETQFISSSFVKEVARLGGDVSVFVPHNVHEHLRDFYNNSSAK

SEQ ID NO: 42993 - DNA, 486 bp, Neorickettsia sennetsu str. Miyayama
  CDS (1)..(486): transl_table=11
atgaggatcggagtatacgctggaacatttgatccagtaacactaggtcacttagatataataaagaaggcactcttagtggtggacaagcttataatagctgttgcggagtgtacatcaaaagctccgacattttcaagtgaaaagagaaagagcttcattcaaaattctatagcagaaattaaaggaaaacttgagataaaaactttcaaaggtcttttagttgattttgttaggcaagaaaaaggtaacaccatagtacgaggcctaagagccgtatcagacttcgaatatgagttccaaatgagttgggtaaatcataaattggacgatagaataataacaatattccttccagcctcacacgaaacacaatttctctcatcaacttttgtcaaacaagtagcaatccttggaggagacctttctcaatttttaccgcatcaaataataaatgatgtaagatcacatctatttaaacaataa

SEQ ID NO: 42994 - protein, 161 aa, Neorickettsia sennetsu str. Miyayama
MRIGVYAGTFDPVTLGHLDIIKKALLVVDKLIIAVAECTSKAPTFSSEKRKSFIQNSIAEIKGKLEIKTFKGLLVDFVRQEKGNTIVRGLRAVSDFEYEFQMSWVNHKLDDRIITIFLPASHETQFLSSTFVKQVAILGGDLSQFLPHQIINDVRSHLFKQ

SEQ ID NO: 42995 - DNA, 498 bp, Ehrlichia chaffeensis str. Arkansas
  CDS (1)..(498): transl_table=11
gtgaaaataggcatatatcctggtacttttgatcctattacttttggccatattgatattataaagcgagcttataatttggttgataagttagtaataggtgttgctagaagttgtacaaaaaaaactattttttctgctgaagttcgtgcggaacttatacagcatgagataaaattgctaggtatggcagtaaatactgtaatttttgatggattattggtatattttgctaaagaaaataatgcatctgttataattaggggattaagagctgtatctgattttgattatgaatttcaaatgagttgggtaaattataaacttacttctcagattgaaactatctttttaccagcttcagaagatactcaatttatttcttcaagttttgtcaaagaaatagcacgattaaatggagatgtaagtgtttttgtgcctgtgaatgtacaagaatgtttgaaaaatttctatcaaaagtctaatgttaatggttaa

SEQ ID NO: 42996 - protein, 165 aa, Ehrlichia chaffeensis str. Arkansas
MKIGIYPGTFDPITFGHIDIIKRAYNLVDKLVIGVARSCTKKTIFSAEVRAELIQHEIKLLGMAVNTVIFDGLLVYFAKENNASVIIRGLRAVSDFDYEFQMSWVNYKLTSQIETIFLPASEDTQFISSSFVKEIARLNGDVSVFVPVNVQECLKNFYQKSNVNG

SEQ ID NO: 42997 - DNA, 546 bp, Saccharophagus degradans 2-40
  CDS (1)..(546): transl_table=11
atgcgagataacgctcctagagaacaggctcccactatgaaacgcgtggtttacccaggtactttcgaccccattaccaatggacatatcgatttagtcgagcgtgcggcgcacctttttgactatgtcgttgtcgccattgccgaaagccgcaaaaaaaacccgctgtttactatgagcgaacgggttgcccttaccgaagatgtgctaagccatttgcccaacatagaagtgtgcggctttgactgcctattgaaagacttagtagaagagaagcaagcctacggagttgtgcgggggttgcgcgcagtgtcggattttgaatacgaattccaattggccaatatgaatcgcgctttggcaccggcaatggaaagcttatttttaacgccagccgaacacctctcttatatttcatctacccttgtgcgcgaaattgcgtcacttggcggcgatgtaactaaatttgtgcccaaacaagttaaagaagcgctcgatcaaaagtacatatctctgggcatagtaaaaacagataaagaaagttaa

SEQ ID NO: 42998 - protein, 181 aa, Saccharophagus degradans 2-40
MRDNAPREQAPTMKRVVYPGTFDPITNGHIDLVERAAHLFDYVVVAIAESRKKNPLFTMSERVALTEDVLSHLPNIEVCGFDCLLKDLVEEKQAYGVVRGLRAVSDFEYEFQLANMNRALAPAMESLFLTPAEHLSYISSTLVREIASLGGDVTKFVPKQVKEALDQKYISLGIVKTDKES

SEQ ID NO: 42999 - DNA, 483 bp, Methylobacillus flagellatus KT
  CDS (1)..(483): transl_table=11
ttgagtcagctgaaagtcgtctacccaggcacctttgatccgatcacccgcggtcacgaagatattgtgcggcgtgccgccggcttgtttgatcatgttgtcgtggcggttgccaaaagcccggggaaacatcccatgtttacactggatgaacgcgtggacctggcttccagcatcctgtccgattgcccgaatgtcgaggtgctggggttttctggcctgttgatgcattttgtgcgtgagcagggtgcacgcgccgtagtgcgcgggctgagggcggtgtctgatttcgagtatgaatttcagctggcaggcatgaaccgccagctattccccgagatggaaaccattttcctcaccccagctgagcagcacatgttcgtctcggccagcctggtacgtgagattgcccagctcaagggcgacatcagccagttcgtctcgcccctggtgcaggaacgcattacgctcaagctggcttga

SEQ ID NO: 43000 - protein, 160 aa, Methylobacillus flagellatus KT
MSQLKVVYPGTFDPITRGHEDIVRRAAGLFDHVVVAVAKSPGKHPMFTLDERVDLASSILSDCPNVEVLGFSGLLMHFVREQGARAVVRGLRAVSDFEYEFQLAGMNRQLFPEMETIFLTPAEQHMFVSASLVREIAQLKGDISQFVSPLVQERITLKLA

SEQ ID NO: 43001 - DNA, 516 bp, Burkholderia xenovorans LB400
  CDS (1)..(516): transl_table=11
atggtagtcgccgtgtacccgggcacgttcgatccgctgacacgcggtcacgaagacctcgttaggcgcgcgtcgagcatcttcgacacgctggtggtgggcgttgccgacagccgcaacaagaaaccatttttcacactcgaggagcgcctcgacatcgctcatgaggtgcttgggcactacccgaacgtccaggtcatgagtttcaaggggctgctgaaggatttcgtacgcagcaataacgcacgggtgatcgtgcgtggactgcgagccgtgtcggacttcgaatatgagttccagatggccggcatgaatcgctatctgctgcccgacgtcgaaaccatgttcatgacgccgtccgatcaataccagttcatttcgggcacgatcgtgcgcgagattgcgcagttgggcggcgacgtcagcaagttcgtgttcccgtcggtcgagcaatggctgaaggagaaggttgccgcgctggatccggccaacggtgcttcggcggcgcaaccgtaa

SEQ ID NO: 43002 - protein, 171 aa, Burkholderia xenovorans LB400
MVVAVYPGTFDPLTRGHEDLVRRASSIFDTLVVGVADSRNKKPFFTLEERLDIAHEVLGHYPNVQVMSFKGLLKDFVRSNNARVIVRGLRAVSDFEYEFQMAGMNRYLLPDVETMFMTPSDQYQFISGTIVREIAQLGGDVSKFVFPSVEQWLKEKVAALDPANGASAAQP

SEQ ID NO: 43003 - DNA, 486 bp, Ralstonia metallidurans CH34
  CDS (1)..(486): transl_table=11
atggtcgtcgccgtctatcccggtacattcgatcccatgacccggggacacgaggatctcgtccgccgtgcgtcgaatatctttgacgaactcgtggtcggcgtggcgcatagccccaacaagcggccgttcttctcgctcgaggagcgtatcggtatcgcgcgcgaggtgcttggccactacccgaatgtgcgtgtggagggcttttcgggacttctcaaggacttcgtccgcaagaacaatgcgcgcgtgatcgtgcgcggcctgcgcgccgtctccgacttcgagtacgagttccagatggcgggcatgaaccgctacctgctgccggacgtcgaaacgatgttcctgaccccttcggaccagtatcagttcatttcgggcacgttcgtgcgtgaaatcgcggtgctgggtggcgacgtcagcaagttcgtcttcccctccgtggagcgctggcttcaggagaagatcggcaaagccgaatag

SEQ ID NO: 43004 - protein, 161 aa, Ralstonia metallidurans CH34
MVVAVYPGTFDPMTRGHEDLVRRASNIFDELVVGVAHSPNKRPFFSLEERIGIAREVLGHYPNVRVEGFSGLLKDFVRKNNARVIVRGLRAVSDFEYEFQMAGMNRYLLPDVETMFLTPSDQYQFISGTFVREIAVLGGDVSKFVFPSVERWLQEKIGKAE

SEQ ID NO: 43005 - DNA, 504 bp, Acidobacteria bacterium Ellin345
  CDS (1)..(504): transl_table=11
ttgagcgagcctgtgaagcaagtcatcggcatctatcccggatctttcgatccggtcacgaacgggcatctcgacctgattcatcgaggggcaaagattttcgatgagttagtggtcgcgatcctccgcaatccggagaaggacccgctgttcacggttccggagcgcagagagatgttgcaagagatgactaagaacttgccgaatgtgcgggtggacgagtttcagggcctgatggtggattacgcacgcagccagggcgctgcggcagtgctgcgggggatccgggcgatcagcgattatgagtacgagttccagatggcgctgatgaaccggaagctggattcgaccctggagacgattttcatgatgccggccgagaagtattcgtacttgagctcgcggctggtgcgggaagtggcgcggcttggcggttcggtcgacggcctggtgccggagatggtggtgcagaagttggtgttgaaggtaaagggtacgaagtaa

SEQ ID NO: 43006 - protein, 167 aa, Acidobacteria bacterium Ellin345
MSEPVKQVIGIYPGSFDPVTNGHLDLIHRGAKIFDELVVAILRNPEKDPLFTVPERREMLQEMTKNLPNVRVDEFQGLMVDYARSQGAAAVLRGIRAISDYEYEFQMALMNRKLDSTLETIFMMPAEKYSYLSSRLVREVARLGGSVDGLVPEMVVQKLVLKVKGTK

SEQ ID NO: 43007 - DNA, 483 bp, Myxococcus xanthus DK 1622
  CDS (1)..(483): transl_table=11
atgctggtcgccatctatcctggttcttttgatccgctcaccaacgggcacctgagcctcattcagcgcagcctgaagatgttcgatcggctcatcgtggccatcgcggtgaacccgaagaagacaccgctcttctccgaagaggagcggctcacgttgattcgagaggccgtccaggacgaccgggtggaggtcgacgccttccacggtctgctggtggactacgtgcggcgccgcaacgcgggcgtcatcgttcgcgggctgcgggcggtgtcggacttcgaatacgagttccagctcgcgaacatgaaccgcaagctggcacccgacgtggagaccgtcttcatgatgacgggggaggactacttctacatctcctccaacctcgtccgggaggtggcctccttcggtggggacgtcaccgggctggtgccgcccaacgtgcacgaaggtttgaaggccaagttcgctggacggaagtag

SEQ ID NO: 43008 - protein, 160 aa, Myxococcus xanthus DK 1622
MLVAIYPGSFDPLTNGHLSLIQRSLKMFDRLIVAIAVNPKKTPLFSEEERLTLIREAVQDDRVEVDAFHGLLVDYVRRRNAGVIVRGLRAVSDFEYEFQLANMNRKLAPDVETVFMMTGEDYFYISSNLVREVASFGGDVTGLVPPNVHEGLKAKFAGRK

SEQ ID NO: 43009 - DNA, 501 bp, Mesorhizobium sp. BNC1
  CDS (1)..(501): transl_table=11
atgactgatcgcaccgccttttatgccggctccttcgatccgcttaccaacggccacctcgacgttctgaagggggcgttggaacttgctgataccgtggtgatcggcatcggcattcacccgggcaaaaagccgctcttttcgtatggcgagcgcgttgccctgatcgagcgctcggccaaggatgagctgggcgccgatggcggccgcatcaaggtggtggctttcgataatctggtcatcgatgctgcgcgcgtccacggtgcttcgatcatgatccgcggcctgcgtgacggcacggacctcgactacgagatgcagatggcgggcatgaaccagaccatggcgccggagctgctcacggtttttctgccggcgagcccatcggtccgcaccgtcacggctacgctcgtgcggcagatcgcatccatgggcggcaatgtcgcgcctttcgtgccggccgtcgtggcggcggccctgaaagaaaaattttcagcctaa

SEQ ID NO: 43010 - protein, 166 aa, Mesorhizobium sp. BNC1
MTDRTAFYAGSFDPLTNGHLDVLKGALELADTVVIGIGIHPGKKPLFSYGERVALIERSAKDELGADGGRIKVVAFDNLVIDAARVHGASIMIRGLRDGTDLDYEMQMAGMNQTMAPELLTVFLPASPSVRTVTATLVRQIASMGGNVAPFVPAVVAAALKEKFSA

SEQ ID NO: 43011 - DNA, 453 bp, Cytophaga hutchinsonii ATCC 33406
  CDS (1)..(453): transl_table=11
atgagtaaaattgcaatctttcccggttcattcgacccttttaccaaaggccatgaagacattgtacgcagaagcctgccgctgtttgacaaggtgattattgcgattggtaacaacgcacaaaaaaacagatattttgagatcgattacattattccaaaaatcgaaagctgttttgagaaaacagataacgttgaagtaaaagtttttaaaggattaacggcagaatttgccaaagaaagcggcgcacaatttttaatcagaggtttgcgtaacaccaccgattttgaatacgagaacagcatctcgcaagccaataaatatctctggaaagatctggaaaccgtatttatgattacgagtccccacctggcttatatcagctcaagccttatccgcgacattcataaatacgatggagatgtaagtggttttttaccttataagatctga

SEQ ID NO: 43012 - protein, 150 aa, Cytophaga hutchinsonii ATCC 33406
MSKIAIFPGSFDPFTKGHEDIVRRSLPLFDKVIIAIGNNAQKNRYFEIDYIIPKIESCFEKTDNVEVKVFKGLTAEFAKESGAQFLIRGLRNTTDFEYENSISQANKYLWKDLETVFMITSPHLAYISSSLIRDIHKYDGDVSGFLPYKI

SEQ ID NO: 43013 - DNA, 507 bp, Trichodesmium erythraeum IMS101
  CDS (1)..(507): transl_table=11
gtgattgcaatttatccaggcagtttcgaccccattaccttaggtcatatagatattatagaaagaggctgcaacctgtttgaaaaagtaattgtagctgtcctgcgaaatcaaagtaagacctctttatttactattgagcagcgtttgaatcaaatttgtcattccacaaaacacctgcttaatgtagaggtagccagttttgatggtttagcggtaaactatgcaaaaatgcaacaggctaaagtcctaattcgaggtctacgagttctttcagattttgaaaaagaattacagatggcccatactaataaaaccttgtcacctgaaatagagacagtttttttagctacctctaatgaatatagttttttaagtagtagtgtagttaaagaaattgctgtttttggtggctcagtagatcatctcgttccccagcacattgctattgatatttataaatgttacgacaaaactcagccaaagccaatattgaaccagaggtaa

SEQ ID NO: 43014 - protein, 168 aa, Trichodesmium erythraeum IMS101
MIAIYPGSFDPITLGHIDIIERGCNLFEKVIVAVLRNQSKTSLFTIEQRLNQICHSTKHLLNVEVASFDGLAVNYAKMQQAKVLIRGLRVLSDFEKELQMAHTNKTLSPEIETVFLATSNEYSFLSSSVVKEIAVFGGSVDHLVPQHIAIDIYKCYDKTQPKPILNQR

SEQ ID NO: 43015 - DNA, 492 bp, Shewanella sp. MR-4
  CDS (1)..(492): transl_table=11
gtgcacacaagagcgatttatcctgggaccttcgatcccattaccaatggtcatgccgatttgattgagcgtgcggctaagttgtttaagcatgtgattattggcattgcggccaatccatctaagcagccaaggtttactcttgaggagcgcgttgagctagtaaaccgcgtcacggcccatttggataatgtggaagtggttggtttttcgggtctgctggtggattttgccaaggaacagcgtgcgagcgtgctggtgcgtggtttgcgtgcggtttccgactttgagtatgaattccaattggccaacatgaatcgcagattaagccctgatcttgagagcgtgtttttaacaccggctgaagaaaactcctttatttcttccaccttagtgaaggaagtcgcgctgcatggcggcgatgtgagtcaatttgtacaccctgaagtggcaagtgcattggcggcaaaacttaatctcgcaaaagcctga

SEQ ID NO: 43016 - protein, 163 aa, Shewanella sp. MR-4
MHTRAIYPGTFDPITNGHADLIERAAKLFKHVIIGIAANPSKQPRFTLEERVELVNRVTAHLDNVEVVGFSGLLVDFAKEQRASVLVRGLRAVSDFEYEFQLANMNRRLSPDLESVFLTPAEENSFISSTLVKEVALHGGDVSQFVHPEVASALAAKLNLAKA

SEQ ID NO: 43017 - DNA, 525 bp, Alkalilimnicola ehrlichei MLHE-1
  CDS (1)..(525): transl_table=11
atggccatagtcgccgtctacccgggtactttcgaccctctgaccaacggccatgccgatctggtgcagcgcagctgccggctgttcgatcggctcatcgttgccgtggccgcctatcccagcccgagcaaacgcccggccttcaccctggacgagcgcctggcgctggcgagggaagtgctcaaggacatgccgggggtcgaggtggaggccttcgacaccttgttggtggacttcgtgcgtgcgcgaggggccacggtgatcctgcgtggactgcgggcggtctccgatttcgagcacgagttccagttggccagcatgaaccggcagctcatcgaggaggtggagaccgtcttcctgacccccgccgagcagcacgcctacatctcgtcctcgctggtgcgggaggtcgcggccctgggtggggatgtcacccgtttcgtgccgcccgttgtcgcccgggccctggcccgacgctacagcgggccgaaccgtgacggcgatggcgatggccagggcggttga

SEQ ID NO: 43018 - protein, 174 aa, Alkalilimnicola ehrlichei MLHE-1
MAIVAVYPGTFDPLTNGHADLVQRSCRLFDRLIVAVAAYPSPSKRPAFTLDERLALAREVLKDMPGVEVEAFDTLLVDFVRARGATVILRGLRAVSDFEHEFQLASMNRQLIEEVETVFLTPAEQHAYISSSLVREVAALGGDVTRFVPPVVARALARRYSGPNRDGDGDGQGG

SEQ ID NO: 43019 - DNA, 495 bp, Rhizobium leguminosarum bv. viciae 3841
  CDS (1)..(495): transl_table=11
atgacgacagctttctatccggggtccttcgacccgatcaccaatgggcatgtggatgttctggtccaggcgctcaacgtcgccgaaaaggtgatcgtcgcgatcggcatccatcccggcaaggcgccgctcttttccttcgaagagagggctgagctgatccgccgttctctggctgaagcgctgcccggcaagaccggcgacatatcagtcgtcgccttcgacaatctggtcgtcgatgccgcccgcactcatggcgccacgctgttgatccgcggccttcgcgacggcaccgatctcgattacgaaatgcagatggccggcatgaaccggacgatggcgcccgatatccagaccatctttttgccggcgggcacggcctcgcggcccattaccgccacattggtccgccagatcgccgccatgggcggcgatgtcagcgctttcgtgccggccgccgtcttgcaagccctcacatccaagcgcccaaactag

SEQ ID NO: 43020 - protein, 164 aa, Rhizobium leguminosarum bv. viciae 3841
MTTAFYPGSFDPITNGHVDVLVQALNVAEKVIVAIGIHPGKAPLFSFEERAELIRRSLAEALPGKTGDISVVAFDNLVVDAARTHGATLLIRGLRDGTDLDYEMQMAGMNRTMAPDIQTIFLPAGTASRPITATLVRQIAAMGGDVSAFVPAAVLQALTSKRPN

SEQ ID NO: 43021 - DNA, 477 bp, Pediococcus pentosaceus ATCC 25745
  CDS (1)..(477): transl_table=11
atgacaaaggctctttatgttggaagttttgacccaattactaatggccatctagatattattaaacgtgctgctaaaatttttgatgaattaacggtggtagtggcgattaacaccaacaaatcggctttatttacaccacaggaacgcgtgaacttaattacgcaagtgactagagaccttgaaaatgttgcttgtaaatcggtaacaggattaacggctgaaacttttacacaggaaaaagcagatgttttggttcgaggcgttcgcaatggggaagatttaaactttgaaattcaggtggctggaatgaatcaatatttaaatcaagaagttgagacggtatttataccagctaattctaagtgggaatttacctcgtctagtttaattaaagaagttgtaaaaatgggcggaagcattaaaggcctagtccctgaaactgtagaagtattattaaaatcaagactaaaatga

SEQ ID NO: 43022 - protein, 158 aa, Pediococcus pentosaceus ATCC 25745
MTKALYVGSFDPITNGHLDIIKRAAKIFDELTVVVAINTNKSALFTPQERVNLITQVTRDLENVACKSVTGLTAETFTQEKADVLVRGVRNGEDLNFEIQVAGMNQYLNQEVETVFIPANSKWEFTSSSLIKEVVKMGGSIKGLVPETVEVLLKSRLK

SEQ ID NO: 43023 - DNA, 474 bp, Oenococcus oeni PSU-1
  CDS (1)..(474): transl_table=11
atggtaaaagctgtttttccggggtctttcgatcctttaacctttggccatttggatgttatcagccgttcggcgcttctttttgatcaagtgatcgtggctgttggcattaatacaagtaaaacagcaatgtttacgactgaagaaaaaataactttgatctccaacaacactaaaaatttgaagaacgtttctgtattaccgatgcctgatttaactttcaaatttgtctcatcggtcggagcagatgtaattgttcggggaatcagaaatgttagggactatgaatatgaacgcgatatcgcggaaatcaatcatcgtcttggaaatgttgatacagttttgttgccatcgaaggctgtttatcaagacatttcttcttcaaatttaaaagaagtagcaaaattcggagctgatattagtcattttgtgcccgaaaatgttataaaactgataaagttaaaaactaaatga

SEQ ID NO: 43024 - protein, 157 aa, Oenococcus oeni PSU-1
MVKAVFPGSFDPLTFGHLDVISRSALLFDQVIVAVGINTSKTAMFTTEEKITLISNNTKNLKNVSVLPMPDLTFKFVSSVGADVIVRGIRNVRDYEYERDIAEINHRLGNVDTVLLPSKAVYQDISSSNLKEVAKFGADISHFVPENVIKLIKLKTK

SEQ ID NO: 43025 - DNA, 495 bp, Magnetococcus sp. MC-1
  CDS (1)..(495): transl_table=11
atgacccaaagacgcaccgccatctatcctggtacctttgaccccgttactttgggccatgtggatattattcgccgtgccagtaagctgtttgatcggctggtggtgggggtggcggtgaatatgcgcaaacagccgctgtttgcggtggaagagcgggtgaggctgttggaacagagcttggccgatcttcataatgtgacggtactgcctatggatggcctgttggtgcgctcggcccgtcaggtgggggcgtgtgccatcgtgcggggattgcgggttgtgaccgattttgattatgaatttcagatgggtaccatgaaccgcaaactggcacctgatattgagacggtgtttttaatggcggacgatatcaatacttttctctcatccagcatggttaaggaggtcgccattatggggggagatattaccccctttgtgcctgctgtggtggctgaaccgttgcggcaagccctgttgcagcgtgcctag

SEQ ID NO: 43026 - protein, 164 aa, Magnetococcus sp. MC-1
MTQRRTAIYPGTFDPVTLGHVDIIRRASKLFDRLVVGVAVNMRKQPLFAVEERVRLLEQSLADLHNVTVLPMDGLLVRSARQVGACAIVRGLRVVTDFDYEFQMGTMNRKLAPDIETVFLMADDINTFLSSSMVKEVAIMGGDITPFVPAVVAEPLRQALLQRA

SEQ ID NO: 43027 - DNA, 492 bp, Shewanella sp. ANA-3
  CDS (1)..(492): transl_table=11
gtgcatacaagagcgatttatcctgggacattcgatcccattaccaatggtcatgccgatttgattgagcgtgcggctaagttgtttaagcatgtgattattggcattgctgccaatccatctaagcagccaaggtttacccttgaggagcgcgttgagctggtaaaccgcgtcacagcccatttggataatgtggaagtggttggtttttcgggcctgctggtcgattttgccaaggaacagcgtgcgagcgtgctggtgcgtggtttgcgtgcggtttccgactttgagtatgaattccaattggccaacatgaatcgcagattaagccctgatcttgagagcgtgtttttaacaccggctgaagaaaactcttttatttcttccaccttagtgaaggaagtcgcgctgcatggcggcgatgtgagtcaatttgtacaccctgaggtggcaagcgcgttgaccgccaagcttaacctcgcaaaagcctga

SEQ ID NO: 43028 - protein, 163 aa, Shewanella sp. ANA-3
MHTRAIYPGTFDPITNGHADLIERAAKLFKHVIIGIAANPSKQPRFTLEERVELVNRVTAHLDNVEVVGFSGLLVDFAKEQRASVLVRGLRAVSDFEYEFQLANMNRRLSPDLESVFLTPAEENSFISSTLVKEVALHGGDVSQFVHPEVASALTAKLNLAKA

SEQ ID NO: 43029 - DNA, 492 bp, Azoarcus sp. BH72
  CDS (1)..(492): transl_table=11
atgagggatggggtcgcgatctacccggggaccttcgatcccttcacccgcgggcacgaggacctcgtacgacgggcctcgctgctgttcgatcaggtcgtggtcggcgtggccgagagccgtggcaaggcgccgatcttcacgctcgaagaacgcgtggagatcgcacgcgaggtcgtcaaaccctttccgaatgtccgcgtcgcgggcttcgacgggctgctgatggatttcctgcgcgcccagaatggccgggttatcctgcgcggcctgcgggcggtgtcggacttcgagtacgagttccagatggcgggcatgaaccggaaactttttccggacgtcgaaaccgtattcctcacgcccgcggaggagtacatgttcatctctgcgacgatggtgagggaaatcgcccgcctcggcggcgacgtcagcaagttcgttcaaccgagcgtactgacgcaactgcagcagaaagtaagttcaaagcgatag

SEQ ID NO: 43030 - protein, 163 aa, Azoarcus sp. BH72
MRDGVAIYPGTFDPFTRGHEDLVRRASLLFDQVVVGVAESRGKAPIFTLEERVEIAREVVKPFPNVRVAGFDGLLMDFLRAQNGRVILRGLRAVSDFEYEFQMAGMNRKLFPDVETVFLTPAEEYMFISATMVREIARLGGDVSKFVQPSVLTQLQQKVSSKR

SEQ ID NO: 43031 - DNA, 498 bp, Acidovorax sp. JS42
  CDS (1)..(498): transl_table=11
atggcgcatgtgctcgccgtttatcccggaaccttcgaccccatcacgctggggcatgaggatctggtgcgccgcgcggcaagactgttcgaccgcgtaatcgtggccgtggccattgcccaccacaagaaaaccctgttcagcctggacgagcgcatggaaatggcgcgccaggcgcttgccgactgtccgcaggtgcaggtcgagtccttcgaggggctggtgacggagttcactgccgcgcgcggcggcacggccatggtgcgcgggctgcgctcgggcacggacttcgattacgagttccagcttgccggcatgaaccgcgcgctggtgcccggcgtcgagacggtgtttctcacacccgcgagccagtaccagttcatcagcagcacgctggtgcgcgagatcggcacgctgggcggcgacgtggcgcagtttgtctcgcccggcgtacacgagcgcctcttgcacaagctgggccgcaccgccgcggcgtga

SEQ ID NO: 43032 - protein, 165 aa, Acidovorax sp. JS42
MAHVLAVYPGTFDPITLGHEDLVRRAARLFDRVIVAVAIAHHKKTLFSLDERMEMARQALADCPQVQVESFEGLVTEFTAARGGTAMVRGLRSGTDFDYEFQLAGMNRALVPGVETVFLTPASQYQFISSTLVREIGTLGGDVAQFVSPGVHERLLHKLGRTAAA

SEQ ID NO: 43033 - DNA, 477 bp, Haemophilus somnus 2336
  CDS (1)..(477): transl_table=11
atgacaacggttatttatcctggcacttttgatcctattaccaatggacatatggatattattcagcgtagtgcggtcttatttagcaaagttattgttgctgtggcaaaaaacccgagtaaacaacctttatttaatttagctgagcgagttgaattagttcaattgtctgttgttcatttagacaatgtagaggtaattgggtttgatgatttattggcaaatgtggttaaagcaagacaaattgatgcgattattcgaggggtacgcacgacaatggattttgaatatgaatcacaacttgcacatttaaatcgtttgttgacgaatggtgtagaaagtttatttttacccccgaccgagcagtggtcttatgtttcttcaactattgtacgagatatttttttacatcaaggtgatgtgtcccgattagttcctgcagcggtattacgagctttagaaaagcgggctaaataa

SEQ ID NO: 43034 - protein, 158 aa, Haemophilus somnus 2336
MTTVIYPGTFDPITNGHMDIIQRSAVLFSKVIVAVAKNPSKQPLFNLAERVELVQLSVVHLDNVEVIGFDDLLANVVKARQIDAIIRGVRTTMDFEYESQLAHLNRLLTNGVESLFLPPTEQWSYVSSTIVRDIFLHQGDVSRLVPAAVLRALEKRAK

SEQ ID NO: 43035 - DNA, 483 bp, Listeria monocytogenes str. 4b H7858
  CDS (1)..(483): transl_table=11
atgggtgacaaaattgccgttattcccgggacatttgatccgattacgaatgggcacttagacattattgaacgggcagcgaagatttttgatgtgctgtatgtttccgttttaaacaactcatccaaaaaaccacttttcacgatagaagagcggatggaaatgattagacaagtaaccgctcatttgccaaatgttcaagtggaaagtgcgagcggattgactgttgattatgctgctacgcgcggggctactgcaattgtcagagggcttcgagcggtgagtgattttgaatacgagatgcaaattgcttcgatgaaccgaacgctcaatgcggaaatcgaaactttttttgtcatgactaatacgaaatattcttttttaagttccagtatggtaaaagaagtggcgcagtatcaaggtgatatcagcgaacttgttcctgaaatagtgaacgaacaagtacaagcaaaatttaagtaa

SEQ ID NO: 43036 - protein, 160 aa, Listeria monocytogenes str. 4b H7858
MGDKIAVIPGTFDPITNGHLDIIERAAKIFDVLYVSVLNNSSKKPLFTIEERMEMIRQVTAHLPNVQVESASGLTVDYAATRGATAIVRGLRAVSDFEYEMQIASMNRTLNAEIETFFVMTNTKYSFLSSSMVKEVAQYQGDISELVPEIVNEQVQAKFK

SEQ ID NO: 43037 - DNA, 471 bp, Haemophilus influenzae R2846
  CDS (1)..(471): transl_table=11
atgacgagcgtgatttatcctggcacttttgacccgattacaaacggtcatttagacattattgaaagaagtgcggtaatttttcctcgtgttttagtggcggtggcaaatagtccaagcaaaaaaacgctattttctttggaggaacgcgtagaacttgttcgtcaatctgttgcacatttatccaatgtggaagtgtttggcttttctgatttgttggcaaatgtgattaaacagcacaatatttctgccattattcgcggcgtacgcacaacaacagattttgaatatgaactgcaattggcggcactgaatcgtttactcacaaaaggcacagatagtctgtttttcccaccagtagaaaaatgggcgtttgtttcttcctccattgtgcgtgaaatttatttgcacggcggcgatgtggcagagctagtgcctgtgtctgtgttcaatgcgttaaaagcacgatga

SEQ ID NO: 43038 - protein, 156 aa, Haemophilus influenzae R2846
MTSVIYPGTFDPITNGHLDIIERSAVIFPRVLVAVANSPSKKTLFSLEERVELVRQSVAHLSNVEVFGFSDLLANVIKQHNISAIIRGVRTTTDFEYELQLAALNRLLTKGTDSLFFPPVEKWAFVSSSIVREIYLHGGDVAELVPVSVFNALKAR

SEQ ID NO: 43039 - DNA, 480 bp, Crocosphaera watsonii WH 8501
  CDS (1)..(480): transl_table=11
atgattgctatttatccaggaagttttgatcccattacccttggtcatcttgatattattgagcgaggggttatattgtttgaaaaagtgattgtgacgatcatgtataatcccagtaaaaaacctttgttttctgtggaaaaaaggattgaacagattactgaatgtacgcaacatttacccacggttgaggtggatagttatacgggtttaactgtagattatgccaagttacgcaatgctcaggtattgttacggggtttacgggtgttgtctgattttgagaaagagttacaaatggctcatactaataaaactctagctcaagaggtgcaaactgttttcttggctaccagtaaagagtatagttttttgagtagtagcaccgttaaagaaattgctcagtttggtggctctatctctcatttggttcctgaaaatgtatatcaggatctcctacactattataacataaattag

SEQ ID NO: 43040 - protein, 159 aa, Crocosphaera watsonii WH 8501
MIAIYPGSFDPITLGHLDIIERGVILFEKVIVTIMYNPSKKPLFSVEKRIEQITECTQHLPTVEVDSYTGLTVDYAKLRNAQVLLRGLRVLSDFEKELQMAHTNKTLAQEVQTVFLATSKEYSFLSSSTVKEIAQFGGSISHLVPENVYQDLLHYYNIN

SEQ ID NO: 43041 - DNA, 489 bp, Xylella fastidiosa Ann-1
  CDS (1)..(489): transl_table=11
atgagcgtggttaatcgccgcatcgccgtctatcctggcaccttcgatccgatcactaatggtcacattgatttagtgagtcgtgctgctccgctgtttgagtcgattgtggttggtgttgcgcagagtccatccaagggaccttctctgccgttgcagcagcgtgtgactctggcgcgtgaggcgttgtgccagcatgaaaatgtgcaggtcattgggttcgatacattgttagcgcattttgtgcgtcacgttggcgcgggtgtgttgctgcgcggcttgcgtgcggtttcggatttcgagtatgagttccagatggcgagtatgaatcgtcatctgatccctgaagttgagacattgtttctgactccggcggagcagcatagttttatttcgtcttcgctggtgcgtgagattgcgcggcttggcggagatgtttccggctttgcacctgcggcggtcgttgcggcgttacgtcagaatctttag

SEQ ID NO: 43042 - protein, 162 aa, Xylella fastidiosa Ann-1
MSVVNRRIAVYPGTFDPITNGHIDLVSRAAPLFESIVVGVAQSPSKGPSLPLQQRVTLAREALCQHENVQVIGFDTLLAHFVRHVGAGVLLRGLRAVSDFEYEFQMASMNRHLIPEVETLFLTPAEQHSFISSSLVREIARLGGDVSGFAPAAVVAALRQNL

SEQ ID NO: 43043 - DNA, 495 bp, Sulfitobacter sp. EE-36
  CDS (1)..(495): transl_table=11
atgcgcgtaggcctttaccccggcaccttcgaccctattactttgggtcacatcgacatcatccggcgggcggcgacgcttgttgataaactggtgatcggggtcgcgatcaaccgcgacaaggggccattgttcgagctggaagagcgtgtcgcccagatcgaagaggaatgccgcaagctgaaccaggagaccgggacagagatcgtggtgcatcccttcgagaacctgctgatcgattgtgcccatgatgtgggggcacagatgatcatccgcgggctgcgtgccgtggcggatttcgagtacgagtatcagatggtggggatgaaccgtaagctggatgacagcgtcgagacggtcttcttgatggcagaggccgagcatcaggcgattgccagccgtttggtcaaggaaatcgcccggcttggcggggacgtcagcaagtttgtgacgcccgccgtcaatgccgagctgttaaagcgtttttcgcagtaa

SEQ ID NO: 43044 - protein, 164 aa, Sulfitobacter sp. EE-36
MRVGLYPGTFDPITLGHIDIIRRAATLVDKLVIGVAINRDKGPLFELEERVAQIEEECRKLNQETGTEIVVHPFENLLIDCAHDVGAQMIIRGLRAVADFEYEYQMVGMNRKLDDSVETVFLMAEAEHQAIASRLVKEIARLGGDVSKFVTPAVNAELLKRFSQ

SEQ ID NO: 43045 - DNA, 492 bp, Roseovarius nubinhibens ISM
  CDS (1)..(492): transl_table=11
atgcgcatcggtttatatcccggaaccttcgacccgatcactctgggccatatcgacatcatccgccgcgcggcggtcatggtcgaccggctggtgatcggcgtggccatcaaccgcgacaaggggccgctcttcaccctcgaggaacgggtcgacatgatcgaacgcgaatgcgccaagctgagcgaacagaccggcgccgaaatcatcgtgcacccgttcgagaacctgctcatcgactgcgccaaggatgtcggcgcccaggtcatcgtgcgcggcctgcgcgcggtggccgatttcgagtatgagttccagatggtcggcatgaaccgcgccctcgatgacagtgtcgaaacggtgtttctcatggccgacgcgggccatcaggccatcgcctcgaaactggtcaaggaaatcgcccggctcggcggcgatgtgcgcaaattcgtgacccccccggtcaatgcggcgctgcgcgagaaactcggctaa

SEQ ID NO: 43046 - protein, 163 aa, Roseovarius nubinhibens ISM
MRIGLYPGTFDPITLGHIDIIRRAAVMVDRLVIGVAINRDKGPLFTLEERVDMIERECAKLSEQTGAEIIVHPFENLLIDCAKDVGAQVIVRGLRAVADFEYEFQMVGMNRALDDSVETVFLMADAGHQAIASKLVKEIARLGGDVRKFVTPPVNAALREKLG

SEQ ID NO: 43047 - DNA, 495 bp, Oceanicola batsensis HTCC2597
  CDS (1)..(495): transl_table=11
atgcgcaccggactgtatcccggaacgttcgacccgataacgctcggacatcttgatatcatccggcgcgccacggcgctcgtcgaccggctggtgatcggcgtggcgatcaaccgggacaaggggccgctcttcgatctcgaggatcgcgtctcgatgatccagaacgcctgcgaggacatgcaggccgagacgaataccgaaatcgtcgtccacccgttcgagaacctgctgatccactgcgcccacgacgtcggcgcgacgctcatcgtgcgtgggctgcgcgccgtcgcagatttcgaatacgaataccagatggtcggcatgaaccgttcgctcgacagttcggtcgagaccgtcttcctcatggccgacgccaagcgtcaggccatcgcctcgaagctggtcaaggaaatctgccgcctcgacggggatgtcagcaagttcgtgaccccggcggtcaacgataaacttcgggcgaagctcgggaaatga

SEQ ID NO: 43048 - protein, 164 aa, Oceanicola batsensis HTCC2597
MRTGLYPGTFDPITLGHLDIIRRATALVDRLVIGVAINRDKGPLFDLEDRVSMIQNACEDMQAETNTEIVVHPFENLLIHCAHDVGATLIVRGLRAVADFEYEYQMVGMNRSLDSSVETVFLMADAKRQAIASKLVKEICRLDGDVSKFVTPAVNDKLRAKLGK

SEQ ID NO: 43049 - DNA, 483 bp, Pseudoalteromonas tunicata D2
  CDS (1)..(483): transl_table=11
atgaacgtaaaagcaatttacccaggcacttttgatcctataacgaatggccacagcgatttagttgcgcgtgctgccaaaatgttcgatcacgttattttagcaatcgcttttaaccccaacaaaaagccattttttactttagatgagcgagttgcgcttgcaaaaaaagtgctaggacatatcccaaatgttgagattatcggtttttcgggtttgctcgcagatttagccaaacagcaaaatgccaatttattagttcgcgggctacgtgcggtttctgattttgagtttgaattgcaattagccaatatgaaccgcagtttaaaccccgatttagaaagtatatttttaaccccttcggttgaaaactcgtttatctcctcctcattagtcaaagaagttgctttacatcaagggaatatcgacaaatttgttcacccaattgtcgccaaagcattacaggaaagaattaaagcatga

SEQ ID NO: 43050 - protein, 160 aa, Pseudoalteromonas tunicata D2
MNVKAIYPGTFDPITNGHSDLVARAAKMFDHVILAIAFNPNKKPFFTLDERVALAKKVLGHIPNVEIIGFSGLLADLAKQQNANLLVRGLRAVSDFEFELQLANMNRSLNPDLESIFLTPSVENSFISSSLVKEVALHQGNIDKFVHPIVAKALQERIKA

SEQ ID NO: 43051 - DNA, 483 bp, Photobacterium sp. SKA34
  CDS (1)..(483): transl_table=11
atgacaactcgagtaatttaccctggcacttttgatccaattaccaacggtcatttagacttaattgagcgtgcagcagcaatgtttgatcatgtgattgttggtgttgcttttaacccaagtaaaaagccgctatttgatcttaatgaacgcgtagagctagcaggtaaaattaccaaacacttggataatgtagagattgttggtttttcagggctgctggttgattttgctaaagagcacaacgctaacattctagtccgtggtctacgtgcagtatctgattttgaatatgaatttcagctagccaatatgaatcgccgcctgatgcctgagttagaaaccgttttcttaactccagcagaagaaaattcattcatttcttcaaccatagttaaagaagttgcattgcacaaaggtgatgtaagtcagtttgttgatccactgattactgaagcattattagaaaagtttgtaaaatag

SEQ ID NO: 43052 - protein, 160 aa, Photobacterium sp. SKA34
MTTRVIYPGTFDPITNGHLDLIERAAAMFDHVIVGVAFNPSKKPLFDLNERVELAGKITKHLDNVEIVGFSGLLVDFAKEHNANILVRGLRAVSDFEYEFQLANMNRRLMPELETVFLTPAEENSFISSTIVKEVALHKGDVSQFVDPLITEALLEKFVK

SEQ ID NO: 43053 - DNA, 480 bp, Oceanospirillum sp. MED92
  CDS (1)..(480): transl_table=11
atgaatacagccgtatatccaggaacatttgatccgatcaccaatggtcactcggatcttattgaacgcgccgcaaaactttttgacaaagtagtcgttgcgatagcagaaagcccaaagaaacgtccaatgctgccgttagaaacacgcgtcgcattggtagctgaagtgacagctcatcttgataacgttgaaattgtaggctttgattgtctgttagctgagcttttagcgcaacagaacgctaatattattctacgtggcctgcgtgccgtttctgacttcgagtatgaatttcagctcgcagcgatgaaccgacatctggcaccgaacgtagagagtatattcttaacaccggcggaacatctgtcctttgtttcctccacgttaattcgcgaaatatccagtctgggtggtgacgtgagcaagtttgtccacccggccgttaataaggccctgattgagcaccatggccattaa

SEQ ID NO: 43054 - protein, 159 aa, Oceanospirillum sp. MED92
MNTAVYPGTFDPITNGHSDLIERAAKLFDKVVVAIAESPKKRPMLPLETRVALVAEVTAHLDNVEIVGFDCLLAELLAQQNANIILRGLRAVSDFEYEFQLAAMNRHLAPNVESIFLTPAEHLSFVSSTLIREISSLGGDVSKFVHPAVNKALIEHHGH

SEQ ID NO: 43055 - DNA, 453 bp, Flavobacteria bacterium BBFL7
  CDS (1)..(453): transl_table=11
atgaaaagagctgtattcccaggaagttttgacccgattacattaggacactatgacattatagagcgaggtttaggcttatttgatgaaatcatcatagcgataggtgtaaatgcagataagaaatatatgttctcattagatcaacgtaaagaatttatagaaaaagcatttataaaccaacctaaaatcaaggtcatgacttattctgggctgacaatagatttttgtaaagacaataatgccaactttattttacgtggactgcgcaatccaggcgattttgaatttgaaaaagcaattgctcatactaatcgtaaattatcagaaattgaaaccgtttttctattaactagttcaggtaaatcatacatatcatcttctatagttagagatgttataagaaataatggagattacactagtttagtaccagatactgtaaaactatga

SEQ ID NO: 43056 - protein, 150 aa, Flavobacteria bacterium BBFL7
MKRAVFPGSFDPITLGHYDIIERGLGLFDEIIIAIGVNADKKYMFSLDQRKEFIEKAFINQPKIKVMTYSGLTIDFCKDNNANFILRGLRNPGDFEFEKAIAHTNRKLSEIETVFLLTSSGKSYISSSIVRDVIRNNGDYTSLVPDTVKL

SEQ ID NO: 43057 - DNA, 546 bp, delta proteobacterium MLMS-1
  CDS (1)..(546): transl_table=11
atgagcagctatgaacccctgctaaaagaacaaaccagccaacggatcgccgtttatcccggcaccttcgatcccattaccatggggcatctggatatcatcaagcgcggcttgacgctttttgatcggatcatcgtggcgattgccaaaaaccccgacaagcagccgttgttcagcctggccgagcggcggcggatgatcctcgattgctttgaagccgatgaagatcgggtggaggtggacgaggtttccgggttactggtggattacgcctatcggcggggggccagggcgatcatccgggggctgcgggcggtttccgatttcgattacgaattccagctggccctgatgaaccgccggatcgaacgggaagtggaaaccgttttcctgatgaccggtttccgctggatctatatcagctccagcatcatcaaagacgcggcccgccatggcggcgatgtcggcggcctggtgccggaccatgtctgtgaatgcctgcgccagcgcttcatggccaatggtgaggccaatggtaaccgttaa

SEQ ID NO: 43058 - protein, 181 aa, delta proteobacterium MLMS-1
MSSYEPLLKEQTSQRIAVYPGTFDPITMGHLDIIKRGLTLFDRIIVAIAKNPDKQPLFSLAERRRMILDCFEADEDRVEVDEVSGLLVDYAYRRGARAIIRGLRAVSDFDYEFQLALMNRRIEREVETVFLMTGFRWIYISSSIIKDAARHGGDVGGLVPDHVCECLRQRFMANGEANGNR

SEQ ID NO: 43059 - DNA, 504 bp, Rickettsiella grylli
  CDS (1)..(504): transl_table=11
atgaaaaccaaagttatttatccaggtacatttgatccaataacgaatggtcatcttgatttagttcaacgtgcagcacgtctttttgaaacggttattgttgctgtggctaaaaatccacctaaaacaccgttattttcgctgaaagagcgcatgtgtttagcaaaagaagcattaattgacctgaataatgttcacgtagagggttttgatggtttattaacccattatgcgaaagaacagcatgcgcgtatcattttacgtggtctccgtgccgtatcagattttgaatatgaattccaattggccagtatgaaccggaatatgctgcccgatttggaaacgttgtttttaacgcccgctgaacaacattcgtttatttcggctcacttagtgagggaaattgcgagtttaggaggggatattacctcgttcgtaccccgggttgtcgctgaaaccttgcaaacaaaatttaaaccctttcacacaccgaataaaaggtaa

SEQ ID NO: 43060 - protein, 167 aa, Rickettsiella grylli
MKTKVIYPGTFDPITNGHLDLVQRAARLFETVIVAVAKNPPKTPLFSLKERMCLAKEALIDLNNVHVEGFDGLLTHYAKEQHARIILRGLRAVSDFEYEFQLASMNRNMLPDLETLFLTPAEQHSFISAHLVREIASLGGDITSFVPRVVAETLQTKFKPFHTPNKR

SEQ ID NO: 43061 - DNA, 480 bp, Oceanobacter sp. RED65
  CDS (1)..(480): transl_table=11
atgaccagagttatctatccgggtaccttcgatcccattaccaatggccacaccgatctagtgactcgggcctctaagctatttgaccatattgtggttgcagtggcggatagcccgcacaaaaaaccattatttgatctagatactcgctgccaactggcagaagaggtactcggtcacttggataatgtggaaatcgttggcttcaatacactacttgcgcacttcgtacgagaacaaaacgcccaggtgttattacgtggtttacgtgctgtatcggactttgaatatgaattccaattggccaatatgaaccgtgcattggcgccagaagtggaaaccgtgtttctaaccccagacgagcgccactcttatattagctctacattaattcgtgagatcgctcgcttagaaggcgatgtgaagaagtttgtacatcctgctgttgagcaagctctgatccaagcttacgggcactaa

SEQ ID NO: 43062 - protein, 159 aa, Oceanobacter sp. RED65
MTRVIYPGTFDPITNGHTDLVTRASKLFDHIVVAVADSPHKKPLFDLDTRCQLAEEVLGHLDNVEIVGFNTLLAHFVREQNAQVLLRGLRAVSDFEYEFQLANMNRALAPEVETVFLTPDERHSYISSTLIREIARLEGDVKKFVHPAVEQALIQAYGH

SEQ ID NO: 43063 - DNA, 513 bp, Desulfitobacterium hafniense DCB-2
  CDS (1)..(513): transl_table=11
atgcgaaaaggagcaggacaagtgcgaatagcaatttatcccggaactttcgatcccgtgaccaatgggcatttggatatactgaaaagggcgacggaatttttcgatgaagtgatcgttgccgtagctgtagacagcaataaaaccacccttttttccctggaagaacgtattcagctcctggagaccgctgccgaggagctgtcccaggtcaaaatcagaggcttcgaggggctgactgtggagtttgccagacaatgcggagccaatgccatcatccggggcctaagagctatgcaggattttgaatatgaattccaattagccctgatgaacaaaaagctggctgcggatattgaaacgattttcttaatgactcagagcgaattctcgtttatcagttccagctcgattaaatgggccgccagcttaaagggcaacatcagtgaattcgtcccgccccatgtggaaagggctatttacaggaaatatcacccagagattgatgactaa

SEQ ID NO: 43064 - protein, 170 aa, Desulfitobacterium hafniense DCB-2
MRKGAGQVRIAIYPGTFDPVTNGHLDILKRATEFFDEVIVAVAVDSNKTTLFSLEERIQLLETAAEELSQVKIRGFEGLTVEFARQCGANAIIRGLRAMQDFEYEFQLALMNKKLAADIETIFLMTQSEFSFISSSSIKWAASLKGNISEFVPPHVERAIYRKYHPEIDD

SEQ ID NO: 43065 - DNA, 489 bp, Synechococcus sp. RS9916
  CDS (1)..(489): transl_table=11
atgcgcgctctttaccccggcagctttgaccctctcaccctgggccatctcgacctgattgaacgcggttgccagctttttggtgaggtggtggtggcggtgttgcagaacccaggcaaaaccccagccttccccctggagcaaaggcttgagcagatccgcactgcgactgctcacatccaaggggtggaggtgatcagttttgacggcctgaccgtgcagtgcgcacgagagcagcaggccaacctgattcttcgggggctgcgggcgatgagcgacttcgaatacgagctccagatcgcccacaccaatcgatcgctgtctaaagaatttgaaactgtcttcctggcaacgtcagctcaccacagctttttaagcagctcagtcgtgaaagaggttgcccgatttggggggccagtcagccacatggtccctgaggtggtggcgcaggacctcgcgaggctctttaatttgcctttccaagcgtag

SEQ ID NO: 43066 - protein, 162 aa, Synechococcus sp. RS9916
MRALYPGSFDPLTLGHLDLIERGCQLFGEVVVAVLQNPGKTPAFPLEQRLEQIRTATAHIQGVEVISFDGLTVQCAREQQANLILRGLRAMSDFEYELQIAHTNRSLSKEFETVFLATSAHHSFLSSSVVKEVARFGGPVSHMVPEVVAQDLARLFNLPFQA

SEQ ID NO: 43067 - DNA, 492 bp, Alteromonadales bacterium TW-7
  CDS (1)..(492): transl_table=11
atgaacgttactgcaatttaccccggcacttttgatccacttactaatgggcatacagacctaatacagcgtgctgccaaaatgtttgacactgttttggttgctgttgctaataacccaagtaagcagccatgttttaaccttgaagaacgtgtggcgctagcaaacacaatattaagccacttagataacgtaaaagtcattggtttttctggattactggccgatttagcacgcgatcacaatgcacacgtacttattcgcggtataagagcggtgtctgactttgattatgaatttcaattagcaaacatgaatcgccgcctaaaccccgatcttgaaagtgtatttttaacacctgctgaaaaaaattctttcatttcatctactttagttaaagaagtggcgcgtcatcatggcgatgtaagcgaatttgtagaccctattattgtaaaagcactcaaagaaaaagtaggctgcaatactaattaa

SEQ ID NO: 43068 - protein, 163 aa, Alteromonadales bacterium TW-7
MNVTAIYPGTFDPLTNGHTDLIQRAAKMFDTVLVAVANNPSKQPCFNLEERVALANTILSHLDNVKVIGFSGLLADLARDHNAHVLIRGIRAVSDFDYEFQLANMNRRLNPDLESVFLTPAEKNSFISSTLVKEVARHHGDVSEFVDPIIVKALKEKVGCNTN

SEQ ID NO: 43069 - DNA, 480 bp, marine gamma proteobacterium HTCC2143
  CDS (1)..(480): transl_table=11
atgaatacggtgatataccccggcacattcaatcccattactaacggtcatattgatctggtagaaagagcttcaaaactgtttggcaaagtcgtactagctattgcatacagtgagagaaagcagcctatgttttcattggatgaacgcatcgatctatgtcagcaggccttgtcccatctcgataatatcgaggtgtgcggcttcaataatttattggtggaatttgcacaaagcaaaaatagcaatacggtattgagaggcgttagatcgatgaaggatttcgaatatgaaattcaaatggcagatatgaatcgcgccatgacgcccggatttgaaacagtgttcctaaccccgtccgatggactgtcttacatttcgtcaacgttggtgagagaaatttccacgatgggcggtgacgtttcgagctttgtccccgcgatcgttctcgatgccctcaacgagcgcatcaaatcttga

SEQ ID NO: 43070 - protein, 159 aa, marine gamma proteobacterium HTCC2143
MNTVIYPGTFNPITNGHIDLVERASKLFGKVVLAIAYSERKQPMFSLDERIDLCQQALSHLDNIEVCGFNNLLVEFAQSKNSNTVLRGVRSMKDFEYEIQMADMNRAMTPGFETVFLTPSDGLSYISSTLVREISTMGGDVSSFVPAIVLDALNERIKS

SEQ ID NO: 43071 - DNA, 486 bp, marine gamma proteobacterium HTCC2080
  CDS (1)..(486): transl_table=11
atgcgcacacaatctattgtttacccgggaactttcgatccaatcacaaaaggccatattgacttggtcgaacgtgctgcgagactttttgatcgggtagtggtcgcgatagcgcaaagtgaaaagaaagaaccgctgtttgatttagaagagcgtacaacgctgacccgtgaagccctgagccatgtcaacaacttggaggtgtgtagtttcaccggattattgaccgacctggtgaccgagcaagggtccaattgtgtgctgcgtgggttacgggcagtcgctgactttgagtacgagtatcagcttgccaacatgaatcgcgccttaaaacccgattttgaaagtgtgtttctcaccccatcagaaaaccttgcttacatctcatcttccttagtcagggaaattgcttctatggggggcgatatcacgccattcgttgccacaaatgtggctgaagcactgaaaaataaattttcggcctag

SEQ ID NO: 43072 - protein, 161 aa, marine gamma proteobacterium HTCC2080
MRTQSIVYPGTFDPITKGHIDLVERAARLFDRVVVAIAQSEKKEPLFDLEERTTLTREALSHVNNLEVCSFTGLLTDLVTEQGSNCVLRGLRAVADFEYEYQLANMNRALKPDFESVFLTPSENLAYISSSLVREIASMGGDITPFVATNVAEALKNKFSA

SEQ ID NO: 43073 - DNA, 507 bp, Candidatus Desulfococcus oleovorans Hxd3
  CDS (1)..(507): transl_table=11
atgaaaatcgccatctacccgggttcctttgatccggtcaccaacggtcacatcgacatcattcagcggggacgtcacctgtttgacaaaatcatcgtgtcgattcttctcaatcccgggaaaaaagcactcttctcccttgatgaacggctggacatgctgaccgaaagtctgaaggatattgacggtgtggaggtggactcttttgccggcctgctcatcgactatgccgagcggaaaaacgcgaaggccattctccggggcatgcgggccgtatccgactttgagtacgaatttcagatggccctgatgaaccggcggctcaaccgggatattcagacggtgtttttgatgaccggcatgcggtggatttataccagctcttccattatcaaggaggcggccacctttggcggcgacatcagcggcatggtgccggcgatcgtggaaaaaaagctggaagaaaagatcggatacgtcgtcaaccacaaaaaggccgaggactaa

SEQ ID NO: 43074 - protein, 168 aa, Candidatus Desulfococcus oleovorans Hxd3
MKIAIYPGSFDPVTNGHIDIIQRGRHLFDKIIVSILLNPGKKALFSLDERLDMLTESLKDIDGVEVDSFAGLLIDYAERKNAKAILRGMRAVSDFEYEFQMALMNRRLNRDIQTVFLMTGMRWIYTSSSIIKEAATFGGDISGMVPAIVEKKLEEKIGYVVNHKKAED

SEQ ID NO: 43075 - DNA, 480 bp, Pseudomonas putida GB-1
  CDS (1)..(480): transl_table=11
atgaaccgagtgttgtacccgggtactttcgaccccattaccaaaggccatggcgacctggtcgagcgcgcctcgcgcttgttcgaccacgtcatcatcgcggtggcggccagccccaagaaaaacccgctgttcccgctggaacaacgggtggcgctcgcccgtgaggtcaccaagcacctgcccaatgtcgaagtcatcggcttttcttccctgttggcgcatttcgccaaggaacagggcgccaacgtcttcctgcgtggcctgcgtgcggtgtccgacttcgagtacgagttccagttggcgaacatgaaccggcaactggcccccgatgtggagagcctgttcctgacgccatcggaacgttattcgttcatctcctcgaccctggtccgggaaattgcggcgctgggcggtgatatcaccaagttcgtccacccggtggtggccgacgcgctgactgaacgcttcaagaagtaa

SEQ ID NO: 43076 - protein, 159 aa, Pseudomonas putida GB-1
MNRVLYPGTFDPITKGHGDLVERASRLFDHVIIAVAASPKKNPLFPLEQRVALAREVTKHLPNVEVIGFSSLLAHFAKEQGANVFLRGLRAVSDFEYEFQLANMNRQLAPDVESLFLTPSERYSFISSTLVREIAALGGDITKFVHPVVADALTERFKK

SEQ ID NO: 43077 - DNA, 477 bp, Marinobacter sp. ELB17
  CDS (1)..(477): transl_table=11
atgccaaaagttatttacccgggtacgtttgaccccatcacccatggtcatactgacttaattgaacgggctagccggttattcgacgaagtggtggtggcggtggcttataactccaagaaaaagcccttactggagctggaggaacgctgcgaactagtccgccgggccacagcccatgttcccaacgtgacggtcatgggcttcagtaatttgttagcagaatttgtgcgctcgcagaacgccacggtgattttacgtggccttcgggcggtgtcagattttgagtacgaatttcagttggcagacatgaaccgccgcttggcgccggaactggagagcgtgttcctcacgccaaccaatcacctgtcttatatatcatctaccctgatccgcgagattgcgtccttgggcggggatgtatccgaatttgtcgatccggcggtgcaagacgcgttgaaaaacaaattcagctaa

SEQ ID NO: 43078 - protein, 158 aa, Marinobacter sp. ELB17
MPKVIYPGTFDPITHGHTDLIERASRLFDEVVVAVAYNSKKKPLLELEERCELVRRATAHVPNVTVMGFSNLLAEFVRSQNATVILRGLRAVSDFEYEFQLADMNRRLAPELESVFLTPTNHLSYISSTLIREIASLGGDVSEFVDPAVQDALKNKFS

SEQ ID NO: 43079 - DNA, 513 bp, Erythrobacter sp. SD-21
  CDS (1)..(513): transl_table=11
atggctgaacgtaacggcatttatccggggaccttcgaccccatcacgctgggccatgcggatatcatccggcgcggcagcaagctcgtcgaccggctcatcatcggggtcacgacgaacccgtccaagaaccccatgttctcgaccgaggagcgtttcgccatggtcgagcgcgagatcgcggccatggggctgaagaatgtcgaagtcgtcggcttcaacgccctgctggtgaagtttgcccagaaaatgggcgcgagcgttctcattcgcggcctgcgcgcggtggccgatttcgaatacgagtaccagatggccgggatgaaccagcagctcgacgacgatatcgagacggtgttcctgatggccgacgtttcgctccagccgatcgcttcgcggctggtgaaggaaatcgctctcttcggcggcgatatctcgcccttcgtcagcaaggacgtttgcgaggatgtgatcgcaagggtggaggaaaagggccgcctcggggattactga

SEQ ID NO: 43080 - protein, 170 aa, Erythrobacter sp. SD-21
MAERNGIYPGTFDPITLGHADIIRRGSKLVDRLIIGVTTNPSKNPMFSTEERFAMVEREIAAMGLKNVEVVGFNALLVKFAQKMGASVLIRGLRAVADFEYEYQMAGMNQQLDDDIETVFLMADVSLQPIASRLVKEIALFGGDISPFVSKDVCEDVIARVEEKGRLGDY

SEQ ID NO: 43081 - DNA, 447 bp, unidentified eubacterium SCB49
  CDS (1)..(447): transl_table=11
atgtctgtaaaaaaaatagcagttttcccaggttcttttgacccaatcacattaggtcatatggatataattaaaagagcaatacctttatttgatgaaattattgtcgcgatagggactaatgcagcaaaaaaatatatgtggtcactggaagaacgtatggacaagctagagaaagcttttagctcttaccctaccgtaactgtttcagattacaatggacttactgccgaattttgcaaaaaaaataatgcgcaatttattttaagaggtctccgtaacacaacagactttacgtatgagcaaaccattgcacaagccaacgaaaaagtaaatgaagtagacagtgtctttttaatttgcagtcctgaatacgcttttatatcgtcttctatcgtgcgagatattgcccgtaacaatggagactactcgtcactgattccataa

SEQ ID NO: 43082 - protein, 148 aa, unidentified eubacterium SCB49
MSVKKIAVFPGSFDPITLGHMDIIKRAIPLFDEIIVAIGTNAAKKYMWSLEERMDKLEKAFSSYPTVTVSDYNGLTAEFCKKNNAQFILRGLRNTTDFTYEQTIAQANEKVNEVDSVFLICSPEYAFISSSIVRDIARNNGDYSSLIP

SEQ ID NO: 43083 - DNA, 495 bp, Moritella sp. PE36
  CDS (1)..(495): transl_table=11
atgacagtaaaagtaatttacccaggtacatttgatccagtcaccaatggtcataccgatttaatcgagcgcgcagcaaaattatttgaccacgtgattgttggggtcgcctttaacgcaaccaaaaaacccttctttgaccttaaggaacgcgtgcaattagccaaagacgtaacggcccatttagacaatgtggaagtggtcggatttagcggtttgttagttgattttgcaaaagaatataacgcatcagtactgatccgaggattacgagcagtatctgattttgagtacgaattccaactggcgaatatgaatcgtcgcttaagtcctgatttagaaagcgtgttcctaacaccatcggaagagaattcctttatctcttcaacactggtgaaagaagttgctattcacaacggtgatgtggctcagtttgtcgatcccattgtgtgccaggccattttagataaaattgcagaaaatatagcccgttaa

SEQ ID NO: 43084 - protein, 164 aa, Moritella sp. PE36
MTVKVIYPGTFDPVTNGHTDLIERAAKLFDHVIVGVAFNATKKPFFDLKERVQLAKDVTAHLDNVEVVGFSGLLVDFAKEYNASVLIRGLRAVSDFEYEFQLANMNRRLSPDLESVFLTPSEENSFISSTLVKEVAIHNGDVAQFVDPIVCQAILDKIAENIAR

SEQ ID NO: 43085 - DNA, 483 bp, Herbaspirillum seropedicae
  CDS (1)..(483): transl_table=11
atggtcacagctgtatatccggggacattcgatccgctgacgcgtgggcacgaggacctggtccgccgcgcttccggattgttcgacaagctggtcgtgggcgtagccgacagcaagaacaagaagcccttcttttcgctcgaagagcgtctgtcgatcgccaacgaagtgctgggtcactatcccaatgtccaggtggagagcttttccggcctgttgaaggacttcgtgcgccagaacaatgcccgcgtcatcgtgcgcggcctgcgcgccgtgtccgacttcgaatacgaattccagatggccggcatgaaccgctatctgttgccggacgtggagacgctgttcctgaccccgtccgaccagtatcaattcatctcgggcaccatcgtgcgcgaaatcgcccaactgggcggcgatgtgtccaagttcgtgtttccctcggtcgagaagtggctgaaggaaaaaatcgccaagcagtga

SEQ ID NO: 43086 - protein, 160 aa, Herbaspirillum seropedicae
MVTAVYPGTFDPLTRGHEDLVRRASGLFDKLVVGVADSKNKKPFFSLEERLSIANEVLGHYPNVQVESFSGLLKDFVRQNNARVIVRGLRAVSDFEYEFQMAGMNRYLLPDVETLFLTPSDQYQFISGTIVREIAQLGGDVSKFVFPSVEKWLKEKIAKQ

SEQ ID NO: 43087 - DNA, 510 bp, Magnetospirillum gryphiswaldense
  CDS (1)..(510): transl_table=11
atgagtgaacggatcggtctttatcctggtaccttcgaccccataaccaacggccacctggacatcgtcaccagggcggccaaggtggtggacaagttgatcgtggcggtggccatcaatgccggcaaggggccgctttactcgctggacgagcgggtggccctggtcgaggcggaagtggccgaggtggcgaaacaacacaacgtcatcatcgaagtccgcgccttcgacaatctgctggtggattttgcccgtgattgcggcgcccgcatcatcatccgcggcttgcgggcggtgtctgattttgagtacgaattccagatggccggcatgaatgcccggctgtcgccgcagatcgagaccttgtttttgatggcgtcggaacggtgccagtttatttcgtcgcgcttcgtcaaggaaatcggccgcttgggcggcgacatttcgtcctttgtcagcccgcgggtgcgggccagcctggacgagaaattcataagcgaaagcaattag

SEQ ID NO: 43088 - protein, 169 aa, Magnetospirillum gryphiswaldense
MSERIGLYPGTFDPITNGHLDIVTRAAKVVDKLIVAVAINAGKGPLYSLDERVALVEAEVAEVAKQHNVIIEVRAFDNLLVDFARDCGARIIIRGLRAVSDFEYEFQMAGMNARLSPQIETLFLMASERCQFISSRFVKEIGRLGGDISSFVSPRVRASLDEKFISESN

SEQ ID NO: 43089 - DNA, 423 bp, Spiroplasma citri
  CDS (1)..(423): transl_table=4
ttgaaagcaatttttcctggtagttttgatccaattcatgacggtcatcttaatattattaaaaaagcaagtgctttattttcaaaattatatgttgtaattactaataatttagaaaaatcaaaccaaacaaatattaaaactcgtgctaaacaagctgtcatagcttgtcaaaaccttaatttaaatgttgaaattgtcattaatgaccaaatgttaactagcgattttgctagacaattaggtgctaaatatattattcgaggattacgaaataataacgatttaaaatatgaaatggaattagcgtttgctaataaacaattaaataaagatcttgaaacaattttttttattgctgattatggtttgaatgaaatttcttcaacttttttaaaccaaattaagcaattaaaaaaataa

SEQ ID NO: 43090 - protein, 140 aa, Spiroplasma citri
MKAIFPGSFDPIHDGHLNIIKKASALFSKLYVVITNNLEKSNQTNIKTRAKQAVIACQNLNLNVEIVINDQMLTSDFARQLGAKYIIRGLRNNNDLKYEMELAFANKQLNKDLETIFFIADYGLNEISSTFLNQIKQLKK

SEQ ID NO: 43091 - DNA, 531 bp, Desulfovibrio gigas
  CDS (1)..(531): transl_table=11
atggacacacacgcccccgcagccgacgccggacgcagacgcgtcgccatctatcccggcaccttcgatcccctgaccttcggacacgtcagtctcgtcaagcgcgccctggacgtcttcgaccacatcctcgtcgcccctgccgccgccacgcccaagacacccatgttctccctggaggagcgggtggagatcgtccgcgaagtcttccatgacaatccgcgggtggaggtggcgggctttcagggcctgctggtggaattcgcccgccgtcgcggagcctgcgccatcctgcgcgggctcagggccgtgtcggacttcgagtacgaatttcagatggccctcatgaaccgccggctggaaaagcacatccagacagtgtttctgatgaccgattaccgctggctgttcatcagctccaccatcgtcaaggaagcggccaaggccggggcagatgtgcggagcatgattccggacccggcctggttccgcctgcaggagcgcttggggcatccggtgccctgcgaatga

SEQ ID NO: 43092 - protein, 176 aa, Desulfovibrio gigas
MDTHAPAADAGRRRVAIYPGTFDPLTFGHVSLVKRALDVFDHILVAPAAATPKTPMFSLEERVEIVREVFHDNPRVEVAGFQGLLVEFARRRGACAILRGLRAVSDFEYEFQMALMNRRLEKHIQTVFLMTDYRWLFISSTIVKEAAKAGADVRSMIPDPAWFRLQERLGHPVPCE

SEQ ID NO: 43093 - DNA, 492 bp, Acinetobacter sp
  CDS (1)..(492): transl_table=11
atgtctaaaacacgtgttatttatccaggcacatttgatcctattactaatggtcatgtagatttagtcacccgtgcatcaagaatgtttgatgaggttgtggttgcaattgcaatcgggcatcataaaaaacctctttttagtttagaagaacgcgtcaagctggctcagttatcattgagtcacttgcacaatgtggaatttgttggttttgatggcttgctggtcaatttttttcgtgaacaaaatgcaacggctgttttgcgtgggttgcgcgccgtttccgattttgagtatgaatttcaactggccaatatgaatcgtcagcttgatcatcattttgaagcggtatttttaacgccttcagaacagtactcgtttatttcatcgactctggtgcgtgaaattgcacgcctaagaggtgatgtcgccaagtttgtgcctcaggctgtggttgaggcttttgaatataaacatcaacaaggttggtag

SEQ ID NO: 43094 - protein, 163 aa, Acinetobacter sp
MSKTRVIYPGTFDPITNGHVDLVTRASRMFDEVVVAIAIGHHKKPLFSLEERVKLAQLSLSHLHNVEFVGFDGLLVNFFREQNATAVLRGLRAVSDFEYEFQLANMNRQLDHHFEAVFLTPSEQYSFISSTLVREIARLRGDVAKFVPQAVVEAFEYKHQQGW

SEQ ID NO: 43095 - DNA, 495 bp, Agrobacterium tumefaciens
  CDS (1)..(495): transl_table=11
atgacgattgccttttatccaggatcattcgatccgatgaccaacggacatctggatgtgcttatccaggcgctgaacgtggcgtcgaaagtcatcgtcgccgttggcatccatcccggaaaagcaccgctgttcagcttcgacgagcgggcggcactgataagccgggcgctttccgaaaccctgccgggcgaggcggcacgcgtggaagtcgtgtccttcgacaatctggttgtcgatgccgcccgccagcatggcgcgcatcttttgctgcgcggccttcgcgatggcaccgatctcgattatgaaatgcagatggccggcatgaaccgccagatggcgcctgatattcagaccgtgttcctgcccgccggcacctcgtcgcgacccattacagccacattggtccggcagatcgccgccatgggcggcaatgtcgatgccttcgtgccgaaagccgtgcttgaagccctcaacgccaagctgaagcgctga

SEQ ID NO: 43096 - protein, 164 aa, Agrobacterium tumefaciens
MTIAFYPGSFDPMTNGHLDVLIQALNVASKVIVAVGIHPGKAPLFSFDERAALISRALSETLPGEAARVEVVSFDNLVVDAARQHGAHLLLRGLRDGTDLDYEMQMAGMNRQMAPDIQTVFLPAGTSSRPITATLVRQIAAMGGNVDAFVPKAVLEALNAKLKR

SEQ ID NO: 43097 - DNA, 576 bp, Anabaena sp
  CDS (1)..(576): transl_table=11
gtgattgctatttatcctggtagctttgatccgatcactttaggacacctcgatattattcagcgtggtagccgtttgtttgatctggtgattgtcgccgtcttgcgaaatccgagtaaagtaccattatttagcgtacaggaacgcctagaacagattcgtagaaccactaagcatttaccaaacgtagaagccgatggttttgatggtctgaccgttaattatgcccaacagcgacaagcacaggttttattacggggtttacgggcgatttctgattttgaggtcgagttacaaatggcccatactaataaaactctttctactcaaattgagacagtttttttagcaacatcaaatgagtatagttttttaagtagtagtgtggtaaaagagattgcaagatttggtggttccgtcgatcatcttgtccccccacacatagctttagatatatacaaatgctacaaccacaattatccaacggcgaatccaactacaatggaaattaccccccctcaccagaatatggcaacggtagccccccaggagatactccaggaacaggaaacgtag

SEQ ID NO: 43098 - protein, 191 aa, Anabaena sp
MIAIYPGSFDPITLGHLDIIQRGSRLFDLVIVAVLRNPSKVPLFSVQERLEQIRRTTKHLPNVEADGFDGLTVNYAQQRQAQVLLRGLRAISDFEVELQMAHTNKTLSTQIETVFLATSNEYSFLSSSVVKEIARFGGSVDHLVPPHIALDIYKCYNHNYPTANPTTMEITPPHQNMATVAPQEILQEQET

SEQ ID NO: 43099 - DNA, 486 bp, Aquifex aeolicus
  CDS (1)..(486): transl_table=11
atgggtaaaagagtagtgtatccaggaacttttgatcctccacactacggacacttggacatagtaaagagaagtgcgcggatttttgacgaagtggtcgttgcggttgcaaaaaaaccgagaaagttcctactctttgacgcagaggaaagagtgaaaatgtttgaaaaaatggtggaggatatcccaaacgtagaggtcaagatgtttgactgcctcctcgtggactttatgaagagggaaggtataaacgtaatagttagaggagtgagactctttacggattttgagtacgaacttcagatagccctcaccaattacaagctcgcgggagtggaaacggtgttcatgatgccttcacaggagtacatacacataagctcaacgatcgtgagggacgtggcgtcttactgcggagatctggataatatggttcatccttacgtaaaacaaaagctgagggagaagttcaattgcggttcctga

SEQ ID NO: 43100 - protein, 161 aa, Aquifex aeolicus
MGKRVVYPGTFDPPHYGHLDIVKRSARIFDEVVVAVAKKPRKFLLFDAEERVKMFEKMVEDIPNVEVKMFDCLLVDFMKREGINVIVRGVRLFTDFEYELQIALTNYKLAGVETVFMMPSQEYIHISSTIVRDVASYCGDLDNMVHPYVKQKLREKFNCGS

SEQ ID NO: 43101 - DNA, 492 bp, Bacillus anthracis
  CDS (1)..(492): transl_table=11
atgacaagtatagctatttcttcgggaagttttgatccaattacccttgggcatctggatattattaaaaggggagcaaaagtatttgacgaggtatacgtagtagttttaaacaactcgtcaaaaaaaccgttcttttcagtggaagagcgcttagatttaattcgagaagccacaaaggatatccctaatgtaaaagtagattcacatagtggactactagttgagtatgcgaaaatgcgcaatgcgaatgcgattttacgtgggttaagagcggtttctgattttgaatatgagatgcaaattacttctatgaatcgaaaattagatgaaaatattgaaaccttttttattatgacaaacaatcaatattcatttttaagctcgagcattgtgaaagaagttgcgagatatggaggaagtgtagtagatcttgtccctcctgttgtagaacgtgctttaaaagaaaagtttcaaaccccgttaaagtga

SEQ ID NO: 43102 - protein, 163 aa, Bacillus anthracis
MTSIAISSGSFDPITLGHLDIIKRGAKVFDEVYVVVLNNSSKKPFFSVEERLDLIREATKDIPNVKVDSHSGLLVEYAKMRNANAILRGLRAVSDFEYEMQITSMNRKLDENIETFFIMTNNQYSFLSSSIVKEVARYGGSVVDLVPPVVERALKEKFQTPLK

SEQ ID NO: 43103 - DNA, 453 bp, Bacteroides fragilis
  CDS (1)..(453): transl_table=11
atgagaagagctatctttccgggaacgttcgacccgtttaccatcggacactactccgtagttcaacgcaccctgacattcatggacgaagtggtcatcggtatcggtatcaacgaaaacaagaatacatactttccgatcgagaaacgtgtggaaatgattcgtaagttctataaagacgaaccccggatcaaggtcgaatcttacgattgcctgacgatcgactttgcccgtcaggtagatgcccaattcatcgttcgcggtatccgtaccgtgaaagacttcgaatacgaagaaacaattgccgatatcaaccggaaactggccggcattgaaaccattctgttatttaccgaaccggaattgacctgtgtcagctctaccatcgtccgcgaactgcttggctataataaggatatcagtatgttcattcccaaagggatggaaatgtaa

SEQ ID NO: 43104 - protein, 150 aa, Bacteroides fragilis
MRRAIFPGTFDPFTIGHYSVVQRTLTFMDEVVIGIGINENKNTYFPIEKRVEMIRKFYKDEPRIKVESYDCLTIDFARQVDAQFIVRGIRTVKDFEYEETIADINRKLAGIETILLFTEPELTCVSSTIVRELLGYNKDISMFIPKGMEM

SEQ ID NO: 43105 - DNA, 486 bp, Bacillus subtilis
  CDS (1)..(486): transl_table=11
gtggcgagtatagctgtctgtcccggcagttttgatcctgtgacctacgggcatctggacatcatcaaacgcggggcgcatatttttgaacaagtgtatgtatgtgtgctgaataattcttcaaaaaagcctttgttcagtgtggaagaacggtgtgagcttctgagagaagtcacaaaagacattccgaacataacagttgaaacatcgcaaggcctgttaattgattatgcaaaaagaaaaaatgcgaaagcgattttaagaggcttgagagctgtatctgattttgaatacgagatgcaggggacatcagtaaaccgggtgcttgatgaatctattgagacgttttttatgatgacaaacaatcaatattcgtttctaagttcaagcatcgtaaaagaagtggcaagatacaacggctcggtatcagagtttgtaccgccggaagtagagttggcgcttcagcaaaaattcagacaaggatga

SEQ ID NO: 43106 - protein, 161 aa, Bacillus subtilis
MASIAVCPGSFDPVTYGHLDIIKRGAHIFEQVYVCVLNNSSKKPLFSVEERCELLREVTKDIPNITVETSQGLLIDYAKRKNAKAILRGLRAVSDFEYEMQGTSVNRVLDESIETFFMMTNNQYSFLSSSIVKEVARYNGSVSEFVPPEVELALQQKFRQG

SEQ ID NO: 43107 - DNA, 483 bp, Bdellovibrio bacteriovorus
  CDS (1)..(483): transl_table=11
atgagtaaaattgccgtttacccaggaagctttgaccccatcacaatggggcatgtggatatcatcaaccgtatttcccctttgtatgacgaagtcatcgtgttggttgcacaatcttcacagaagcaaagcatgttttctgttgaagaacgaaagactttgatcgaaaaagccttgtcccatctgaaaaacgtcaaagtcgatatctttggcggcctgacggtggagtacatgaaaaaagccaaagcccaggtgatcgtacggggcttgcgtgcggtttcggatttcgagtacgagatgaccatggcgaacatgaatcgcaagttggcgccggactttgaaacccttttggtctttgccagccccgagttctattatatttcttcgcgcggggtgaaagaggtcgccatcaacggtggcgccttgaaaggcctggtgccggacgtggtggtcgaagccatggagaataaaatcagaaagtaa

SEQ ID NO: 43108 - protein, 160 aa, Bdellovibrio bacteriovorus
MSKIAVYPGSFDPITMGHVDIINRISPLYDEVIVLVAQSSQKQSMFSVEERKTLIEKALSHLKNVKVDIFGGLTVEYMKKAKAQVIVRGLRAVSDFEYEMTMANMNRKLAPDFETLLVFASPEFYYISSRGVKEVAINGGALKGLVPDVVVEAMENKIRK

SEQ ID NO: 43109 - DNA, 501 bp, Bifidobacterium longum
  CDS (1)..(501): transl_table=11
atgactatcgcagtatgccccggctcgtatgaccccgttaccgccggacacttggatgtaatcgagcgctcggcgcggtttttcgacgaggtgcatgtggtggtggccgtcaacgccgcgaaaacaccgatgttttccgaagccaccagagtcgacgtgatccgccgcgcccttgacaaagccggttgcaagaacgtcaccgtttcttccaccgacggcctgatcaccgactactgcaagaaggtcggcgccaccgttatcatcaagggtctgcgccagaacggcgactatgaagccgagctcggcatggcgctggtcaatcgcaagctcgctggcatcgaaaccctgtttttgccggccgatccgattcttgaacacatctccagttccatcgtcaaggacgtggcccgccatggaggcgacgtgaccggcatggtgcccgattgcgtcgtgccgatgctggccgatgccctggccgaggaacgtcagcggaaggactga

SEQ ID NO: 43110 - protein, 166 aa, Bifidobacterium longum
MTIAVCPGSYDPVTAGHLDVIERSARFFDEVHVVVAVNAAKTPMFSEATRVDVIRRALDKAGCKNVTVSSTDGLITDYCKKVGATVIIKGLRQNGDYEAELGMALVNRKLAGIETLFLPADPILEHISSSIVKDVARHGGDVTGMVPDCVVPMLADALAEERQRKD

SEQ ID NO: 43111 - DNA, 510 bp, Bordetella bronchiseptica
  CDS (1)..(510): transl_table=11
atgatcatcgctgtttaccccggcacgttcgacccgctgacccgaggccacgaagacctggtccgccgtgcggccacgctcttcgacaaggtcgtggtgggcattgcacacagccgcaacaagaagccgttcttcaccatcgaggaacgcgtggatattgcacgcgaagtgctgggccactatcccaacgtcgaggtgcacagtttcggcggcttgctgaaggatttcgtgcgcgaccagaacggccgcgtcatcatccgcggcctgcgcgcggtgtccgatttcgagtacgagttccagatggccggcatgaaccgccacctgctgcccgacgtcgaaaccatgttcatgacgccgtccgaccaataccagttcatttcgggcaccatcgtgcgcgagatcgcccagctgggcggcgacgtcagcaagttcgtctttccgtccgtcgagcgctggctgcaggccaaggccaaggaacgccgcgagcagtccgcgcagggcggcgcctga

SEQ ID NO: 43112 - protein, 169 aa, Bordetella bronchiseptica
MIIAVYPGTFDPLTRGHEDLVRRAATLFDKVVVGIAHSRNKKPFFTIEERVDIAREVLGHYPNVEVHSFGGLLKDFVRDQNGRVIIRGLRAVSDFEYEFQMAGMNRHLLPDVETMFMTPSDQYQFISGTIVREIAQLGGDVSKFVFPSVERWLQAKAKERREQSAQGGA

SEQ ID NO: 43113 - DNA, 492 bp, Borrelia burgdorferi
  CDS (1)..(492): transl_table=11
atgagggtggcagtttttccaggatcttttgatccaattacttggggtcatattgatttaattaaaagatcgttggctatttttgacaaagttattgttttagtagctaaaaataaatcaaaaaaatatttcctaagtgatattgagaggtttagccttacaaaagatgttatttcgtctttaaatttttcaaatgtgcttgtagataggtatagcgggtttattgttgattatgcattaattaattctattaaatttattgttagaggaattagggcttttaatgattttgatatagagtttgaaagatatcttgttaataataagttaaattttgaaattgatactatatttttaccaagtagtgcagaacatttatatgtaaggtcggattttgtaaaggaattgatgttgaaaaaggatgttgatctttctaattttgttccagaattggtgtttaatagattaaaatctaagtttattgacaaatga

SEQ ID NO: 43114 - protein, 163 aa, Borrelia burgdorferi
MRVAVFPGSFDPITWGHIDLIKRSLAIFDKVIVLVAKNKSKKYFLSDIERFSLTKDVISSLNFSNVLVDRYSGFIVDYALINSIKFIVRGIRAFNDFDIEFERYLVNNKLNFEIDTIFLPSSAEHLYVRSDFVKELMLKKDVDLSNFVPELVFNRLKSKFIDK

SEQ ID NO: 43115 - DNA, 498 bp, Bradyrhizobium japonicum
  CDS (1)..(498): transl_table=11
atgccgcgcattgccttctacccaggttccttcgaccccatcaccaacggccatctggacgtggtccggcatgccgttccgctgtgcgaccggctggtggtggcgatcggcgtccatcccggcaagaagccgctgttctccaccgaggagcgtctgaggatgctcgaggacgtctgcgggccggtggcaacccaggccggctgtgtgctcgaagccgtgacgtttgacgatctgtcggtgaccgccgcgcgcaagcacggcgcgaccatcatgattcgcggtctgcgcgacggcaccgacctcgactacgaaatgcagcttgccgggatgaacgaggccatggcgccggaggtccatacggtgtttctgccggcctctcccatggtccgcccgatcaccgccactttggtgcgccagatcgcgggcatgggcggagatgtttcgaccttcgtgccgccgctcgtagccagtctgctcaaggccaaattcgccggataa

SEQ ID NO: 43116 - protein, 165 aa, Bradyrhizobium japonicum
MPRIAFYPGSFDPITNGHLDVVRHAVPLCDRLVVAIGVHPGKKPLFSTEERLRMLEDVCGPVATQAGCVLEAVTFDDLSVTAARKHGATIMIRGLRDGTDLDYEMQLAGMNEAMAPEVHTVFLPASPMVRPITATLVRQIAGMGGDVSTFVPPLVASLLKAKFAG

SEQ ID NO: 43117 - DNA, 495 bp, Brucella melitensis
  CDS (1)..(495): transl_table=11
atgacgatcgcgatctatgcgggttcctttgacccggtaaccaacggccatatagatgtccttaaaggggccttgcgccttgccgatcaggttattgttgccatcggcatgcatcctggcaaaaaaccgcttttcagttttgatgagcgcgttgcgcttattgaggcaagtgcgaaggcggttctgcacaaggatgctgcgcgtgtttccgtcatcgcttttgatgggctggtcattgatgctgcgcgcaagcatggggcgcaattgatggtacggggcttgcgtgacggcaccgaccttgattacgaaatgcagatggctggcatgaacggcaccatggcgccggaattgcagacggtttttctacctgccgatccggcagtgcgcacgattaccgccacattggttcgccagattgcgtccatgggcggggacatcaagcccttcgttccggtggccgtcgctgccgccttgaacaccaaattcaaatcctga

SEQ ID NO: 43118 - protein, 164 aa, Brucella melitensis
MTIAIYAGSFDPVTNGHIDVLKGALRLADQVIVAIGMHPGKKPLFSFDERVALIEASAKAVLHKDAARVSVIAFDGLVIDAARKHGAQLMVRGLRDGTDLDYEMQMAGMNGTMAPELQTVFLPADPAVRTITATLVRQIASMGGDIKPFVPVAVAAALNTKFKS

SEQ ID NO: 43119 - DNA, 498 bp, Buchnera aphidicola subsp
  CDS (1)..(498): transl_table=11
atgaacaaaaccgcaatatatccaggtacatttgatccgattacatacggacatttagatattataacacgtgcaacaaaaatatttgatagtataactatcgcaatttctaataattttacaaaaaaacccatttttaatttaaaagaacgaatagaattaactcgaaaagttacacttcatttaaaaaatgtaaaaaaaatacttggttttaacgatttacttgctaatttagcaaaaaaagagaaggctaatattttaattagaggagtcagaacaatatttgattttgattatgaaataaaattagcggctataaataaacaaatttatccagatttagatagtatatttttactttcttctaaagaagtttcttttatatcttcatcttttgttaaagaaatagcaaaatataaaggcgatataaaaccgtatcttccaaaagaagcccattctgcattattaagaaaactaaataacgattcgattaagtag

SEQ ID NO: 43120 - protein, 165 aa, Buchnera aphidicola subsp
MNKTAIYPGTFDPITYGHLDIITRATKIFDSITIAISNNFTKKPIFNLKERIELTRKVTLHLKNVKKILGFNDLLANLAKKEKANILIRGVRTIFDFDYEIKLAAINKQIYPDLDSIFLLSSKEVSFISSSFVKEIAKYKGDIKPYLPKEAHSALLRKLNNDSIK

SEQ ID NO: 43121 - DNA, 477 bp, Campylobacter jejuni
  CDS (1)..(477): transl_table=11
atgacttgtttatatcctgggacttttgatcctattaccaacgggcatttagatgttataaaacgggctttaaaaatttttgatgaagtcatcgttgccatagcaaaaagtgaacataaaaaaccttgctatgatttagaaaaacgcaaagaactagccctgctcgcaacacaaaatttaaaaaatgttaaaatcattgcttttgataatttacttgtagatttagccaaagaattaaaagttaatactataatccgtggacttagagcagtgagtgattttgaatacgaattgcaaattggctatgcaaatcacgcactttgggaagatatggaaaccatttatcttatgccaagtctaaaacatgcttttatttcaagttctattgtgcgttctatagtagcacatgggggtgatgtaagttctcttgttccaaaagaaattctaccttttttaaaggatcaatcttgtatgtag

SEQ ID NO: 43122 - protein, 158 aa, Campylobacter jejuni
MTCLYPGTFDPITNGHLDVIKRALKIFDEVIVAIAKSEHKKPCYDLEKRKELALLATQNLKNVKIIAFDNLLVDLAKELKVNTIIRGLRAVSDFEYELQIGYANHALWEDMETIYLMPSLKHAFISSSIVRSIVAHGGDVSSLVPKEILPFLKDQSCM

SEQ ID NO: 43123 - DNA, 492 bp, Caulobacter crescentus
  CDS (1)..(492): transl_table=11
atgcgggtcgggctttatccggggaccttcgatccggtcaccaacggtcacctcgacatcatcgggcgggccgtgaagctggtcgacaagctggtgatcggcgtcgcgatcaacatcggcaagggcccgctgttctctctggaggagcgggtcgagatcctcgagcgcgagaccgcgcacctcaagaagatcgccgagatcgaggtgcggcccttcgacagtctgctgatgcacttcgcccgcgacgtgaacgcccagatgatcgtgcgcggcctgcgggccgtggccgacttcgagtacgaattccagatgacggcgatgaaccagcagctggatcgcgaaatcgaaacggtgttcctgatggccgatccgcgccaccaggcgattgcttcacggctggtgaaagaaatcgcgaccctcggcggcgacatcggcaagttcgtgccgcccggcgtggcgcagcagttgttggccaaggtcggaaagggctag

SEQ ID NO: 43124 - protein, 163 aa, Caulobacter crescentus
MRVGLYPGTFDPVTNGHLDIIGRAVKLVDKLVIGVAINIGKGPLFSLEERVEILERETAHLKKIAEIEVRPFDSLLMHFARDVNAQMIVRGLRAVADFEYEFQMTAMNQQLDREIETVFLMADPRHQAIASRLVKEIATLGGDIGKFVPPGVAQQLLAKVGKG

SEQ ID NO: 43125 - DNA, 510 bp, Chromatium vinosum
  CDS (1)..(510): transl_table=11
ttgcgcaccgtggtctatccaggaaccttcgatcccatcaccaacggacatgtggatctcatccatcgcgcggcacgtctgttcgatcgggtggtggtggcggtcgcggccgataccggcaagacgcccgtcttctcgaccgaggagcgggtggaactggtgcgcggcagcgtggcaggtgatcccaatgtcgagatcctgcccttcgaggggctgctcgtgaacttcgcgcgtaccctcggggtttccgtcatcatgcgcggactgcgcgccgtctccgacttcgagtacgagttccagctcgccggcatgaatcggcgcatggcccccgacatcgagacgctctttctcaccccggccgagcagtatgcctacatctcctcgtcgctggtgcgcgagatcgcccggctccggggcgacgtctcgaccttcgtcacgccgacggtacaggctgcattgcgcgctggctgcggtttggataagatccgcgccacacaccacccaacctga

SEQ ID NO: 43126 - protein, 169 aa, Chromatium vinosum
MRTVVYPGTFDPITNGHVDLIHRAARLFDRVVVAVAADTGKTPVFSTEERVELVRGSVAGDPNVEILPFEGLLVNFARTLGVSVIMRGLRAVSDFEYEFQLAGMNRRMAPDIETLFLTPAEQYAYISSSLVREIARLRGDVSTFVTPTVQAALRAGCGLDKIRATHHPT

SEQ ID NO: 43127 - DNA, 495 bp, Chromobacterium violaceum
  CDS (1)..(495): transl_table=11
ttgaaacgagccgtctatgccggcagctttgatccggtgaccaacggccacctgtggatgatacgcgaggcggtggagctgttcgacgagctgatcgtcgcggtgggcgtcaatccggacaagcattgcactttcagcgtcgacgagcgggtcgcgctgctgcgcgaagtgacttcgggcttcagcaagctgcgggtcgacgtcttcgagaatcagttcctggtgaattacgcgcagagcgtcggcgccaactacatcgtgcgcggcatccgcaccgccagcgactacgagtacgagcgcacgatgcgctacatcaattccgacctgcatccggacatcaccacgctgttcctgctgccgccgcgcgaatacgcggaggtgtcgtcgaccatggtcaagggcctgatcggcccgcgcggctgggaaggcgtgatccgccagtatctgccggagccggtgtaccgcaagatgctgtcgatgtactccgagcaatag

SEQ ID NO: 43128 - protein, 164 aa, Chromobacterium violaceum
MKRAVYAGSFDPVTNGHLWMIREAVELFDELIVAVGVNPDKHCTFSVDERVALLREVTSGFSKLRVDVFENQFLVNYAQSVGANYIVRGIRTASDYEYERTMRYINSDLHPDITTLFLLPPREYAEVSSTMVKGLIGPRGWEGVIRQYLPEPVYRKMLSMYSEQ

SEQ ID NO: 43129 - DNA, 486 bp, Clostridium acetobutylicum
  CDS (1)..(486): transl_table=11
atgaaggtagcagtatacccaggaagctttgacccaattacaaatggacatttagatataataagtagagcttctaaagtatttgataaagtaatagttggggttcttataaatccagaaaaaaaaggcatgttttctgttgatgagagagtagatcttatcaaaagagtcataaaaccatttaataatgttagtgttcaaagttttagtggtcttcttgttaattttatggaaaataatgattccaacgttatgataagaggtttgaggagtgtgggagattttgaatacgagcttcaaacttcactaatgaataagaaactcaatcctaatgttgaaactgtatttatgatgactagtttagagttttcatttttaagttccactgctattaaacaggttgctgtgtttggaggatgtatcaaagaattggtgccagatgaaattatagatgatgttttaagaaaagcaaaagaatttaattaa

SEQ ID NO: 43130 - protein, 161 aa, Clostridium acetobutylicum
MKVAVYPGSFDPITNGHLDIISRASKVFDKVIVGVLINPEKKGMFSVDERVDLIKRVIKPFNNVSVQSFSGLLVNFMENNDSNVMIRGLRSVGDFEYELQTSLMNKKLNPNVETVFMMTSLEFSFLSSTAIKQVAVFGGCIKELVPDEIIDDVLRKAKEFN

SEQ ID NO: 43131 - DNA, 480 bp, Corynebacterium diphtheriae
  CDS (1)..(480): transl_table=11
atgcgtaaagcagtgtgcccaggatcttttgacccagtgactatggggcatcttgacatcatcggaagggcggcccagcaatacgacgaggtcaccgttttagtgactgctaaccccaataagccctcaggtatgttcaccgtcgatgaacgccttgcccttattaaagaatccactgcgcattttgtgaatgtcaaagtggataactgggcaggactccttgttgattacactacggccaacgggatcgatgcaatcgtcaaagggcttcgaacggcactggattacgaatatgagctacccatggctcagatgaaccgaaagctagctggtgtggacaccctgtttttgatgacagatccacaatatggttacatttcttctaccctctgtaaggaagtaacaaaatatggtggggacgtctcagatatgttgccaccagctgtagccgcagcgattgtggagaaagtaaaaagctaa

SEQ ID NO: 43132 - protein, 159 aa, Corynebacterium diphtheriae
MRKAVCPGSFDPVTMGHLDIIGRAAQQYDEVTVLVTANPNKPSGMFTVDERLALIKESTAHFVNVKVDNWAGLLVDYTTANGIDAIVKGLRTALDYEYELPMAQMNRKLAGVDTLFLMTDPQYGYISSTLCKEVTKYGGDVSDMLPPAVAAAIVEKVKS

SEQ ID NO: 43133 - DNA, 483 bp, Corynebacterium glutamicum
  CDS (1)..(483): transl_table=11
atgaaagctgtttgcccaggatcattcgaccccatcaccctcggccacctcgacatcgtgacccgcgccgccgcgcaatttagcgaagtcaccatcttggtcaccgccaaccccaacaaaaactcaggactgttcaccgtcgcagaacgcatggatctcatccgcgaatccaccgcacacctcgacaacgtaaaagtagacacctgggcctcactgctcgtggattacaccaccgaacatggcatcggcgccctagtcaaaggcctgcgaagctccctcgactacgaatacgagctccccatggcacagatgaacaggcgactcacgggcgtagacaccttcttcctcctcaccgacgagaaatacggctacgtcagctccacactgtgcaaagaagttgcccgcttcggtggcgatgtctccggcctcctacctgaggtagtggcaaaagccgtgacagaaaaatacagcaaccagcactag

SEQ ID NO: 43134 - protein, 160 aa, Corynebacterium glutamicum
MKAVCPGSFDPITLGHLDIVTRAAAQFSEVTILVTANPNKNSGLFTVAERMDLIRESTAHLDNVKVDTWASLLVDYTTEHGIGALVKGLRSSLDYEYELPMAQMNRRLTGVDTFFLLTDEKYGYVSSTLCKEVARFGGDVSGLLPEVVAKAVTEKYSNQH

SEQ ID NO: 43135 - DNA, 480 bp, Coxiella burnetii
  CDS (1)..(480): transl_table=11
atgaaaccaatcgccatctacccaggaacctttgatccgttgaccaacggccacgtagatattatcgagcgcgctttacccttatttaacaaaataatcgttgcgtgtgctcccaccagccgtaaagatcctcatttaaaactggaggaacgcgttaatttaattgctgacgtattgactgatgagcgtgttgaagttctgccccttaccggacttttggtggattttgccaaaacacaccaggctaactttattttacgcggccttcgcgccgtttctgattttgattatgaattccagctagcgcatatgaactatcaattatcacccgaaattgaaactatttttttaccggcacgagaaggttacagttatgtttctggaaccatggtaagagaaatcgttactctcggcggcgacgtatcgccgttcgttccccctttagttgcccgtcatttacaaaaaagaagagaaaaataa

SEQ ID NO: 43136 - protein, 159 aa, Coxiella burnetii
MKPIAIYPGTFDPLTNGHVDIIERALPLFNKIIVACAPTSRKDPHLKLEERVNLIADVLTDERVEVLPLTGLLVDFAKTHQANFILRGLRAVSDFDYEFQLAHMNYQLSPEIETIFLPAREGYSYVSGTMVREIVTLGGDVSPFVPPLVARHLQKRREK

SEQ ID NO: 43137 - DNA, 504 bp, Deinococcus radiodurans
  CDS (1)..(504): transl_table=11
atgaacgccgttttccccggttcctttgaccctgtgacctccgggcacatggacgtgctgacgcgtgcgagccacatgttcgagcaggtcaccgtcaccgtcatgcacaacgcccgcaagcagggccgccacctctttaccctggacgagcggctcgaaattttgcgtgaggccaccgctggcctgcccaatgtccgggtggacagcttcagcggcctgctggtggactacgtagcgcagcagggccgcagcgtgatcgtgcgcggcctgcgggcggtcagcgactacgagtacgaactccagattgcgcacctcaaccgccagatcggcgaagtggaaaccgtgttcatcatggcggcgacccactggagctttgtcagcagctccatggtcaaagaaatcgccagctacgggggcaagattcacgagatggtgccccctgccagcgaagctgcgttgcggcgcaaattcgccgaggtctacgacaaacgcgacgatgcgtaa

SEQ ID NO: 43138 - protein, 167 aa, Deinococcus radiodurans
MNAVFPGSFDPVTSGHMDVLTRASHMFEQVTVTVMHNARKQGRHLFTLDERLEILREATAGLPNVRVDSFSGLLVDYVAQQGRSVIVRGLRAVSDYEYELQIAHLNRQIGEVETVFIMAATHWSFVSSSMVKEIASYGGKIHEMVPPASEAALRRKFAEVYDKRDDA

SEQ ID NO: 43139 - DNA, 480 bp, Escherichia coli O6
  CDS (1)..(480): transl_table=11
atgcaaaaacgggcgatttatccgggtactttcgatcccattaccaatggtcatatcgatatcgtgacgcgcgccacgcaaatgttcgatcacgttattctggcgattgccgccagccccagtaaaaaaccgatgtttaccctggaagagcgtgtggagctggcacagcaggcaaccgcgcatctggggaacgtggaagtggtcgggtttagtgatttgatggcgaacttcgcccgtaatcaacacgctacggtgctgattcgtggcctgcgtgcggtggcggattttgaatatgaaatgcagctggcgcatatgaatcgccacttaatgccggaactggaaagtgtgtttcttatgccgtcgaaagagtggtcgtttatctcttcatcgttggtgaaagaggtggcgcgccatcagggcgatgtcacccatttcctgccggagaatgtccatcaggcgctgatggcgaagttagcgtag

SEQ ID NO: 43140 - protein, 159 aa, Escherichia coli O6
MQKRAIYPGTFDPITNGHIDIVTRATQMFDHVILAIAASPSKKPMFTLEERVELAQQATAHLGNVEVVGFSDLMANFARNQHATVLIRGLRAVADFEYEMQLAHMNRHLMPELESVFLMPSKEWSFISSSLVKEVARHQGDVTHFLPENVHQALMAKLA

SEQ ID NO: 43141 - DNA, 492 bp, Enterococcus faecalis
  CDS (1)..(492): transl_table=11
atgcgtaaaattgctctatttcccggaagttttgatccgatgacaaatggtcatttaaatttgattgaacgcagtgcgaagttatttgacgaagtcattattggcgtttttataaatacaagtaagcaaacattatttacgccagaagagaaaaaatatttaattgaagaagcaactaaagaaatgccaaatgtgcgtgttattatgcaagaaacccagttaactgtggaaagtgcaaaatcattaggggctaattttttgattcgtggcattagaaacgtcaaagactacgagtacgagaaagacattgctaaaatgaatcaacatctggcgccagaaattgaaacggtttttctattagcagaagaaccatatgcacatgtaagttccagtttactaaaagaagttttacgttttgggggcgatgtgtctgactatcttcctcccaatatttatcatgcgttaaaacaaaagaagaatgactggagctaa

SEQ ID NO: 43142 - protein, 163 aa, Enterococcus faecalis
MRKIALFPGSFDPMTNGHLNLIERSAKLFDEVIIGVFINTSKQTLFTPEEKKYLIEEATKEMPNVRVIMQETQLTVESAKSLGANFLIRGIRNVKDYEYEKDIAKMNQHLAPEIETVFLLAEEPYAHVSSSLLKEVLRFGGDVSDYLPPNIYHALKQKKNDWS

SEQ ID NO: 43143 - DNA, 480 bp, Erwinia carotovora subsp
  CDS (1)..(480): transl_table=11
atgacaaccaaagcgatttaccccggaacgttcgatccattaaccaatggtcatttggatctgctgacacgagcagcacgactgttcgatcatgtggtactagctatcgctgccagcccgagcaaaaatacgctcttcacattggatgaacgtgtcgcgttggcaaacgatgccacgcagcatttatcgaacgtcgaggtaattggttttagcgatctcatggtgcacttcgcgcagcagcaaaaagcgaatattcttgtgcgtggtttgcgagccgtggctgatttcgaatatgaactccagctcgcaaaaatgaatcaccacctgatgccaacactagaaagcgttttcctgatgccatcggaagagtggtcgtttatttcatcctctctggtcaaggaagtcgcgcgtcacggcggtgatgtaacgcacttcttacccgatgccatcgttcgtgccttactggaaaagctgcactaa

SEQ ID NO: 43144 - protein, 159 aa, Erwinia carotovora subsp
MTTKAIYPGTFDPLTNGHLDLLTRAARLFDHVVLAIAASPSKNTLFTLDERVALANDATQHLSNVEVIGFSDLMVHFAQQQKANILVRGLRAVADFEYELQLAKMNHHLMPTLESVFLMPSEEWSFISSSLVKEVARHGGDVTHFLPDAIVRALLEKLH

SEQ ID NO: 43145 - DNA, 489 bp, Francisella tularensis subsp
  CDS (1)..(489): transl_table=11
atgaataagatagcaatttatccaggtacttttgacccaattaccaatggtcatgttgatctagtagagcgtgcattaaatatctttgatgaaatagttgttgcagtatctacagcttatggtaaaaatactctttttgatattcgtatcagagagcaaatgataaaagaagtattcaaagataatcaaagggtcaaagttgtaagctttcagggtctacttgttgatacagcagtcaaacataatgcttgtgctatagttagaggtctcagagcagtatctgattttgattatgaatttcagatgtcaagtatgaataataaattaaacagtgatattcaaactatattcttaactccgagtgagaagttttcatgtatttcctcgacattagttagggctgtagcgatacataattataagcgtgttgatgagtttgtacctgaatgtgtctttcgtgagataaagcttaaatattctaaggaataa

SEQ ID NO: 43146 - protein, 162 aa, Francisella tularensis subsp
MNKIAIYPGTFDPITNGHVDLVERALNIFDEIVVAVSTAYGKNTLFDIRIREQMIKEVFKDNQRVKVVSFQGLLVDTAVKHNACAIVRGLRAVSDFDYEFQMSSMNNKLNSDIQTIFLTPSEKFSCISSTLVRAVAIHNYKRVDEFVPECVFREIKLKYSKE

SEQ ID NO: 43147 - DNA, 492 bp, Fusobacterium nucleatum subsp
  CDS (1)..(492): transl_table=11
atgaaaataggtgtatatgctggaagttttgaccctattacaaagggacatcaagatataatagaaagagcattaaaaattgtggataaattaatagttgttgttatgaataatcccacaaaaaattattggtttaatttagatgaaagaaaaaatttaataagtaaaatctttgaaggttctgatagtataaaagttgatgagcatgcaggtttacttgttgactttatggctaaaaactcttgtaatatccttataaaaggtttaagagatgtaaaagatttttctgaggaaatgacttattcttttgcaaataaaaaactttcaaatggtgaagtggatacaattttcataccaacatcagaaaaatacacttatgttagttcaacttttgttaaagaattggctttttacaatcaaagtttaactggttatgtggatgataaagttatagttgatattttaaatagagctaaggaatatagagggtaa

SEQ ID NO: 43148 - protein, 163 aa, Fusobacterium nucleatum subsp
MKIGVYAGSFDPITKGHQDIIERALKIVDKLIVVVMNNPTKNYWFNLDERKNLISKIFEGSDSIKVDEHAGLLVDFMAKNSCNILIKGLRDVKDFSEEMTYSFANKKLSNGEVDTIFIPTSEKYTYVSSTFVKELAFYNQSLTGYVDDKVIVDILNRAKEYRG

SEQ ID NO: 43149 - DNA, 495 bp, Geobacillus kaustophilus
  CDS (1)..(495): transl_table=11
atggcgagcattgcggtttgccccgggagctttgaccctgtgacgtacgggcatttggatattattaaacgaggggcgaaagtgtttgatcaagtgtatgtggcggtgttgaacaactcgtcgaaaaagccgctgtttactgtcgaggagcggatcgagctgcttcgtgaggtgacgcggacgcttccgaacgtccatgtcgaagcgtttcacggcctgcttgttgattacgcccgcagcaaaaaagcgaatgccattttgcgcggcttgcgcgctgtgtccgatttcgaatacgaaatgcaaattacgtcgatgaaccgcgttcttgatgaaaacattgaaacgttttttatgatgacgaacagccagtatgcgtttttaagctcgagcatcgtcaaagaagtggcgaaatacaacggcgatatttccgagctcgtgcccccggttgttgagcaggcgctgaagcggaaatttgcgtccacggccgctgattga

SEQ ID NO: 43150 - protein, 164 aa, Geobacillus kaustophilus
MASIAVCPGSFDPVTYGHLDIIKRGAKVFDQVYVAVLNNSSKKPLFTVEERIELLREVTRTLPNVHVEAFHGLLVDYARSKKANAILRGLRAVSDFEYEMQITSMNRVLDENIETFFMMTNSQYAFLSSSIVKEVAKYNGDISELVPPVVEQALKRKFASTAAD

SEQ ID NO: 43151 - DNA, 495 bp, Geobacter sulfurreducens
  CDS (1)..(495): transl_table=11
atgccgaccaagattgccgtctaccccggctcattcgacccgatcacctacggtcacctggacatcatcgaccgcgcactcaggatattcgaccaagtcatcgttgcggtggcccgcaactcggccaaatcggccctgttcaccaccgacgagcgggtcgacatgatccagcgggtgctggccgacaacgtcagggccagggttgacactttcgacggccttctgatagattacgtcctctcccagaaggcaacggtcattatccggggcctgcgggccatttccgacttcgagtacgagttccagatcgcccagatgaaccgaagcatctcccaggatgtggagaccctcttcatgatgacctcggttccctacggctatctttcctcctccatcgtgaaggaggtgagctccctgaacggccccatcgacggactggtgccgccgctggtccgccaggcgctcagggacaaattcgcaggaccagatcgttag

SEQ ID NO: 43152 - protein, 164 aa, Geobacter sulfurreducens
MPTKIAVYPGSFDPITYGHLDIIDRALRIFDQVIVAVARNSAKSALFTTDERVDMIQRVLADNVRARVDTFDGLLIDYVLSQKATVIIRGLRAISDFEYEFQIAQMNRSISQDVETLFMMTSVPYGYLSSSIVKEVSSLNGPIDGLVPPLVRQALRDKFAGPDR

SEQ ID NO: 43153 - DNA, 486 bp, Gloeobacter violaceus
  CDS (1)..(486): transl_table=11
ttgatcgcactgtatccggggagctttgatcccctgacctacggccatctggatattatcgagcgcgccgcccgtctgttcgaccgggtggtcgtcgccgtactgcgcaacccggccaaggtgccgctgtttaccgtcgaggagcgcctcagccagatccaaaaggccgtacgccacctcgacaatgtcgaagtcgaagcgttccatgggctcacggtcaccgtcgcccgccgccttgatgcccgggtactgctgcgcgggctgcgggcggtctccgattttgaggccgaactgcaaatggcccagaccaaccgcaccctggcgaccgaaatcgagacgctgtttttgagcacttcgaccgagcacagcttcttgagcagttcgctggtcaagaacatcgccgcggccggcggcccggtgtcgcacatggtgcctgagcacattgagaaagaactgcggacgcggttcgccggagcgcctctatga

SEQ ID NO: 43154 - protein, 161 aa, Gloeobacter violaceus
MIALYPGSFDPLTYGHLDIIERAARLFDRVVVAVLRNPAKVPLFTVEERLSQIQKAVRHLDNVEVEAFHGLTVTVARRLDARVLLRGLRAVSDFEAELQMAQTNRTLATEIETLFLSTSTEHSFLSSSLVKNIAAAGGPVSHMVPEHIEKELRTRFAGAPL

SEQ ID NO: 43155 - DNA, 498 bp, Helicobacter hepaticus
  CDS (1)..(498): transl_table=11
atgagaacattagccatttatccgggcacttttgaccctgtaacaaatgggcatttggatattatcaaacgttctatggagatttttgataatgtaattgttgctgtggctcaatcaagctctaaacgaccaatgttttcgcttcaagaacgcattgatattttaaagcttagcacacaaaatttagtaaatgtgcaagttgaaggtttttgcactcttcttgcagattttgcaaagcaaaagggtgcaagaatgattatacgaggattgcgggctgtaagtgattttgaatatgaattacaaataggctacgcgaacgcttcgctcaatccagagcttgaaacaatttattttatgccaactttagagaatgcatttattagctcatcagtagtgcgttcaatcattgaacataatggagcattttctcaccttgtgccaaaaaatgctgctgattttatttattcactttataccaaacataaaagaggtatgtaa

SEQ ID NO: 43156 - protein, 165 aa, Helicobacter hepaticus
MRTLAIYPGTFDPVTNGHLDIIKRSMEIFDNVIVAVAQSSSKRPMFSLQERIDILKLSTQNLVNVQVEGFCTLLADFAKQKGARMIIRGLRAVSDFEYELQIGYANASLNPELETIYFMPTLENAFISSSVVRSIIEHNGAFSHLVPKNAADFIYSLYTKHKRGM

SEQ ID NO: 43157 - DNA, 501 bp, Idiomarina loihiensis
  CDS (1)..(501): transl_table=11
atgcaccgccgagcaatttatccgggaacctttgatcctattacaaatggccatgccgacttaattgaacgagccgccaacttgttcagtgaaattgttgtgggtattgcagaaagccccagtaaaaagccgctgtttagtctggaagagcgggttttgctggcgcagcaagtgactgaaaacctcgataatgtcactgtcgttggcttttccgggctgttagtgaactttgccaaagagtacgaagcaacagtgcttattcgcgggttacgcgcggtgtctgactttgaatacgaatttcagctagccaatatgaaccgacgtttggcgccgaatctggaaagcgtgtttttgacgccggcagaggaaaactcgtttatttcatcttctttagtaaaagaggtggcgctgcatggcggcgacgtatccggttttactgacgcccgggtggcgtcagcactggaacagaagttttccggtaagcgtccgggtaaaagttaa

SEQ ID NO: 43158 - protein, 166 aa, Idiomarina loihiensis
MHRRAIYPGTFDPITNGHADLIERAANLFSEIVVGIAESPSKKPLFSLEERVLLAQQVTENLDNVTVVGFSGLLVNFAKEYEATVLIRGLRAVSDFEYEFQLANMNRRLAPNLESVFLTPAEENSFISSSLVKEVALHGGDVSGFTDARVASALEQKFSGKRPGKS

SEQ ID NO: 43159 - DNA, 480 bp, Klebsiella pneumoniae
  CDS (1)..(480): transl_table=11
atgagcacaaaagcgatctatccgggtaccttcgaccccatcaccaacggtcatatcgatattgtcacccgcgcggcaagtatgttcgataaagtggtgctggctatcgccgccagcccgagtaaaaagccgatgttcagccttgatgagcgcattgcgctggcagagcaggcgacggcccacctggtgaacgtggaggttatcggcttcagtgatttgatggccaatttcgcgcgcgcgcagcaggccaatatcctgatccgcggcctgcgggcggtggcggatttcgagtatgagatgcagctggcccatatgaaccgccacctgatgcctaccctcgagagcgtgttccttatgccgtgcaaagagtggtcgtttatctcttcctcactggtgaaggaagtggcgcgccaccagggcgacgtttctcactttctgccagctaatgtgcatcaggcgctgttgaataagctgaagtaa

SEQ ID NO: 43160 - protein, 159 aa, Klebsiella pneumoniae
MSTKAIYPGTFDPITNGHIDIVTRAASMFDKVVLAIAASPSKKPMFSLDERIALAEQATAHLVNVEVIGFSDLMANFARAQQANILIRGLRAVADFEYEMQLAHMNRHLMPTLESVFLMPCKEWSFISSSLVKEVARHQGDVSHFLPANVHQALLNKLK

SEQ ID NO: 43161 - DNA, 498 bp, Lactococcus lactis subsp
  CDS (1)..(498): transl_table=11
atgacagaaaaaattggactctttacaggaacttttgacccactgacaaatggtcatttagacgttatcaaacgtgccagtcaacattttgatcaactttatgttggaatttttaaaaatgaccaaaaaaatccactttttccaactgataaacgagtggaaatgctagaagaagcactgacaagtctgtcagtaactcataaagtcaaagtcatcaaacatgaacgtgatttgacagtgaatattgctaaaaaacttggcgtgacagctctggttcgttctttgcgtaatagccaagatttagaatatgaaaaaaatatgttctattttaatatggagatgacaggcattgaaaccatctttttcttagcaaaaccagaacttgaaccattaaattcaacacggatgcgagaattacatgcctttggtcaagatgtcagtgcttgggttccagaaaatgtgagtcgtgaattaaggaaattagatgaaaaaaaataa

SEQ ID NO: 43162 - protein, 165 aa, Lactococcus lactis subsp
MTEKIGLFTGTFDPLTNGHLDVIKRASQHFDQLYVGIFKNDQKNPLFPTDKRVEMLEEALTSLSVTHKVKVIKHERDLTVNIAKKLGVTALVRSLRNSQDLEYEKNMFYFNMEMTGIETIFFLAKPELEPLNSTRMRELHAFGQDVSAWVPENVSRELRKLDEKK

SEQ ID NO: 43163 - DNA, 492 bp, Lactobacillus plantarum
  CDS (1)..(492): transl_table=11
atggtgacagcagtttttccggggagtttcgacccaatcacacggggccacttggatatgattcaacgtgccagtcgattagttgaccggttgattgtggccgtcatggtcaatacgagtaagcaaccgttatttacgatgacggaaaaagtcgcgatgatcagtgatgagctgacgggtttacccaacgttgaagttcaggccgcaactggtttgaccgttgactttatggcgagtgtccatgcgacagttttggtacgtggtttgcggaatgaacaggatttcgggtatgaacgtgatatcgcttggatgaacaagtcattagacgagacgatcgaaacgatttgcttgattgcacggcccccgtacgcttacttttcttccagcttaattaaggaagttgccaagatgggagcggacgtttccaagtacgtcccgaccgcggtggcgcaaaaactccatcagcggttaggaactgatcagcatgactaa

SEQ ID NO: 43164 - protein, 163 aa, Lactobacillus plantarum
MVTAVFPGSFDPITRGHLDMIQRASRLVDRLIVAVMVNTSKQPLFTMTEKVAMISDELTGLPNVEVQAATGLTVDFMASVHATVLVRGLRNEQDFGYERDIAWMNKSLDETIETICLIARPPYAYFSSSLIKEVAKMGADVSKYVPTAVAQKLHQRLGTDQHD

SEQ ID NO: 43165 - DNA, 483 bp, Leptospira interrogans serogroup Icterohaemorrhagiae serovar
  CDS (1)..(483): transl_table=11
atgaaacacctggcaatttatccaggctcctttgatcctcttacaaaaggtcatttggatattcttcagagatctttgggacttttcgacaaagtaatcattgcgattgccgtcaattcgaacaagtccactttattttcgatcgaagaaagacttggatttattcgtgaagttacaaaaggtatgaaaggtttggaaatcgatacctttcaaggtcttaccgttgattattgtaataaagtcggagccaatagtatcattagaggacttagagccgttacggactttgattacgaatatgcaatttctttaatgaataaaaaattggctccaaatgtggaaaccgtttttttaatgtcttccggagaatattcattcatttcttctacgatcgtaaaagaagtagcaagacatggaagagacgtaagcaatcaggtcccagaaatcgtaagtaaagcattacttaaaaaactctctcaataa

SEQ ID NO: 43166 - protein, 160 aa, Leptospira interrogans serogroup Icterohaemorrhagiae serovar
MKHLAIYPGSFDPLTKGHLDILQRSLGLFDKVIIAIAVNSNKSTLFSIEERLGFIREVTKGMKGLEIDTFQGLTVDYCNKVGANSIIRGLRAVTDFDYEYAISLMNKKLAPNVETVFLMSSGEYSFISSTIVKEVARHGRDVSNQVPEIVSKALLKKLSQ

SEQ ID NO: 43167 - DNA, 480 bp, Mannheimia succiniciproducens
  CDS (1)..(480): transl_table=11
atgacaaaaacagtaatttatcccggtacttttgaccccattacttacgggcatttggatattattgagcgaagtgcggtactttttccccaagttttagtggccgtcgcctcaaatcccacaaaaaagccgttgtttgaattagccgaaagagtgcgtttggcggaagaatccgtcgctcatttgccgaacgtgcaggttatcggcttttccgatttattggcgaacgtcgtgaaggaacgccatattacggcgattattcgcggtatgcgcacaacaatggactttgaatacgaactgcaattagcccatttaaaccgggccttaaccgacggagtggaaagcctgtttttgccttccacggaaaaatggtcttatgtatcttcaacgattgtacgggaaatttatttgcatcgcggtgatgtaagtcagttcgtgcctccaccggttttaaccgcattaatggaaaaaaatcgctaa

SEQ ID NO: 43168 - protein, 159 aa, Mannheimia succiniciproducens
MTKTVIYPGTFDPITYGHLDIIERSAVLFPQVLVAVASNPTKKPLFELAERVRLAEESVAHLPNVQVIGFSDLLANVVKERHITAIIRGMRTTMDFEYELQLAHLNRALTDGVESLFLPSTEKWSYVSSTIVREIYLHRGDVSQFVPPPVLTALMEKNR

SEQ ID NO: 43169 - DNA, 489 bp, Methylococcus capsulatus
  CDS (1)..(489): transl_table=11
ttgaacgtcaccgctatctatcccggcactttcgatcccatcaccctggggcatgcggacctggtgggccgcgccagccgcatcttcgaccgcgtcatcctggcggtggccgagagcaaggccaagactccgctgttcgatttcggcgagcgtctggcactggcccgggaggctgttgccgaaatgcccaacgtcgaagtcgtgggtttcaactcgctgctggtcgactgcgcccggactcacggcgccaccgtgatcctgcgtggcctgcgcgccgtgtccgatttcgagttcgaattccagatggcgggcatgaaccgttcgctgggaccggagatcgaaacgatctttctcacccccggcgaaagctatgccttcctttcttcctcggtcatccgggagatcgccaaattcggcggcgacgtttcggccttcgtgccagggcacgtgagagcggctttgatgcgcaagttcgccggttccggctga

SEQ ID NO: 43170 - protein, 162 aa, Methylococcus capsulatus
MNVTAIYPGTFDPITLGHADLVGRASRIFDRVILAVAESKAKTPLFDFGERLALAREAVAEMPNVEVVGFNSLLVDCARTHGATVILRGLRAVSDFEFEFQMAGMNRSLGPEIETIFLTPGESYAFLSSSVIREIAKFGGDVSAFVPGHVRAALMRKFAGSG

SEQ ID NO: 43171 - DNA, 483 bp, Mycobacterium leprae
  CDS (1)..(483): transl_table=11
atgagcagtgtggtatgtccggggtcattcgatccggtgacgttgggccacatcgacgtttttgaacgcgctgcggctcagttcgacgaggtggtggtcgcgatcctgatcaaccccgtcaagaagggcatgttcgacctcgacgagcggatagcgatgatcaatgagtcgacgatgcacctgcctaacttgcgtgtggaggccggagagggattggtggtcgccttagtcaggtcccgtgggatgacagccatcgtgaagggcctgcgcaccggcgtggatttcgaatacgagctgcagatggcgcagatgaacaaacacatcgcaggcgtcgacactttcttcgtcgcaacggcgccgcggtattcgttcgtatcgtcgtcgttggtcaaagaggttgctatgctaggcggcgacgtttcagagctattgccggaatcggtgaaccgccgattccgggaaaagatgtccggcactagttaa

SEQ ID NO: 43172 - protein, 160 aa, Mycobacterium leprae
MSSVVCPGSFDPVTLGHIDVFERAAAQFDEVVVAILINPVKKGMFDLDERIAMINESTMHLPNLRVEAGEGLVVALVRSRGMTAIVKGLRTGVDFEYELQMAQMNKHIAGVDTFFVATAPRYSFVSSSLVKEVAMLGGDVSELLPESVNRRFREKMSGTS

SEQ ID NO: 43173 - DNA, 453 bp, Mycoplasma penetrans
  CDS (1)..(453): transl_table=4
atgtcattaaaccaaaagaagaaagcatgtatatttccaggaacttttgaagtttttcatgatgggcatctaaatattttaaaaagagcactaaaactatttgattttgtatatattgttgtagcaattaataacactaaaacaagtagtgatttagaaaaaagatatcaaaaagttgaagaaaaaattgactcattatcaatcaaaaatgttgaagtaataaaatgagattctaagatttcagattttgcaaaaataaaaacaatctactttataataagaggtataagagatgtaaatgatttcaaatttgaaaaatacattgctgatatttataagcaagagtgagataaattagaagttgtttattttttttcggaaaaaaaattagaaaatatatcatctcgaaaaattataaatttaaataaaggaaagaacgactatgaaaactag

SEQ ID NO: 43174 - protein, 150 aa, Mycoplasma penetrans
MSLNQKKKACIFPGTFEVFHDGHLNILKRALKLFDFVYIVVAINNTKTSSDLEKRYQKVEEKIDSLSIKNVEVIKWDSKISDFAKIKTIYFIIRGIRDVNDFKFEKYIADIYKQEWDKLEVVYFFSEKKLENISSRKIINLNKGKNDYEN

SEQ ID NO: 43175 - DNA, 480 bp, Nitrosomonas europaea
  CDS (1)..(480): transl_table=11
atggataaagttatttaccctggtacttttgatccgattacacggggacatgaagatctgatccagcgtgcgtcgagattatttgatcaggtagttgtcgcggttgctgccaacagcggaaaatctccctgtttttcactggaagagcgagtggaaatggccagagcagttctggccgaatatgccaacgttgaagtaacgggattttccggtctgctgatggaatttacccggcagcagcaggcgcatgtcattgtgcgcggtttgcgggcagtatccgatttcgagtacgagtttcagctggcagggatgaaccgcagtttgtatcctgatgtggaaaccatttttctgacgccatcggagcaatatatgtttatttcagccactatcgtgcgtgaaatcgcacgtctcggcggggacgcaagcaagtttgtgcacccgctcgtagctgaacggctttatgaaaagcgaaaaaaatga

SEQ ID NO: 43176 - protein, 159 aa, Nitrosomonas europaea
MDKVIYPGTFDPITRGHEDLIQRASRLFDQVVVAVAANSGKSPCFSLEERVEMARAVLAEYANVEVTGFSGLLMEFTRQQQAHVIVRGLRAVSDFEYEFQLAGMNRSLYPDVETIFLTPSEQYMFISATIVREIARLGGDASKFVHPLVAERLYEKRKK

SEQ ID NO: 43177 - DNA, 486 bp, Nocardia farcinica
  CDS (1)..(486): transl_table=11
atggctggagcactgtgccccgggtccttcgatccggtgacgaacggacatctcgacgtattcacccgcgcggcggcgcaattcgacgaagtcgtggtgaccgtcatgatcaacccgaacaagaagggcatgttcgacgtcgaggagcgcatggagctgctgcgcgagaccaccgcgcatctgcccaacgtgcgggtcgcgtcctggcggggcctgctggtggacttcgcccgtgagcagggcatcaccgcgatcgtcaaggggctgcgcgatgccaccgacttcggctacgagctgcagatggcgcagatgaacaagaagctgtccggcgtggacaccttcttcatcgccaccaatccggcgttcagcttcctgtccagctcactggtcaaggaggtcgccacctacggcggcgacgtcagcgacatgctgccgccggtggtgcacaagcggctgctggaccggatcgccgagcggcgcggctga

SEQ ID NO: 43178 - protein, 161 aa, Nocardia farcinica
MAGALCPGSFDPVTNGHLDVFTRAAAQFDEVVVTVMINPNKKGMFDVEERMELLRETTAHLPNVRVASWRGLLVDFAREQGITAIVKGLRDATDFGYELQMAQMNKKLSGVDTFFIATNPAFSFLSSSLVKEVATYGGDVSDMLPPVVHKRLLDRIAERRG

SEQ ID NO: 43179 - DNA, 486 bp, Oceanobacillus iheyensis
  CDS (1)..(486): transl_table=11
atgggaaagttagcaatatgtccaggaagttttgatccgattacgaatggacatctagatattatacaaagaggagcaaatgtatttgaggaagtgattgtaaccgtttttaataatcagtcaaagtctcctttattttcagttacagaacggattgaattattagaggattcaattaagcatattccgaatgtttcagttgattcatctagtcgcttattaatggactatgctagagagaagaaagcacatgcagttattcggggattaagagcagtaagcgattttgaatatgaaatgcaaattacttctatgaacagaaaattaaatgaagatattgaaaccttgtttatgatgactaacaatcaatattcttttttaagttcgagtatggttaaagaaatagctaaatatgatggaaatataagtggtttagtaccagaaccagtagaaaaagcattaaaagcaaaatttaattatttataa

SEQ ID NO: 43180 - protein, 161 aa, Oceanobacillus iheyensis
MGKLAICPGSFDPITNGHLDIIQRGANVFEEVIVTVFNNQSKSPLFSVTERIELLEDSIKHIPNVSVDSSSRLLMDYAREKKAHAVIRGLRAVSDFEYEMQITSMNRKLNEDIETLFMMTNNQYSFLSSSMVKEIAKYDGNISGLVPEPVEKALKAKFNYL

SEQ ID NO: 43181 - DNA, 477 bp, Pasteurella multocida
  CDS (1)..(477): transl_table=11
atgattacggttatttaccctggtacctttgatcccattacgaatggacatctagatattattcaacgtaccgcacgtttatttcccaatgtgttagtcgccgtggcgtctaatccaaataaaaagcccttatttgatctggcgacacgagtggaattagtcaagcaagccgtcgctcacttaccgaatgtgactgtcgtgggttttttagatttattagccgatgtggtcaaggaacggaatatcacagcgattattcgtggtgtacgcagtgcaagcgattttgactatgaattacagcttgcccacttaaatcgcttattaaccaatggagtagaaagtttatttttcccaccgtctgaacgttggtcatatgtgtcctctactatgattcgtgaaatccatttacatcatggcgatgtaagtcaactcgtgcccgaagtcgtttttcacgccttacaaaacttaaaaaaatag

SEQ ID NO: 43182 - protein, 158 aa, Pasteurella multocida
MITVIYPGTFDPITNGHLDIIQRTARLFPNVLVAVASNPNKKPLFDLATRVELVKQAVAHLPNVTVVGFLDLLADVVKERNITAIIRGVRSASDFDYELQLAHLNRLLTNGVESLFFPPSERWSYVSSTMIREIHLHHGDVSQLVPEVVFHALQNLKK

SEQ ID NO: 43183 - DNA, 492 bp, Photobacterium profundum
  CDS (7)..(492): transl_table=11
atgaaaatgacaacacgtgtaatttaccctggtacctttgatccaatcactaatggtcacctcgatttgattgagcgtgctgctgcaatgtttgaccatgttgttgttggtattgctgcaagtcccagtaagaagcccttatttgatttgccagagcgtgttgcattaacacaagcgattaccaaacacttaccaaatgtcgaaattgttggcttttctggtctacttgttgattttgcgaaagagtctaatgccaatatattggtgagagggttacgtgcagtatctgacttcgaatatgaattccagctcgccaatatgaaccgccgtttaatgccagagctagaaaccgtatttttaacaccttcagaagaaaattcgtttatttcgtcaaccatcgttaaagaagtcgcgttacataaaggcgatgttagccagtttgttgatttgcgaattaccggtgctcttaatgctaagttacatactaagtaa

SEQ ID NO: 43184 - protein, 161 aa, Photobacterium profundum
MTTRVIYPGTFDPITNGHLDLIERAAAMFDHVVVGIAASPSKKPLFDLPERVALTQAITKHLPNVEIVGFSGLLVDFAKESNANILVRGLRAVSDFEYEFQLANMNRRLMPELETVFLTPSEENSFISSTIVKEVALHKGDVSQFVDLRITGALNAKLHTK

SEQ ID NO: 43185 - DNA, 462 bp, Porphyromonas gingivalis
  CDS (1)..(462): transl_table=11
atgaaaaagaatatcgccctctttgccggttcgttcgaccctttcacacgcggccacgccgacatcgtcgaacgctcgctggccatattcgatgaggtgatcatcgctatcggcatcaatgaacagaagcgcacgctcttctccgcagaacggcgacaagagcagatagcccgctactatgcttcccgacctgctatcggggtgattacttatagtgggcttacggtcgatctcgtgcgccaaaccggagccactgctttggtgcgaggtattcgttcaggatctgattttgagtacgagcgtactttggccgacctgaatcgtcatctttcgggagtggataccgttctgctttgtaccgacacgcgtctctctttcatcagctcgagtgccgtacgcgagttgatctcctttggacgagacgtctcggatttcctgccggaggggtttgtcctcgattaa

SEQ ID NO: 43186 - protein, 153 aa, Porphyromonas gingivalis
MKKNIALFAGSFDPFTRGHADIVERSLAIFDEVIIAIGINEQKRTLFSAERRQEQIARYYASRPAIGVITYSGLTVDLVRQTGATALVRGIRSGSDFEYERTLADLNRHLSGVDTVLLCTDTRLSFISSSAVRELISFGRDVSDFLPEGFVLD

SEQ ID NO: 43187 - DNA, 474 bp, Propionibacterium acnes
  CDS (1)..(474): transl_table=11
gtgaaagcagtcttttcagggtcattcgaccccatcaccctcggtcacgttgacatcgtgacccgagcagccgaactcatcgacgaggtcgtcgtcggagtggccgtgaactccgcgaagaacggcatcttctccatggatgagcgggtggccttcgttaaggatgctgtcgctgatattcccggtgtcgaggtggcgctcgttgacggactgctggtcgacttctgcaccgaaatgggagctgacgcaatcatccgcgggttgcgatttggtggcgacttcgactacgaactccagatggctcacctcaataaggccatgagcggtattgaaaccattttgctcccggctggccgtgaattcggcacgatcagctcctcgatgattcgctctgctgcttgtaatggcggcaatgtatccgagtttgtgccgggaatggttaataccgcgttgcatgaaagattcccgcattaa

SEQ ID NO: 43188 - protein, 157 aa, Propionibacterium acnes
MKAVFSGSFDPITLGHVDIVTRAAELIDEVVVGVAVNSAKNGIFSMDERVAFVKDAVADIPGVEVALVDGLLVDFCTEMGADAIIRGLRFGGDFDYELQMAHLNKAMSGIETILLPAGREFGTISSSMIRSAACNGGNVSEFVPGMVNTALHERFPH

SEQ ID NO: 43189 - DNA, 486 bp, Proteus mirabilis
  CDS (1)..(486): transl_table=11
atgaaaaataaagctatctaccctggaacctttgatcccatcacctatgggcatattgatattctcactcgtgctgctggtatgtttgacacggtgttattagctattgctgccagcgcccgtaaaaaccctatgtttagtttagaagagcgtgtcgctttagcaaaagaagtcacccaacacctgcctaatgtggaagttgtcggcttttgtgagctaatggcgaattttgctaaaaaacagcaagcgaccattttgatccgtggcgtacgctcggtttctgattttgaatatgagtggcaactggcgaatatgaaccgtcattttgccccagatctcgatagtgtctttttattgccttcacaaaatctctcttttgtttcttcttcactgatcaaagatgtagcacgtcatgacggcgatgtatcgacttttttacctgaagtggttgctacagcaatgctacagaaactcggtaagcgttaa

SEQ ID NO: 43190 - protein, 161 aa, Proteus mirabilis
MKNKAIYPGTFDPITYGHIDILTRAAGMFDTVLLAIAASARKNPMFSLEERVALAKEVTQHLPNVEVVGFCELMANFAKKQQATILIRGVRSVSDFEYEWQLANMNRHFAPDLDSVFLLPSQNLSFVSSSLIKDVARHDGDVSTFLPEVVATAMLQKLGKR

SEQ ID NO: 43191 - DNA, 480 bp, Prochlorococcus marinus subsp
  CDS (1)..(480): transl_table=11
atgaaaatactttacccaggtacatttgatcctttaacaaatggacatctagatttaatacaaagagctgaaaaattatttggaaatgtagttgttgctgttctagaaaatactagtaaaaaaccaacctttaatcttaataaaagattagtacaaataaaaaatgctgtatctcatctatcaaatatcagtgttatttcctatgagggtctcacagtcgattgtgcaaaagaagttaacgcaaatttaatattaagagggctaagagctatgagtgattttgaatatgaacttcaaatagcacatacaaataaatctcttaatactgaaatagaaaccatttttctttctactaatacaaactatagttttttaagtagttccttggttaaagaggttgctaaatttggaggtgaaatagatcacatggtacctgattccgtagaaagagatctaaagaattattttaaaaaagattaa

SEQ ID NO: 43192 - protein, 159 aa, Prochlorococcus marinus subsp
MKILYPGTFDPLTNGHLDLIQRAEKLFGNVVVAVLENTSKKPTFNLNKRLVQIKNAVSHLSNISVISYEGLTVDCAKEVNANLILRGLRAMSDFEYELQIAHTNKSLNTEIETIFLSTNTNYSFLSSSLVKEVAKFGGEIDHMVPDSVERDLKNYFKKD

SEQ ID NO: 43193 - DNA, 486 bp, Pseudomonas putida
  CDS (1)..(486): transl_table=11
atgaaccgagtgttgtacccgggtactttcgaccccattaccaaaggccatggcgatctggtcgagcgcgcttcgcggctattcgaccacgtgatcatcgcggtggcggccagccccaagaaaaaccctttgttccccctggaacaacgggttgagctcgcccgtgaggtcaccaagcacctgcccaatgtcgaagtcatcggcttctcttccctgttggcgcatttcgccaaggaacagggcgccaacgtcttcctgcgtggcctgcgtgcggtgtccgacttcgagtacgagttccagctggcgaacatgaaccggcaactggcccctgatgtcgagagcctgttcctgacgccgtcggagcgttattcgttcatttcctcgaccctggtccgggagattgcagcgctgggcggtgatatcagcaagttcgtccacccggtggtggccgacgcactgactgaacgcttcaagaagcaagcctga

SEQ ID NO: 43194 - protein, 161 aa, Pseudomonas putida
MNRVLYPGTFDPITKGHGDLVERASRLFDHVIIAVAASPKKNPLFPLEQRVELAREVTKHLPNVEVIGFSSLLAHFAKEQGANVFLRGLRAVSDFEYEFQLANMNRQLAPDVESLFLTPSERYSFISSTLVREIAALGGDISKFVHPVVADALTERFKKQA

SEQ ID NO: 43195 - DNA, 492 bp, Rhizobium meliloti
  CDS (1)..(492): transl_table=11
atgaccacggctttctatcccggctccttcgatccgatcaccaacgggcatctcgatgtactcgtgcaggcattgaacgtcgcagccaaagtcatcgtcgcgattggcgttcatcccggcaaggcaccgcttttctccttcgacgaaagggcggatctcatccgggccgcgcttgaggagacgttgccggagagggcagccgacatatccgtcgtctctttcgacaacctggtggtggatgccgcccgcgagcacggcgcaaggctgctggtccgggggctccgcgatggaacggacctcgactacgagatgcagatggcgggcatgaaccggcagatggcccctgacattcagaccctgttcctgccggcaggtaccgcctcccggcccattacggccacattggttcggcagatcgcggctatgggcggtgacgtcagcgctttcgtccctggggcggttcaccaggcgctgcaggcgaagcgcaaataa

SEQ ID NO: 43196 - protein, 163 aa, Rhizobium meliloti
MTTAFYPGSFDPITNGHLDVLVQALNVAAKVIVAIGVHPGKAPLFSFDERADLIRAALEETLPERAADISVVSFDNLVVDAAREHGARLLVRGLRDGTDLDYEMQMAGMNRQMAPDIQTLFLPAGTASRPITATLVRQIAAMGGDVSAFVPGAVHQALQAKRK

SEQ ID NO: 43197 - DNA, 540 bp, Rhodopirellula baltica
  CDS (1)..(540): transl_table=11
ttgactctgaattcctcccacaccgacgctggcgggttgtcgcattccattgcggtgtacaccgggtcgttcgatcctgtcacgcttgggcatttgcacatcatcgagcgtgcttcaaagctattcgacacgttggtggtcgggatcggcatcaatgccgacaagaagtctttgttcaacccggaagagcgcattgaattggtgcaaaccatttcaaatcacctgcccaatgtccgtgttcaaaccttcgatggtttggcggtcgattttgttcgttcactgggggccggcgtcatggtgcgcggtatccgcccgcttaccgacatcgctggtgagttcacgatgatgatggccaatcgccagttggatgcggatatcgaaaccgtgttcttgatggccgacgaacggttcgcgcacgtcagttcatcgttgttgaaacagattgctgcactcagtgagaacgacgatcacttggcgaagtttgtgcctcgtcccatcattccatcactgcgggccaagctggctgctccatccgtgtga

SEQ ID NO: 43198 - protein, 179 aa, Rhodopirellula baltica
MTLNSSHTDAGGLSHSIAVYTGSFDPVTLGHLHIIERASKLFDTLVVGIGINADKKSLFNPEERIELVQTISNHLPNVRVQTFDGLAVDFVRSLGAGVMVRGIRPLTDIAGEFTMMMANRQLDADIETVFLMADERFAHVSSSLLKQIAALSENDDHLAKFVPRPIIPSLRAKLAAPSV

SEQ ID NO: 43199 - DNA, 510 bp, Rhodopseudomonas palustris
  CDS (1)..(510): transl_table=11
atgtcacgcatcgcgctttatccgggctctttcgatcccgtcaccaacggccatctcgacgtcgtccgccacgccgtggcgctgtgcgacaagctcgtcgtggcgatcggcattcatcccggcaagaagccgctgttcaccaccgaggagcgcctagcgatggtcgaacgggtgttcggcccggtcgccaaggcggccggctgcgacttcggctgcaccacctatgacaatctcaccgtgacagcggccgagaaggtgggggcgacactcatgatccgcggcctgcgcgacggctccgatctcgactatgagatgcagatcgccggcatgaacgagaccatggcgccggcaatccataccgtgttcctgccggcttctgtcggtgtgcgcccgatcaccgccacactggtgcggcagatcgctgcgatgggcggcgacgtctcggcctttgttccggccgaggtggcgtccgccctgaaatccaagtttgccgccggctcgccggcataa

SEQ ID NO: 43200 - protein, 169 aa, Rhodopseudomonas palustris
MSRIALYPGSFDPVTNGHLDVVRHAVALCDKLVVAIGIHPGKKPLFTTEERLAMVERVFGPVAKAAGCDFGCTTYDNLTVTAAEKVGATLMIRGLRDGSDLDYEMQIAGMNETMAPAIHTVFLPASVGVRPITATLVRQIAAMGGDVSAFVPAEVASALKSKFAAGSPA

SEQ ID NO: 43201 - DNA, 480 bp, Salmonella typhi
  CDS (1)..(480): transl_table=11
atgcaaaaacgggcgatttatccaggcacgtttgatccgattactaacggtcatctcgatattgtgacgcgcgcaacgcagatgttcgaccatgtcattctggccatcgccgccagccccggcaagaaacccatgttcaccctgaacgaacgtgtggcgctggcgcaaaaagcgaccgcacacctgggtaacgtagaggtggtgggttttagcgacctgatggccaatttcgcccgcgacagacaggcgaatatcctgattcgtggtctgcgcgcggtggcggattttgaatatgaaatgcagttggcgcatatgaatcgccatctgatgccgcaactggaaagcgttttcctgatgccgtccaaagagtggtcgtttatttcatcgtcgctggtcaaagaagtggcgcgccatcagggcgatgtgacccactttctgcccgacaatgtgcatcaggcgctaatggataagttgaaataa

SEQ ID NO: 43202 - protein, 159 aa, Salmonella typhi
MQKRAIYPGTFDPITNGHLDIVTRATQMFDHVILAIAASPGKKPMFTLNERVALAQKATAHLGNVEVVGFSDLMANFARDRQANILIRGLRAVADFEYEMQLAHMNRHLMPQLESVFLMPSKEWSFISSSLVKEVARHQGDVTHFLPDNVHQALMDKLK

SEQ ID NO: 43203 - DNA, 480 bp, Salmonella typhimurium
  CDS (1)..(480): transl_table=11
atgcaaaaacgggcgatttatccaggtacgtttgatccgattactaacggtcatctcgatattgtgacgcgcgcaacgcagatgttcgaccatgtcattctggctatcgccgccagccccagcaagaaacccatgttcaccctggacgaacgtgtggcgctggcgcaaaaagcgaccgcacacctgggtaacgtagaggtggtaggctttagcgacctgatggccaatttcgcccgcgacagacaggcgaatatcctgattcgtggtctgcgcgcggtggcggattttgaatatgaaatgcagttggcgcatatgaatcgccatctgatgccgcaactggaaagcgttttcctgatgccgtccaaagagtggtcgtttatttcatcgtcgctggtcaaagaagtggcgcgccatcagggcgatgtgacccactttctgccggacaatgtgcatcaggcgctaatggataagttgaaataa

SEQ ID NO: 43204 - protein, 159 aa, Salmonella typhimurium
MQKRAIYPGTFDPITNGHLDIVTRATQMFDHVILAIAASPSKKPMFTLDERVALAQKATAHLGNVEVVGFSDLMANFARDRQANILIRGLRAVADFEYEMQLAHMNRHLMPQLESVFLMPSKEWSFISSSLVKEVARHQGDVTHFLPDNVHQALMDKLK

SEQ ID NO: 43205 - DNA, 486 bp, Serratia marcescens
  CDS (1)..(486): transl_table=11
atgaccagcaaagccatctatcccgggacgttcgatcccatgaccaacggccacctggatttagtgacgcgcgcgtcgctgatgttcgatcacgtgattctggccatcgccgccagcccgagcaaaaagccgctgttcagcctggatgagcgtgtggcgctggcgacgcaggtcacctcgcatctggacaatgtggaggtactgggcttcagcgagctgatggcgcatttcgccgctcaccagaatgccaatatcttggtgcgtggcctgcgggcggtgtctgactttgagtacgaactgcagctggcgaacatgaaccgccatttgatgccgacgctggaaagcgtgttcctgatgccttccgaagagtggtcgttcatctcctcatcactggtgaaggaggtcgcccgccacggcggcgatatcgcgcctttcctgcccgatgtggtcactcaggcgctgatggcgaagctcgccgccgcgtga

SEQ ID NO: 43206 - protein, 161 aa, Serratia marcescens
MTSKAIYPGTFDPMTNGHLDLVTRASLMFDHVILAIAASPSKKPLFSLDERVALATQVTSHLDNVEVLGFSELMAHFAAHQNANILVRGLRAVSDFEYELQLANMNRHLMPTLESVFLMPSEEWSFISSSLVKEVARHGGDIAPFLPDVVTQALMAKLAAA

SEQ ID NO: 43207 - DNA, 483 bp, Staphylococcus aureus
  CDS (1)..(483): transl_table=11
atggaacatacaatagcggtcattccgggtagttttgaccccattacttatggtcatttagacattattgagagaagtacagatagatttgatgaaattcatgtctgtgttcttaaaaatagtaaaaaagaaggtacgtttagtttagaagagcgtatggatttaattgaacaatctgttaaacatttacctaatgtcaaggttcatcaatttagtggtttactagtcgattattgtgaacaagtaggagctaaaacaatcatacgtggtttaagagcagtcagtgattttgaatatgaattacgcttaacttcaatgaataaaaagttgaacaatgaaattgaaacgttatatatgatgtctagtactaattattcatttataagttcaagtattgttaaagaagttgcagcttatcgagcagatatttctgaattcgttccaccttatgttgaaaaggcattgaagaagaaatttaagtaa

SEQ ID NO: 43208 - protein, 160 aa, Staphylococcus aureus
MEHTIAVIPGSFDPITYGHLDIIERSTDRFDEIHVCVLKNSKKEGTFSLEERMDLIEQSVKHLPNVKVHQFSGLLVDYCEQVGAKTIIRGLRAVSDFEYELRLTSMNKKLNNEIETLYMMSSTNYSFISSSIVKEVAAYRADISEFVPPYVEKALKKKFK

SEQ ID NO: 43209 - DNA, 480 bp, Streptomyces avermitilis
  CDS (1)..(480): transl_table=11
ttgcgccgcgccgtctgtcccgggtcattcgacccgatcaccaacggacatctcgacatcatcgcccgcgcctccaagctgtacgacgtggtgcacgtcgcggtgatgatcaaccagtccaagaagggcctgttcgaggtcgacgagcggatcgagctgatccgccaggtcaccgcggaattcgggaacgtcgaggtggagtccttccacggcctcctcgtcgacttctgcaagcagcgcgacatccccgcgatcgtcaagggcctgcgcgccgtcagcgacttcgactacgagctgcagatggcccagatgaacatcggcctctcgggcgtggagaccctcttcgtccccaccaaccccacctacagcttcctgtcctcctcgctcgtcaaggaggtggcggcctggggcggcgacgtctcgcatctggtgccgccggcggtcctggaagccctcaacgggcgcctcaagcaggactga

SEQ ID NO: 43210 - protein, 159 aa, Streptomyces avermitilis
MRRAVCPGSFDPITNGHLDIIARASKLYDVVHVAVMINQSKKGLFEVDERIELIRQVTAEFGNVEVESFHGLLVDFCKQRDIPAIVKGLRAVSDFDYELQMAQMNIGLSGVETLFVPTNPTYSFLSSSLVKEVAAWGGDVSHLVPPAVLEALNGRLKQD

SEQ ID NO: 43211 - DNA, 480 bp, Streptomyces coelicolor
  CDS (1)..(480): transl_table=11
gtgcgccgtgccgtctgtcccgggtcgttcgacccgatcaccaacggacacctcgacatcatcgcccgggcctccagcctgtacgacgaggtctacgtcgccgtgatgatcaaccaggcgaagaagggcctgttcgagatcgaggagcggatcgacctcatccgccgggtcaccgccgagtacgggaacgtccgcgtggagtccttccacggtctgctcgtcgacttctgcaagcagcgcgagatcccggccatcgtcaagggcctgcgggcggtcagcgacttcgactacgagttgcagatggcccagatgaacaacggcctctccggtgtggagaccctcttcatccccaccaaccccacctacagcttcctgtcgtcctccctggtcaaggaggtcgcgacctggggcggcgacgtcgcccacctggtgccgccgctggtcctcgaagccctcacggagcgcctgaggaaccgctga

SEQ ID NO: 43212 - protein, 159 aa, Streptomyces coelicolor
MRRAVCPGSFDPITNGHLDIIARASSLYDEVYVAVMINQAKKGLFEIEERIDLIRRVTAEYGNVRVESFHGLLVDFCKQREIPAIVKGLRAVSDFDYELQMAQMNNGLSGVETLFIPTNPTYSFLSSSLVKEVATWGGDVAHLVPPLVLEALTERLRNR

SEQ ID NO: 43213 - DNA, 489 bp, Streptococcus pneumoniae
  CDS (1)..(489): transl_table=11
atgtcagataagattggcttattcacaggctcatttgatccgatgacaaatgggcatctggatatcattgaacgggcgagcagactttttgataagctttatgtgggtattttttttaatccccacaaacaaggatttctccctcttgaaaatcgtaaacgggggttagaaaaggctgtgaaacatttgggaaatgttaaagtcgtgtcttctcatgataaattggtggtcgatgtcgcaaaaagactgggggctacttgcctagtgcgaggtttgagaaatgcgtcggatttgcaatatgaagccagttttgattactacaatcatcagctgtcttctgatatagagactatttatttacatagtcgacctgaacatctctatatcagttcatcaggcgttagagagcttttgaagtttggtcaggatattgcctgctatgttcccgagagtattttggaggaaataagaaatgaaaaaaaagattag

SEQ ID NO: 43214 - protein, 162 aa, Streptococcus pneumoniae
MSDKIGLFTGSFDPMTNGHLDIIERASRLFDKLYVGIFFNPHKQGFLPLENRKRGLEKAVKHLGNVKVVSSHDKLVVDVAKRLGATCLVRGLRNASDLQYEASFDYYNHQLSSDIETIYLHSRPEHLYISSSGVRELLKFGQDIACYVPESILEEIRNEKKD

SEQ ID NO: 43215 - DNA, 489 bp, Symbiobacterium thermophilum
  CDS (1)..(489): transl_table=11
gtgatcaaggcagtctgtcccgggagcttcgatcccgtgacgctcggacatctcgatatcatcgaacgggccgcccgcaccttcgacgaggtcgtcgtggcggtgctgaccaacccccgcaaggagccgctcttcaccgtggaggagcggctggagatgttgcgggaggctaccaagcacatccccaatgtctcggtggcggccgcggacggcctgctggtggacttcgcccgccagcaggggtgccgggtcatcgtgaagggactccggccgattcaggacttcgaatacgaatggcagatgggcgccgtgaaccggcagttggacgggaacatcgagacgtgcttcctcatgagccgcatcgagtacgcacacctctcctcgagcatcgtgcgggaactggcctacttcggccgcccgacggaggggctggtgccgccgttcaccgcaaggcggctccgggaaaagttcgccaagacacaaccctga

SEQ ID NO: 43216 - protein, 162 aa, Symbiobacterium thermophilum
MIKAVCPGSFDPVTLGHLDIIERAARTFDEVVVAVLTNPRKEPLFTVEERLEMLREATKHIPNVSVAAADGLLVDFARQQGCRVIVKGLRPIQDFEYEWQMGAVNRQLDGNIETCFLMSRIEYAHLSSSIVRELAYFGRPTEGLVPPFTARRLREKFAKTQP

SEQ ID NO: 43217 - DNA, 507 bp, Synechococcus elongatus
  CDS (1)..(507): transl_table=11
atgctggctgtttatcctggaagttttgatcccattaccttgggacacttggacattattgagcggggagcacgcctatttagcgaagtcattgtggcgatcgcccacaaccctcagaaaaaagctctctttagtgttggccaacgcattaagcaagtgcaggcggccaccagccacttaaaaaatgtgcgagtggatacgtttgatggtctgaccgttgagtacgcgcgatcgcagcgggcaagggttcttctgcgggggttgcgggtgttgtcagactttgaatacgagcttcagatgtcccacaccaataaaagcctctggccagagattgagacagtgttcctcaccacgtccaatgagtatagtttcttaagtagtagcttagtaaaagaaattgcccgatttggcggtaatgttcgtcatcttgtaccagccaatgttgccaaggatttagaagcatgctttactcaaacaccgatcccatctcaacgaccgctggagtaa

SEQ ID NO: 43218 - protein, 168 aa, Synechococcus elongatus
MLAVYPGSFDPITLGHLDIIERGARLFSEVIVAIAHNPQKKALFSVGQRIKQVQAATSHLKNVRVDTFDGLTVEYARSQRARVLLRGLRVLSDFEYELQMSHTNKSLWPEIETVFLTTSNEYSFLSSSLVKEIARFGGNVRHLVPANVAKDLEACFTQTPIPSQRPLE

SEQ ID NO: 43219 - DNA, 483 bp, Thermus thermophilus
  CDS (1)..(483): transl_table=11
atgcacgtggtctaccctgggagctttgaccccctgaccaacggccacctggacgtgatccagcgggcgagccggctctttgagaaggtgaccgtggccgtcctggagaacccgagcaagcggggccagtacctcttcagcgccgaggagcgcctggccatcattcgggaggccacggcccacctggccaacgtggaggcggccaccttctccggcctcctcgtggacttcgtgcgccgggtgggggcccaggccatcgtgaaggggcttagggcggtgtccgactacgagtacgagctccagatggcccacctgaaccgccagctctacccgggcctcgagaccctcttcatcctcgccgccacccgctactccttcgtctccagcaccatggtcaaggagatcgcccgctacgggggggatgtctccaagctcgtacccccggcgaccctgagggccctgaaggccaagttgggccagtag

SEQ ID NO: 43220 - protein, 160 aa, Thermus thermophilus
MHVVYPGSFDPLTNGHLDVIQRASRLFEKVTVAVLENPSKRGQYLFSAEERLAIIREATAHLANVEAATFSGLLVDFVRRVGAQAIVKGLRAVSDYEYELQMAHLNRQLYPGLETLFILAATRYSFVSSTMVKEIARYGGDVSKLVPPATLRALKAKLGQ

SEQ ID NO: 43221 - DNA, 483 bp, Thermoanaerobacter tengcongensis
  CDS (1)..(483): transl_table=11
atgagagtagcgatttatccaggaagttttgatccggtaacttatgggcatattgacataataaaaagaggtgcaaatctttttgacaagctgattgtagctgttttattaaatcctgctaaaagacctttattttctattcaagaaagaatagagcttctgaaagaagtgaccaaggatattcccaatgttgaagtagattattttgacggattgctggtagaatacgctaaaaaagttaatgccagtgcaataataaaggggctcagaatggtttctgattttgaatacgagtttcaaatggctcttgtaaataaaaagctaaatccgtcagttgagacaatcttcttaatgaccagtccaaaatacgggtatctaagttctagccttgtcaaggaaattgctcaatttggcggatgcctttccgagtttgtacctgatattgtggcagaaaggctcatggaaaagtttaagaaaagttaa

SEQ ID NO: 43222 - protein, 160 aa, Thermoanaerobacter tengcongensis
MRVAIYPGSFDPVTYGHIDIIKRGANLFDKLIVAVLLNPAKRPLFSIQERIELLKEVTKDIPNVEVDYFDGLLVEYAKKVNASAIIKGLRMVSDFEYEFQMALVNKKLNPSVETIFLMTSPKYGYLSSSLVKEIAQFGGCLSEFVPDIVAERLMEKFKKS

SEQ ID NO: 43223 - DNA, 495 bp, Vibrio cholerae
  CDS (1)..(495): transl_table=11
gtgagccaaaaacgtctttcccgagtgatttaccctggcacttttgaccccatcactaacggtcatctggatttgattgagcgcgccgcgcaaatgtttgatgaagtgatcatcgccgtagccgccagcccgagtaaaaatactctgtttacgctcgaagagcgcgtcgagttcgcgcgccaagtcacctcacatctggataacgtcagcgcgaaaggcttttccggattgttagttgattttgccaaagccgaaaaagcgaatgtattgatccgcggcttgcgtaccacagtcgattttgaatacgaatttggtctcaccaatatgtatcgccgtttaatgccgggcttagagagtgtgtttttaacgcccgccgaagagcacgcatttatctcgtcgaccttagtccgggaagtggcaatccacggcggtaatgtggatgagtttgtgcccgctattgtcgctaacgctctacatcaaaagaaaaaaatctag

SEQ ID NO: 43224 - protein, 164 aa, Vibrio cholerae
MSQKRLSRVIYPGTFDPITNGHLDLIERAAQMFDEVIIAVAASPSKNTLFTLEERVEFARQVTSHLDNVSAKGFSGLLVDFAKAEKANVLIRGLRTTVDFEYEFGLTNMYRRLMPGLESVFLTPAEEHAFISSTLVREVAIHGGNVDEFVPAIVANALHQKKKI

SEQ ID NO: 43225 - DNA, 495 bp, Vibrio vulnificus
  CDS (1)..(495): transl_table=11
gtgtcgaaaaaagccctttccagagttgtctacccaggcacttttgatccgattactaatggccatctcgatttaatcgagcgtgcggcaaaaatgtttgatgaggtaatcatcgctgttgcggccagtccaagtaagaacaccatgtttaccctcgaagaacgtgttgatttcgccagacaagtcacccgtcatctcgacaatgtcaccgcacaaggctttagcggtttgatggtcgattttgcacgcgcggttgatgcaaatgtcttaattcgcggcctacgcaccaccgtcgactttgaatacgaatttggcttaaccaatatgtatcgtcgattgctgccagggcttgaaagcgtctttctgaccccttcggaagaacatgcctttatctcttccaccatcgtacgtgaagtggccattcatggcggcgatgtaacgcaattcgttcccaccgtggtggcagaagcactgcatcaaaagaaaaaagtgtga

SEQ ID NO: 43226 - protein, 164 aa, Vibrio vulnificus
MSKKALSRVVYPGTFDPITNGHLDLIERAAKMFDEVIIAVAASPSKNTMFTLEERVDFARQVTRHLDNVTAQGFSGLMVDFARAVDANVLIRGLRTTVDFEYEFGLTNMYRRLLPGLESVFLTPSEEHAFISSTIVREVAIHGGDVTQFVPTVVAEALHQKKKV

SEQ ID NO: 43227 - DNA, 507 bp, Wigglesworthia glossinidia brevipalpis
  CDS (1)..(507): transl_table=11
atgaaaaataagaaagctatatttcctggaacgttcgatccattgaccaatggacatataaatttaatagaaagatctataaaagtatttgataaagtaataataatagtagcaaataattttaaaaaaaatcaattatttaatttgaaagaaaggatgcatcatataaaaaaagctactaaaaattacaaaaatataaaggtgataggaataaatgatcttactactaattttgcaagaaaaaataatattaaaatattaataagaggtataagaaatatttttgattttgaaaatgaattcataatggaaaaaacaaacaaatatctttatccagaaatggaaagcatatttatgatatcagatataaattggtcatatatgtcttctagtatgataaaagaaataatattttatggaggaaacttagactattttcttcctgaatgcgtaataaaagatattaaaaaaaaaattaaaagaaaaattgttagaaatttaaattaa

SEQ ID NO: 43228 - protein, 168 aa, Wigglesworthia glossinidia brevipalpis
MKNKKAIFPGTFDPLTNGHINLIERSIKVFDKVIIIVANNFKKNQLFNLKERMHHIKKATKNYKNIKVIGINDLTTNFARKNNIKILIRGIRNIFDFENEFIMEKTNKYLYPEMESIFMISDINWSYMSSSMIKEIIFYGGNLDYFLPECVIKDIKKKIKRKIVRNLN

SEQ ID NO: 43229 - DNA, 507 bp, Wolbachia pipientis wMel
  CDS (1)..(507): transl_table=11
atgaacattaatgacaaaataggaatctaccctggcacatttgaccctataacttttgggcatcttgacataatcaaaagagcgtgtaaactagtcgataaattaataataggagttgcagaaaacgttaataagcatactgcctttgacacaaagctacgcacaagcatggctgaaaatgaaatcaaagggctaggaattgatgcagatgttatatcttttaatgggttgctagtgaagtttgccaaagagcagaatgcttctgttattattaggggattaagagcagtatcggattttgattacgagtttcaaatgagctgggtaaattataaacttcttcctgaaatcgaaaccatatttcttcctgcttctgaagatactcaatttatctcatcaagctttgtaaaggaaatagcaagattaggagaagatgttagcaaatttgtatcaaaaggtgttcaaaacgaattgattaacctgaataggataaaaaatggagaatag

SEQ ID NO: 43230 - protein, 168 aa, Wolbachia pipientis wMel
MNINDKIGIYPGTFDPITFGHLDIIKRACKLVDKLIIGVAENVNKHTAFDTKLRTSMAENEIKGLGIDADVISFNGLLVKFAKEQNASVIIRGLRAVSDFDYEFQMSWVNYKLLPEIETIFLPASEDTQFISSSFVKEIARLGEDVSKFVSKGVQNELINLNRIKNGE

SEQ ID NO: 43231 - DNA, 486 bp, Wolinella succinogenes
  CDS (1)..(486): transl_table=11
atgcacaaaaccgcaatttatcccggcacattcgaccctctcactaatggacacatggatattatccgccgagcgagcatgatttttgatacgcttattgtggccgtggccaagtctgccacgaaagagccgatgttccccttgagtgagcgtgaagagatgctgaggcttgcaaccagggagtgccctagtgtgcgcgtggaatcgtttgacacgctactggctgattttgcccaagagcgtggagcgtgcatccttgtgcggggacttagagcggtgagcgactttgagtatgagcttcagatgggatacgccaacgcctcgctcaatccagccctagagacgatctatctcatgccaagcctccaaaatgccttcatcagctcctcggtgattcgctccattcttctccataaagggaaaatctcccatctggtgccccctgtggtgtgtgaatatattcaaaagaggcgctcatgtatgtag

SEQ ID NO: 43232 - protein, 161 aa, Wolinella succinogenes
MHKTAIYPGTFDPLTNGHMDIIRRASMIFDTLIVAVAKSATKEPMFPLSEREEMLRLATRECPSVRVESFDTLLADFAQERGACILVRGLRAVSDFEYELQMGYANASLNPALETIYLMPSLQNAFISSSVIRSILLHKGKISHLVPPVVCEYIQKRRSCM

SEQ ID NO: 43233 - DNA, 507 bp, Xanthomonas axonopodis pv
  CDS (1)..(507): transl_table=11
atgagcgttgccaatagccgcaccgccgtctatcccggtaccttcgacccgatcaccaatgggcatatcgacctggtgaatcgcgccgcgccgttgttcgagcgggtggtggtgggcgtggcgtacagcccctccaagggcccggcgttgtcgctggagcgccgcgtggcgctggcccaggaagcgctggcggcgcatgccaatgtggaagtgcgcggcttcgataccttgctggcgcatttcgtgcgcgagatgggcgccggcgtgctgctgcgcggcctgcgcgcagtgtccgacttcgaatacgaattccagatggccagcatgaaccgccatctgatcccggaggtggaaacgctgtttctcaccccggccgagcaatacagcttcatctcgtcctcgctggtgcgcgaaatcgcgcggctgggcggggatgtgtccggcttcgtgccggcatcggttgtcgaggccttgcggcaggtgcggcagtcccgcgcgcaggcctga

SEQ ID NO: 43234 - protein, 168 aa, Xanthomonas axonopodis pv
MSVANSRTAVYPGTFDPITNGHIDLVNRAAPLFERVVVGVAYSPSKGPALSLERRVALAQEALAAHANVEVRGFDTLLAHFVREMGAGVLLRGLRAVSDFEYEFQMASMNRHLIPEVETLFLTPAEQYSFISSSLVREIARLGGDVSGFVPASVVEALRQVRQSRAQA

SEQ ID NO: 43235 - DNA, 507 bp, Xanthomonas campestris pv
  CDS (1)..(507): transl_table=11
atgagcgtggccaacagccgcaccgctgtctatcccggtaccttcgacccgatcaccaatggccatatcgacctggtgaaccgcgccgcgccgttgttcgagcgtgtggtggtgggcgttgcctacagcccgtccaagggcccggcgctgccgttggagcgtcgcgtcgaactcgcccaggaagccctggcggcgcatgccaatgtagaagtgcgcggtttcgataccttgctggcgcatttcgtgcgcgacatgggcgccggcgtgctgctgcgcggcctgcgtgcggtgtccgatttcgaatacgaattccagatggccagcatgaatcgccatctgatccccgaggtggaaacgctgttcctcaccccggccgagcagtacagcttcatctcgtcctcgctggtgcgcgaaatcgcgcggctgggcggggatgtgtccggtttcgttccggcgtcggtcgtcgatgccttgcgccaggtgcgtgaatcgcgcgcccaggtctga

SEQ ID NO: 43236 - protein, 168 aa, Xanthomonas campestris pv
MSVANSRTAVYPGTFDPITNGHIDLVNRAAPLFERVVVGVAYSPSKGPALPLERRVELAQEALAAHANVEVRGFDTLLAHFVRDMGAGVLLRGLRAVSDFEYEFQMASMNRHLIPEVETLFLTPAEQYSFISSSLVREIARLGGDVSGFVPASVVDALRQVRESRAQV

SEQ ID NO: 43237 - DNA, 480 bp, Yersinia pestis
  CDS (1)..(480): transl_table=11
atgatcaccaaagccatctatccggggacatttgatcccattactaatgggcatttggatttagtgacgcgcgcatccgcgatgttcagtcatgtgatcttggctattgcggacagttccagcaaaaagccaatgtttacgttggatgagcgtgtcgcactcgctaaaaaggtgactgcgccgctaaagaatgttgaggttctgggattcagtgaactgatggctgagtttgccaaaaagcacaatgcgaatattttggttcggggtttgcgttcagtatcagattttgaatatgagtggcaactggccaatatgaaccgccacttaatgcccaaattggaaagcgtatttctgataccatcagagaaatggtcgtttatctcttcctcattagtgaaagaagtggcgcgccacggtggggatatcacgccattcctgcccaaaccggttaccaaagcattattggccaaattggcctaa

SEQ ID NO: 43238 - protein, 159 aa, Yersinia pestis
MITKAIYPGTFDPITNGHLDLVTRASAMFSHVILAIADSSSKKPMFTLDERVALAKKVTAPLKNVEVLGFSELMAEFAKKHNANILVRGLRSVSDFEYEWQLANMNRHLMPKLESVFLIPSEKWSFISSSLVKEVARHGGDITPFLPKPVTKALLAKLA

SEQ ID NO: 43239 - DNA, 480 bp, Yersinia pseudotuberculosis
  CDS (1)..(480): transl_table=11
atgatcaccaaagccatctatccggggacatttgatcccattactaatgggcatttggatttagtgacgcgcgcatccgcgatgttcagtcatgtgatcttggctattgcggacagttccagcaaaaagccaatgtttacgttggatgagcgtgtcgcactcgctaaaaaggtgactgcgctgctaaagaatgttgaggttctgggattcagtgaactgatggctgagtttgccaaaaagcacaatgcgaatattttggtacggggtttgcgttcagtatcagattttgaatatgagtggcaactggccaatatgaaccgccacttaatgcccaaattggaaagcgtatttctgatgccatcagagaaatggtcgtttatctcttcctcattagtgaaagaagtggcgcgccacggtggggatatcacgccattcctgcccaaaccggttaccaaagcattattggccaaattggcctaa

SEQ ID NO: 43240 - protein, 159 aa, Yersinia pseudotuberculosis
MITKAIYPGTFDPITNGHLDLVTRASAMFSHVILAIADSSSKKPMFTLDERVALAKKVTALLKNVEVLGFSELMAEFAKKHNANILVRGLRSVSDFEYEWQLANMNRHLMPKLESVFLMPSEKWSFISSSLVKEVARHGGDITPFLPKPVTKALLAKLA

SEQ ID NO: 43241 - DNA, 537 bp, Zymomonas mobilis
  CDS (1)..(537): transl_table=11
atggacgctctctctccgaaaaagcagcccattgcgctttatcccggtacttttgaccctgtcacgctaggtcatcttgatattatccggcgcggcgctcgtatcttcgaccatcttattattgcggttgccgagaatccggggaaatcgccgcttttctcatcagaagagcgggcttccatgatccgtcatgaaataagccgcctcgaaaacccaacaaaaagccgtatcgaagttattatctataactctttgctgatggattgcgtcgaaagccaaggcgcatcggttattctaaggggtttgcgtgcggttgccgattttgaatatgaatatcaaatggcgggcatgaaccagcaaataaataataaaatcgaaactgtctttttgatggcagacagcgttttgcaacctgttgcttcccgtttggtcaaggaaatcgctttttataatggcaatatcacgccttttgtgccgccttatgtcgtacaaaaattacaagaagccgttacaagaaaaaaatctttccaagattag

SEQ ID NO: 43242 - protein, 178 aa, Zymomonas mobilis
MDALSPKKQPIALYPGTFDPVTLGHLDIIRRGARIFDHLIIAVAENPGKSPLFSSEERASMIRHEISRLENPTKSRIEVIIYNSLLMDCVESQGASVILRGLRAVADFEYEYQMAGMNQQINNKIETVFLMADSVLQPVASRLVKEIAFYNGNITPFVPPYVVQKLQEAVTRKKSFQD

SEQ ID NO: 43243 - DNA, 24 bp, Artificial sequence
  primer
atgcaaaaacgggcgatttatccg

SEQ ID NO: 43244 - DNA, 23 bp, Artificial sequence
  primer
ttacgctaacttcgccatcagcg

SEQ ID NO: 43245 - protein, 156 aa, Artificial sequence
  consensus sequence
  Variant (3)..(3): Xaa in position 3 is any amino acid
  Variant (7)..(7): Xaa in position 7 is any amino acid
  Variant (9)..(9): Xaa in position 9 is any amino acid
  Variant (12)..(12): Xaa in position 12 is any amino acid
  Variant (14)..(16): Xaa in position 14 to 16 is any amino acid
  Variant (18)..(34): Xaa in position 18 to 34 is any amino acid
  Variant (35)..(36): Xaa in position 35 to 36 is any or no amino acid
  Variant (38)..(40): Xaa in position 38 to 40 is any amino acid
  Variant (41)..(42): Xaa in position 41 to 42 is any or no amino acid
  Variant (44)..(47): Xaa in position 44 to 47 is any amino acid
  Variant (49)..(68): Xaa in position 49 to 68 is any amino acid
  Variant (69)..(74): Xaa in position 69 to 74 is any or no amino acid
  Variant (76)..(84): Xaa in position 76 to 84 is any amino acid
  Variant (86)..(89): Xaa in position 86 to 89 is any amino acid
  Variant (94)..(96): Xaa in position 94 to 96 is any amino acid
  Variant (99)..(99): Xaa in position 99 is any amino acid
  Variant (102)..(102): Xaa in position 102 is any amino acid
  Variant (104)..(107): Xaa in position 104 to 107 is any amino acid
  Variant (109)..(110): Xaa in position 109 to 110 is any amino acid
  Variant (112)..(114): Xaa in position 112 to 114 is any amino acid
  Variant (115)..(116): Xaa in position 115 to 116 is any or no amino acid
  Variant (118)..(119): Xaa in position 118 to 119 is any amino acid
  Variant (121)..(130): Xaa in position 121 to 130 is any amino acid
  Variant (133)..(134): Xaa in position 133 to 134 is any amino acid
  Variant (136)..(138): Xaa in position 136 to 138 is any amino acid
  Variant (140)..(142): Xaa in position 140 to 142 is any amino acid
  Variant (143)..(145): Xaa in position 143 to 145 is any or no amino acid
  Variant (147)..(150): Xaa in position 147 to 150 is any amino acid
  Variant (151)..(151): Xaa in position 151 is any or no amino acid
  Variant (153)..(155): Xaa in position 153 to 155 is any amino acid
PGXFDPXTXGHXDXXXRXXXXXXXXXXXXXXXXXXXKXXXXXFXXXXRXXXXXXXXXXXXXXXXXXXXXXXXXXLXXXXXXXXXAXXXXRGLRXXXDFXYEXQXXXXNXXLXXXXXEXXFXXXXXXXXXXSSXXVXXXAXXXXXXGXXXXXVXXXV

SEQ ID NO: 43246 - protein, 36 aa, Artificial sequence
  protein pattern
  Variant (2)..(2): Xaa in position 2 is Ser or Thr
  Variant (3)..(3): Xaa in position 3 is Phe or Tyr
  Variant (4)..(4): Xaa in position 4 is Asp or Asn
  Variant (6)..(6): Xaa in position 6 is Phe, Ile, Leu, Met or Val
  Variant (8)..(8): Xaa in position 8 is any amino acid
  Variant (11)..(11): Xaa in position 11 is any amino acid
  Variant (13)..(13): Xaa in position 13 is Ile, Leu, Met or Val
  Variant (14)..(14): Xaa in position 14 is Phe, Ile, Leu or Val
  Variant (15)..(15): Xaa in position 15 is any amino acid
  Variant (17)..(23): Xaa in position 17 to 23 is any amino acid
  Variant (24)..(25): Xaa in position 24 to 25 is any or no amino acid
  Variant (27)..(33): Xaa in position 27 to 33 is any amino acid
  Variant (34)..(35): Xaa in position 34 to 35 is any or no amino acid
GXXXPXTXGHXDXXXRXXXXXXXXXVXXXXXXXXXK

SEQ ID NO: 43247 - protein, 24 aa, Artificial sequence
  protein pattern
  Variant (2)..(3): Xaa in position 2 to 3 is any amino acid
  Variant (4)..(4): Xaa in position 4 is Phe, Ile, Leu, Met or Val
  Variant (5)..(5): Xaa in position 5 is Phe, Ile, Leu or Val
  Variant (6)..(6): Xaa in position 6 is Lys or Arg
  Variant (8)..(8): Xaa in position 8 is Ile, Leu, Met or Val
  Variant (10)..(12): Xaa in position 10 to 12 is any amino acid
  Variant (14)..(14): Xaa in position 14 is any amino acid
  Variant (15)..(16): Xaa in position 15 to 16 is any or no amino acid
  Variant (18)..(23): Xaa in position 18 to 23 is any amino acid
AXXXXXGXRXXXDXXXEXXXXXXN

SEQ ID NO: 43248 - DNA, 1383 bp, Escherichia coli
  CDS (1)..(1383): transl_table=11
atggctactggaaagattgtccaggtaatcggcgccgtagttgacgtcgaattccctcaggatgccgtaccgcgcgtgtacgatgctcttgaggtgcaaaatggtaatgagcgtctggtgctggaagttcagcagcagctcggcggcggtatcgtacgtaccatcgcaatgggttcctccgacggtctgcgtcgcggtctggatgtaaaagacctcgaacacccgattgaagtcccggtaggtaaagcgactctgggccgtatcatgaacgtactgggtgaaccggtcgacatgaaaggcgagatcggtgaagaagagcgttgggcgattcaccgcgcagcaccttcctacgaagagctgtcaaactctcaggaactgctggaaaccggtatcaaagttatcgacctgatgtgtccgttcgctaagggcggtaaagttggtctgttcggtggtgcgggtgtaggtaaaaccgtaaacatgatggagctcattcgtaacatcgcgatcgagcactccggttactctgtgtttgcgggcgtaggtgaacgtactcgtgagggtaacgacttctaccacgaaatgaccgactccaacgttatcgacaaagtatccctggtgtatggccagatgaacgagccgccgggaaaccgtctgcgcgttgctctgaccggtctgaccatggctgagaaattccgtgacgaaggtcgtgacgttctgctgttcgttgacaacatctatcgttacaccctggccggtacggaagtatccgcactgctgggccgtatgccttcagcggtaggttatcagccgaccctggcggaagagatgggcgttctgcaggaacgtatcacctccaccaaaactggttctatcacctccgtacaggcagtatacgtacctgcggatgacttgactgacccgtctccggcaaccacctttgcgcaccttgacgcaaccgtggtactgagccgtcagatcgcgtctctgggtatctacccggccgttgacccgctggactccaccagccgtcagctggacccgctggtggttggtcaggaacactacgacaccgcgcgtggcgttcagtccatcctgcaacgttatcaggaactgaaagacatcatcgccatcctgggtatggatgaactgtctgaagaagacaaactggtggtagcgcgtgctcgtaagatccagcgcttcctgtcccagccgttcttcgtggcagaagtattcaccggttctccgggtaaatacgtctccctgaaagacaccatccgtggctttaaaggcatcatggaaggcgaatacgatcacctgccggagcaggcgttctacatggtcggttccatcgaagaagctgtggaaaaagccaaaaaactttaa

SEQ ID NO: 43249 - protein, 460 aa, Escherichia coli
MATGKIVQVIGAVVDVEFPQDAVPRVYDALEVQNGNERLVLEVQQQLGGGIVRTIAMGSSDGLRRGLDVKDLEHPIEVPVGKATLGRIMNVLGEPVDMKGEIGEEERWAIHRAAPSYEELSNSQELLETGIKVIDLMCPFAKGGKVGLFGGAGVGKTVNMMELIRNIAIEHSGYSVFAGVGERTREGNDFYHEMTDSNVIDKVSLVYGQMNEPPGNRLRVALTGLTMAEKFRDEGRDVLLFVDNIYRYTLAGTEVSALLGRMPSAVGYQPTLAEEMGVLQERITSTKTGSITSVQAVYVPADDLTDPSPATTFAHLDATVVLSRQIASLGIYPAVDPLDSTSRQLDPLVVGQEHYDTARGVQSILQRYQELKDIIAILGMDELSEEDKLVVARARKIQRFLSQPFFVAEVFTGSPGKYVSLKDTIRGFKGIMEGEYDHLPEQAFYMVGSIEEAVEKAKKL

SEQ ID NO: 43250 - DNA, 1994 bp, Arabidopsis thaliana
  CDS (65)..(1744)
attcatttgataaccctagtagctccttttttctctatctcgctttctctgtttcaccacagtcatggcgagtcggcgaatcttatcatcgcttctccgttcttcttcgagtagatctacttctaaatcctccttgatcgggagccgaaacccgaggcttttatcccccggtcccgcgcatcgagccgctccatgtgggactctccttggccgagtcgccgagtattcgacttcttctccggctaattcggctgcgccatcttctgctcctgctaaagatgagggaaagaagacctatgattacggtggcaaaggcgcgatcgggcgtgtgtgtcaggttattggtgccattgttgatgtgagattcgaagatcaggagggattgcctccgatcatgacatctctcgaggtacaggatcatccaacaaggttggtccttgaggtgtctcatcacttgggtcaaaatgtcgttaggaccattgctatggatggtactgagggtctcgtccgtggaaggaaggttctcaacactggtgctccaatcactgttcctgttggaagggccacccttggacgtatcatgaacgttcttggagaacctattgacgagagaggcgaaattaagaccgagcattacttacccattcacagagacgctccagctttggttgatttggccaccggtcaagagattctcgctactggtattaaggttgttgatctccttgctccttaccaaagaggaggaaagattgggctttttggcggtgctggtgttgggaaaacagtgctcattatggaactgattaacaatgttgccaaagctcatggtggtttctccgtgtttgctggtgtgggagaacggacccgtgaaggcaatgatttgtacagagaaatgattgagagtggtgtcatcaagctaggagagaaacagtctgagagcaaatgtgccctagtgtatggacaaatgaatgagcccccgggtgctcgtgcccgtgttggactgactggtttgactgttgctgagtatttccgtgatgctgaaggccaagatgtcttgcttttcattgacaacatcttccgtttcacccaggccaactctgaagtgtctgcgttgctcggtcgtatcccgtctgctgtggggtaccagccaactctggcttccgatcttggtgctcttcaagagcgaatcacaaccaccaagaaaggttcaattacctctgtccaagccatctatgtccctgctgatgatttgacagatcctgctcctgccacaacttttgctcacttggatgccacaactgtgctttcaagacagatttctgagcttggtatctaccctgctgtggatcctttggattcgacgtcccgtatgctctcgccccacattctaggtgaggagcactacaacacagctcgtggtgtgcagaaagtgttgcagaattacaagaatttgcaagatattatcgccattttgggaatggatgagctaagtgaagatgacaagctgactgttgcccgtgcccgtaagatccagagattcttgagtcagccattccatgttgctgaaatcttcactggtgcccctggaaaatatgtcgaccttaaagaaaacatcaacagtttccagggtttgttggatggcaagtacgatgatctttccgaacaatcgttttacatggttggaggtatcgatgaggtggttgcaaaggcagagaagatcgctaaagagtcagcagcttagaagctggatccatctcttgcatatgcttaatacctgtctgtttcttgtgacaataacgaaaagaaaaaaaccactgcctgtgagttacccacaccaagcggaatttgagttccgtatttatagtttctttcgaattccttgagagctacgagatgatgctgaacatacccttcattcccttgtactcagatttttggttcatttacttccttgacttgttgaaataaaggttaagcaagtcttgcagatt

SEQ ID NO: 43251 - protein, 559 aa, Arabidopsis thaliana
MASRRILSSLLRSSSSRSTSKSSLIGSRNPRLLSPGPAHRAAPCGTLLGRVAEYSTSSPANSAAPSSAPAKDEGKKTYDYGGKGAIGRVCQVIGAIVDVRFEDQEGLPPIMTSLEVQDHPTRLVLEVSHHLGQNVVRTIAMDGTEGLVRGRKVLNTGAPITVPVGRATLGRIMNVLGEPIDERGEIKTEHYLPIHRDAPALVDLATGQEILATGIKVVDLLAPYQRGGKIGLFGGAGVGKTVLIMELINNVAKAHGGFSVFAGVGERTREGNDLYREMIESGVIKLGEKQSESKCALVYGQMNEPPGARARVGLTGLTVAEYFRDAEGQDVLLFIDNIFRFTQANSEVSALLGRIPSAVGYQPTLASDLGALQERITTTKKGSITSVQAIYVPADDLTDPAPATTFAHLDATTVLSRQISELGIYPAVDPLDSTSRMLSPHILGEEHYNTARGVQKVLQNYKNLQDIIAILGMDELSEDDKLTVARARKIQRFLSQPFHVAEIFTGAPGKYVDLKENINSFQGLLDGKYDDLSEQSFYMVGGIDEVVAKAEKIAKESAA

SEQ ID NO: 43252 - DNA, 1931 bp, Arabidopsis thaliana
  CDS (17)..(1687)
aaacacacacccactcatggcgtctcggagagtcttatcatctcttctccgttcatcttccggtagatctgccgccaaattaggcaaccgtaaccccaggcttccttctccttcacccgcgcgtcacgccgctccatgtagctacctcctcggccgcgtcgccgagtacgcgacctcttcacctgcaagctcagctgcgccatcttctgctcctgctaaggatgaggggaagaagacctatgattacggtggcaaaggtgcgatcgggcgtgtttgccaggtcattggtgccattgtcgatgtgagatttgaggatcaggaaggattgccaccaatcatgacatctctcgaggtgcaggatcaccccacaaggctagtgcttgaggtgtctcatcacttgggtcagaatgtcgtcaggaccattgctatggatggtactgagggtctcgttcgtggaaggaaagtcctcaacactggcgctccaatcactgtacctgtcggaagggctactcttggacgtatcatgaatgttcttggagaacctattgacgaaagaggcgaaattaagaccgaacattacttacctattcacagagatgcaccggctttggttgatctagctactgggcaagagatcctggccactggtattaaggttgttgatcttcttgctccttaccaaagaggaggaaagattggtctctttggcggtgctggtgttgggaaaactgtgcttattatggagctgatcaacaatgttgccaaagctcatggtggtttctctgtgtttgctggtgtgggagaacgaacccgtgaaggcaatgacttgtacagagaaatgattgagagtggtgtcatcaagctaggcgaaaagcagtctgagagcaagtgtgctctagtgtacggacaaatgaatgagcccccgggtgcccgtgcccgtgttggactgactggtttgactgttgccgagtatttccgtgatgctgaaggccaagacgttttgcttttcattgacaacattttccgtttcactcaggccaactctgaagtgtctgctttactcggtcgtatcccgtctgctgtgggataccagccaactctggcttctgatcttggtgctcttcaagagcgaattacaaccaccaggaaagggtctatcacctcagtccaagccatctatgtacctgctgatgatttgactgatcctgctcctgctacaacttttgctcacttggacgccacaactgtgctctcaagacagatttctgagcttggtatctaccctgctgtggatcctttggattcaacatcccgtatgctgtcacctcacattctgggagaggagcattacaacacggctcgtggcgtgcagaaagttctacagaactacaagaacttgcaagatattattgcaattttgggtatggatgagctaagtgaagatgacaagttgactgttgcccgtgcccgtaagatccagagattcttgagtcagccgttccacgttgctgagatcttcactggtgcccctggaaaatatgtcgaccttaaagaaaatatcaacagtttccagggtttgttggatggcaagtacgatgatctttccgaacaatcgttttacatggttggaggtatcgatgaggtggttgcaaaggcagagaagatcgctaaagagtcagcagcttaagagattgattcagatctttcatgcttaatacttctcttttttttcctgacaataacgaaaaaaaaaaaccaatgcgtgcgactctccgaccaaacggaatctgagttccgtaattatagtttcttttggttcaaattccatgagagctggcaagatgatactgaacagatccattcactgttaatcaaatttttggttgttttgcttcctttgttgaaataaagatgaaaaatcttgcagattc

SEQ ID NO: 43253 - protein, 556 aa, Arabidopsis thaliana
MASRRVLSSLLRSSSGRSAAKLGNRNPRLPSPSPARHAAPCSYLLGRVAEYATSSPASSAAPSSAPAKDEGKKTYDYGGKGAIGRVCQVIGAIVDVRFEDQEGLPPIMTSLEVQDHPTRLVLEVSHHLGQNVVRTIAMDGTEGLVRGRKVLNTGAPITVPVGRATLGRIMNVLGEPIDERGEIKTEHYLPIHRDAPALVDLATGQEILATGIKVVDLLAPYQRGGKIGLFGGAGVGKTVLIMELINNVAKAHGGFSVFAGVGERTREGNDLYREMIESGVIKLGEKQSESKCALVYGQMNEPPGARARVGLTGLTVAEYFRDAEGQDVLLFIDNIFRFTQANSEVSALLGRIPSAVGYQPTLASDLGALQERITTTRKGSITSVQAIYVPADDLTDPAPATTFAHLDATTVLSRQISELGIYPAVDPLDSTSRMLSPHILGEEHYNTARGVQKVLQNYKNLQDIIAILGMDELSEDDKLTVARARKIQRFLSQPFHVAEIFTGAPGKYVDLKENINSFQGLLDGKYDDLSEQSFYMVGGIDEVVAKAEKIAKESAA

SEQ ID NO: 43254 - DNA, 1772 bp, Oryza sativa
  CDS (40)..(1590)
ctccttcatcacccaacccaacccatatcatctcccaccatgctcaagagcggtctccagcgctctctgcgcgcctccgtccgccgaccggcgctccgcaaccagttccagcccgtcaggagtcaattcgctcccgcgctcactgctcgctatgcatcgaccgggtctcagaaggaaggctccattgcgagtgtcatcggtgccgttgtagacgtcaagtttgagggcgagcagctccctgctattctcaatgccatcacaactcagaacggcgacaacaagctggttctcgaggtcgcacaacatttgggtgagaacgtcgtccgctgcattgctatggacggtaccgagggtctcgtccgtggcgctaaggccgtcggcactggtgcacccatcaccatccccgtcggacacggtactcttggtcgtatcatgaacgtcactggtgaccccattgacgagcgcggtcccatcaagaccgacaagttcgctcccattcacgccgatcccccggagttcaccgagcagtccacctccgctgaggtgctcgtcactggtatcaaggtcgtcgatcttttggctccctacgcccgtggtggaaagattggtctcttcggaggtgccggtgtcggaaagactgtgttcattcaggagttgatcaacaacatcgccaaggctcacggtggtttctccgtcttcactggtgtcggtgagcgtacccgtgagggtaatgatctgtaccacgaaatgcaggagacttccgtcatccagcttgagggagagtctaaggtcgcccttgtcttcggtcagatgaacgagcccccaggtgcccgtgcccgtgtcgccctcactggtttgaccgtggcagaatacttccgtgaccaggagggacaggatgtcttgctcttcattgacaacattttccgtttcacccaggccggttccgaggtgtctgctcttctcggtcgtatcccttctgccgtcggttaccagcccactttggccgtcgacatgggtgtcatgcaggagcgtatcaccaccacctccaaaggatctattacttccgtccaggccgtatacgtgcccgctgacgatttgactgatcccgctcccgccaccaccttcgcccatttggacgccaccactgtcttgtcccgtggtatctccgagttgggtatctaccctgctgtcgatcctctcgactccaagtcccgtatccttgatccccgtatcattggtcaggaccactacgacaccgccaccaaggtccagcagatcctccaggagtacaagtcgctccaggatatcattgctattttgggtatggacgaattgtcggaagctgataagcttaccgtcgagagggcccgcaagattcagcgtttcctttcccagcctttcgccgtcgcccaggtcttcactggtatcgagggcaagcttgtcgacctcaaggacaccatccgctctttcaaggctatcttgaatggtgagggtgatgacctccccgagggtgccttctacatggtcggtgatatggagtctgctcgcgccaagggtgagaagattcttgctgagctcgagaagtcatagacgccgcgtagagtggtgggtgagatatgaaagatccggccaatgtgtctacggcattttgctggtagttccgctttgtacaaaagatatacctcaaaaccgtggaacttcaggcgggtgcgtggtaggacgtggtatcctgtgtaatctatcttgcatgcaaagagacattttccttgttc

SEQ ID NO: 43255 - protein, 516 aa, Oryza sativa
MLKSGLQRSLRASVRRPALRNQFQPVRSQFAPALTARYASTGSQKEGSIASVIGAVVDVKFEGEQLPAILNAITTQNGDNKLVLEVAQHLGENVVRCIAMDGTEGLVRGAKAVGTGAPITIPVGHGTLGRIMNVTGDPIDERGPIKTDKFAPIHADPPEFTEQSTSAEVLVTGIKVVDLLAPYARGGKIGLFGGAGVGKTVFIQELINNIAKAHGGFSVFTGVGERTREGNDLYHEMQETSVIQLEGESKVALVFGQMNEPPGARARVALTGLTVAEYFRDQEGQDVLLFIDNIFRFTQAGSEVSALLGRIPSAVGYQPTLAVDMGVMQERITTTSKGSITSVQAVYVPADDLTDPAPATTFAHLDATTVLSRGISELGIYPAVDPLDSKSRILDPRIIGQDHYDTATKVQQILQEYKSLQDIIAILGMDELSEADKLTVERARKIQRFLSQPFAVAQVFTGIEGKLVDLKDTIRSFKAILNGEGDDLPEGAFYMVGDMESARAKGEKILAELEKS

SEQ ID NO: 43256 - DNA, 1546 bp, Oryza sativa
  CDS (4)..(1503)
attatgagaaccaatcctactacttctcgtcccggggtttctacagttgaagaaaaaagtacagggcgtatcgatcaaattattggacccgtgctggatgtcacttttcccccgggcaagttaccttatatttataatgctttggtagtcaagagtcgagacactgacggtacagcaattattaatgtaacttgtgaggtacaacaattattaggaaataatcgagttagagctgtagctatgagtgctacagatgggttgatgagaggaatggaagtgattgacacgggagctcctctcagtgttcctgtcggtggagctactcttggacgaattttcaacgttcttggggagcctgttgacaatttgggtcctgtagatactagtgcaacattccctattcatagatccgcgcccgcctttatcgagttagatacgaaattatccatctttgaaactggtattaaggtggtcgatcttttagctccttatcggcgtggaggaaaaatcggactatttgggggagctggagtaggtaaaacagtactcatcatggaattaatcaacaatattgctaaagctcacggcggcgtatccgtatttggcggagcaggggaacggactcgtgaaggaaatgatctttatatggaaatgaaggaatctggagtaattaatgaaaaaaatcttgaggaatcaaaggtagctctagtctatggccaaatgaatgaaccgccaggagctcgtatgagagttggtttgaccgccctaactatggcagaatatttccgagatgttaataagcaagacgtgcttctattcatcgataatatctttcgttttgttcaagcaggatcggaggtatctgccttattagggagaatgccctctgcagtgggttatcaacctactcttagtacagaaatgggttctttgcaagaaagaattacttctactaaaaagggatctataacttcgatccaagcggtttatgtacctgcggacgatttgaccgaccctgctcctgctacaacatttgcacatttggatgctactaccgtactttccagaggattagcttccaaagggatttatcctgcagtagatccttcagattcaacctcaactatgttacaacctcggatcgttggcaacgaacattatgaaactgcgcaaagagttaagcaaactttacaacgttacaaagaacttcaggacattatcgcaattcttgggttggatgaattatcggaggaggatcgtttaactgtagcaagagcacgaaaaattgagcgcttcttatcacaaccgttttttgtggcagaagtttttaccggttctccgggaaagtatgttggtcttgcagaaactattaggggatttcaactaatcctttccggagaattagacggcctacccgaacaggctttttatttggtgggtaacatcgatgaagctagcacgaaagctataaactttgaagacgagaacaaattgaagaaatgaaattaaatctttatgtactgactcctaagcgaattatttggaa

SEQ ID NO: 43257 - protein, 499 aa, Oryza sativa
MRTNPTTSRPGVSTVEEKSTGRIDQIIGPVLDVTFPPGKLPYIYNALVVKSRDTDGTAIINVTCEVQQLLGNNRVRAVAMSATDGLMRGMEVIDTGAPLSVPVGGATLGRIFNVLGEPVDNLGPVDTSATFPIHRSAPAFIELDTKLSIFETGIKVVDLLAPYRRGGKIGLFGGAGVGKTVLIMELINNIAKAHGGVSVFGGAGERTREGNDLYMEMKESGVINEKNLEESKVALVYGQMNEPPGARMRVGLTALTMAEYFRDVNKQDVLLFIDNIFRFVQAGSEVSALLGRMPSAVGYQPTLSTEMGSLQERITSTKKGSITSIQAVYVPADDLTDPAPATTFAHLDATTVLSRGLASKGIYPAVDPSDSTSTMLQPRIVGNEHYETAQRVKQTLQRYKELQDIIAILGLDELSEEDRLTVARARKIERFLSQPFFVAEVFTGSPGKYVGLAETIRGFQLILSGELDGLPEQAFYLVGNIDEASTKAINFEDENKLKK

SEQ ID NO: 43258 - DNA, 1683 bp, Nicotiana tabacum; cv. Wisconsin 38
  CDS (1)..(1683)
atggcttctcggaggcttctcgcctctctcctccgtcaatcggctcaacgtggcggcggtctaatttcccgatcgttaggaaactccatccctaaatccgcttcacgcgcctcttcacgcgcatcccctaagggattcctcttaaaccgcgccgtacagtacgctacctccgcagcggcaccggcatctcagccatcaacaccaccaaagtccggcagtgaaccgtccggaaaaattaccgatgagttcaccggcgctggttcgatcgggaaggtgtgccaggtcatcggtgccgtcgtggatgtgagattcgatgaaggtttgcccccaattttgaccgctctcgaagtgttggataatcagatccggcttgtgcttgaagtggctcagcatttgggcgagaatatggttaggactatagctatggatggtaccgaaggacttgttcgtggtcaacgcgtcctcaatactggttctcctatcaccgttcctgtcggtagagccacacttggccgtatcatcaatgtcattggagaggcaattgatgagagaggcccaattactaccgatcactttttgccaattcatcgtgaagctcctgcctttgtcgagcaagccactgaacaacaaattcttgtcactggtattaaggttgttgatcttctagctccataccaaagaggaggaaaaattgggctttttggtggtgctggtgtggggaaaactgtgcttattatggaactgattaacaatgttgcaaaagctcatggtggtttctctgtctttgctggtgttggtgaacgcactcgagagggtaatgatttgtaccgagaaatgattgaaagtggtgtcatcaagctaggcgagaagcaaagtgaaagcaagtgtgctcttgtatatggtcaaatgaatgagccccctggtgctcgtgcacgtgttggacttacaggtttgaccgtggctgagcacttccgagatgccgaggggcaggatgtgcttctctttattgacaatattttcaggtttactcaggctaactcagaagtgtctgctttgcttggtcgtatcccatctgctgtcggttatcaaccaactttggctacggatcttggaggtcttcaagaacgtatcaccaccaccaagaaaggttctattacatccgtgcaagctatttatgtgcctgctgatgacttgacagatccagcccctgctacaacctttgctcacttggatgccacaactgtcttgtctcgtcagatctctgagcttggtatctatcctgctgtcgatccacttgattctacatcccgtatgctctcgcctcacattttgggagaggatcactacaatactgctcgtggggtacagaaagttcttcaaaactacaagaatcttcaagatattattgctattttgggtatggatgagctcagtgaagatgataagatgacagttgcgcgtgcacgtaaaatccaaaggttccttagccagcctttccatgttgctgaagttttcacgggtgcccctggaaagtatgtcgacttgaaggagagcattaacagtttccagggagtgttggatggcaaatatgatgacctttcagagcaatcgttttatatggttggtggaatcgacgaggtcattgccaaagcagagaagattgccaaggaatctgctgcctag

SEQ ID NO: 43259 - protein, 560 aa, Nicotiana tabacum; cv. Wisconsin 38
MASRRLLASLLRQSAQRGGGLISRSLGNSIPKSASRASSRASPKGFLLNRAVQYATSAAAPASQPSTPPKSGSEPSGKITDEFTGAGSIGKVCQVIGAVVDVRFDEGLPPILTALEVLDNQIRLVLEVAQHLGENMVRTIAMDGTEGLVRGQRVLNTGSPITVPVGRATLGRIINVIGEAIDERGPITTDHFLPIHREAPAFVEQATEQQILVTGIKVVDLLAPYQRGGKIGLFGGAGVGKTVLIMELINNVAKAHGGFSVFAGVGERTREGNDLYREMIESGVIKLGEKQSESKCALVYGQMNEPPGARARVGLTGLTVAEHFRDAEGQDVLLFIDNIFRFTQANSEVSALLGRIPSAVGYQPTLATDLGGLQERITTTKKGSITSVQAIYVPADDLTDPAPATTFAHLDATTVLSRQISELGIYPAVDPLDSTSRMLSPHILGEDHYNTARGVQKVLQNYKNLQDIIAILGMDELSEDDKMTVARARKIQRFLSQPFHVAEVFTGAPGKYVDLKESINSFQGVLDGKYDDLSEQSFYMVGGIDEVIAKAEKIAKESAA

SEQ ID NO: 43260 - DNA, 1377 bp, Legionella pneumophila
  CDS (1)..(1377): transl_table=11
atgagcttaggaactgtggtagaagtaattggtgcggtagttgacgtagaatttcctcgtgatagcgtgcctaaagtcaatgatgcgttaaagcttgttgatagtgatctggtttttgaagtgcagcagcaacttggagacggagttgtgcgtactattgccatgggaacaaccgatggtttaaagcgaggattaaaagcagaaaatacaggccatcctattcaagtgccagtaggtaagaaaactttgggacgcattatggatgttcttgggcgtcctgtagatgatgctgggcctatcgatgctgaagagacttgggctattcatcgtaaagcaccaagttatgaagagcaagctggcagccaggaattattggaaactggtattaaagtaattgatttgctttgcccttttgccaagggaggtaaagttggtctattcggtggtgccggtgtaggcaaaaccgttaacatgatggaattaatacgaaacattgcaattgagcatagcggttattcagtgtttgcaggggttggtgaacgtacccgtgaaggaaacgacttctatcatgagatgaaagactctaatgtattggataaagtatcgcttgtttatggtcagatgaatgagccgccaggaaaccgtttgcgtgttgctctaaccggtttgactatggctgaaaaattccgggatgaagggcgagacgttcttttgtttatcgataatatttatcgttataccttggctggggttgaagtatctgcgctgttaggccgtatgccttctgcagtaggatatcagccgacattagcagaggaaatgggtatgctgcaagagcgcattacctccacaaaaacaggttctattacttccatacaagctgtatatgtacctgcagacgacttgactgacccatcaccagctacaacctttgcacacttggatgccactgtagtattgtctcgtcaaattgctgaattaggtatttatcctgcggttgatccgcttgattctacatcacgtcagctggatccattgattgtaggtcaagagcattacgataccgcacgtcgtgtacagcaaaccttgcaacgatataaagaattaaaagatattattgcaattttgggtatggatgaactgtctgaggaagacaaacgagttgtaactcgagctcgtaaaatccaaagattcttatctcagccatttttcgttgcggaagtatttacaggttctcctggtaaatacgtatcgcttaaagataccatcaaaggtttccaaggcattcttgctggtgaatatgatgatttgcctgaacaggcattttatatggttggaagcatcgaggaagctgttgcaaaagctaaaaccttatga

SEQ ID NO: 43261 - protein, 458 aa, Legionella pneumophila
MSLGTVVEVIGAVVDVEFPRDSVPKVNDALKLVDSDLVFEVQQQLGDGVVRTIAMGTTDGLKRGLKAENTGHPIQVPVGKKTLGRIMDVLGRPVDDAGPIDAEETWAIHRKAPSYEEQAGSQELLETGIKVIDLLCPFAKGGKVGLFGGAGVGKTVNMMELIRNIAIEHSGYSVFAGVGERTREGNDFYHEMKDSNVLDKVSLVYGQMNEPPGNRLRVALTGLTMAEKFRDEGRDVLLFIDNIYRYTLAGVEVSALLGRMPSAVGYQPTLAEEMGMLQERITSTKTGSITSIQAVYVPADDLTDPSPATTFAHLDATVVLSRQIAELGIYPAVDPLDSTSRQLDPLIVGQEHYDTARRVQQTLQRYKELKDIIAILGMDELSEEDKRVVTRARKIQRFLSQPFFVAEVFTGSPGKYVSLKDTIKGFQGILAGEYDDLPEQAFYMVGSIEEAVAKAKTL

SEQ ID NO: 43262 - DNA, 1929 bp, Oryza sativa
  CDS (15)..(1670)
gcgatctcccggccatggcgacgcgccgggccctctcctccctcgtccgcgccgcctccaggctccgcggggcctcgcccgccccgcgcccgcgcgggccgctccaccgaccgtcgccatcggggtacctcttcaaccgcgccgccgcgtacgccacggccgccgcggcgaaggagcggcctcccgcgcccgcgacggggaaggccacgggtggaggtaagatcaccgacgagttcaccggcgccggcgccattgggcaggtgtgccaggtcatcggcgccgtcgtcgacgtgcggtttgacgaggggctgcctcccatcctcacggcgctcgaggtgctcgaccacaacatccgcctcgtgctcgaggtggcgcagcaccttggcgagaacatggtgcgcaccatcgctatggacgggactgaggggcttgtccgcggtcagcgcgtcctcaacaccggctccccaatcactgttcctgttggcagggccacgcttggacgtatcatgaatgttattggtgagccaattgatgagaagggtgacataacaacgaaccacttccttcccatccatcgtgaggcgcctgcttttgttgagcaagccacagaacagcaaattcttgttactggaattaaggttgtggatctcgttgcgccctaccaaagaggtggaaagatcggtctttttggtggtgcaggagtcggcaaaactgtccttattatggagttgatcaacaatgttgctaaggcccatggtggtttctctgtgtttgctggtgttggtgaacgtacccgtgaaggtaatgatctttacagggaaatgattgaaagtggtgtcatcaagctaggtgacaaacagagtgaaagcaagtgtgctcttgtctacgggcaaatgaatgagcccccgggtgctcgtgctcgtgttgggttgaccggtttgactgttgcggttcatttccgtgatgccgaaggtcaagatgtgcttttgttcattgacaacatttttcgtttcactcaggcgaactctgaggtgtctgctcttcttggacgtattccatctgctgtgggatatcaaccaactcttgctactgatcttggaggacttcaagagcgaattacaactacaaagaagggttccattacatctgtccaagctatttatgtgcctgctgatgacttgacggatcctgctcctgctactacttttgcacatcttgatgctactactgtgttgtcacgacagatctctgagcttggtatttaccctgctgtcgatcctctggactccacatccagaatgctctccccccatgttttgggtgaggatcactacaacactgctcgtggtgtccaaagggttcttcagaactacaagaatcttcaggatattattgcaattttgggtatggacgagctcagtgaagatgacaggttgaccgtccgtcgcgcaaggaagatccagcgtttcttgagccagcccttccatgtggctgaagttttcacgggtgctcctgggaagtacgtggagctgaaggagagcgtcaacagtttccagggtgttttggatgggaaatatgatgaccttcccgagcagtcattctatatggtgggaggcattgaggaagtcattgctaaagctgagaagatcgccaaggagtcggcttcatagatctcttcattgttgttaagttctgtacaagttaaattttggattctggctttctatatgcccgttctgtagccaggacgtgattacaagcaggggtgacatcttcagatgagcgatgtttttttgtcttccttttctccttttacccctaataaggaaccgcagtgacattgtattgtgctgcacaaaagtactcggaacttcgaaagcatgtgtcctttataatgcagatccatgaagcataggatcaaaaaaaaaa

SEQ ID NO: 43263 - protein, 551 aa, Oryza sativa
MATRRALSSLVRAASRLRGASPAPRPRGPLHRPSPSGYLFNRAAAYATAAAAKERPPAPATGKATGGGKITDEFTGAGAIGQVCQVIGAVVDVRFDEGLPPILTALEVLDHNIRLVLEVAQHLGENMVRTIAMDGTEGLVRGQRVLNTGSPITVPVGRATLGRIMNVIGEPIDEKGDITTNHFLPIHREAPAFVEQATEQQILVTGIKVVDLVAPYQRGGKIGLFGGAGVGKTVLIMELINNVAKAHGGFSVFAGVGERTREGNDLYREMIESGVIKLGDKQSESKCALVYGQMNEPPGARARVGLTGLTVAVHFRDAEGQDVLLFIDNIFRFTQANSEVSALLGRIPSAVGYQPTLATDLGGLQERITTTKKGSITSVQAIYVPADDLTDPAPATTFAHLDATTVLSRQISELGIYPAVDPLDSTSRMLSPHVLGEDHYNTARGVQRVLQNYKNLQDIIAILGMDELSEDDRLTVRRARKIQRFLSQPFHVAEVFTGAPGKYVELKESVNSFQGVLDGKYDDLPEQSFYMVGGIEEVIAKAEKIAKESAS

SEQ ID NO: 43264 - DNA, 1551 bp, Bombyx mori
  CDS (1)..(1551)
atgttgggggcaataagtcgagttggaagcggcattttagccgttaaatcagttgctgagaaatccctttcagaatgtggaaaaatcgttgcagtcaatgccgttaacaagagggactatgctgctaaatctgcaggaaaaggccaaggtaaggttgttgccgttatcggtgctgtggtagatgtgcaattcgaagataacctgcctccgattctaaatgcccttgaggtgcaaaatcgatctccccgcctcgtacttgaggtagcccaacatttgggtgagaacacagttcggaccattgccatggacggtactgaaggcttagtccgtgggcaacccgtactagactctggctcaccaattcgtatcccggtgggagctgaaaccctcggtcgcatcatcaatgtaatcggcgaaccgattgacgagcgtggtcccatccccaccgacaagactgctgctattcatgctgaagctccagagtttgtcgacatgtctgtgcagcaggagattctcgtaactggtataaaagtcgtcgatctgctcgctccttatgccaaaggaggaaagattgggttgtttggcggagctggtgtgggcaaaactgtattgattatggaactgatcaacaatgttgccaaagcccatggtggttactctgtgtttgctggagtaggagagcgtactcgtgaaggaaatgatttataccacgagatgattgaatctggtgtgatttctctaaaagacaaaacatccaaggtagctctagtatatggtcaaatgaacgaacctcctggtgcccgtgctcgtgttgcccttactggtctcactgttgctgaatatttccgtgatcaagaaggacaggatgtactgctcttcattgacaacattttccgtttcactcaggctggatcagaagtgtctgctctgcttggtcgtatcccatctgctgtaggatatcagcctactctggctactgacatgggtactatgcaggaaagaattaccaccaccaagaaaggttccatcacatctgtacaggctatttatgtaccagctgatgacttgacagatcctgctccagctaccacttttgctcacttggatgctaccactgtactctccagagccattgctgaattgggtatctacccagctgtggatcctcttgactcaacttcccgtatcatggaccccaatattattggagctgagcactacaatgttgcacgtggagttcagaaaattcttcaggactacaaatccctgcaggacattattgctattttgggtatggacgagttgtctgaagaagacaagttgacagtggcacgtgcacgtaaaattcagaggttcctctcacaacctttccaagtagctgaggtgttcactggacatgcgggtaaactagtaccacttgaggaaactatcaaaggattctccaaaattctagcaggggactatgatcatttgccagaagtagcattctacatggttggacctattgaggaggttgtggccaaagctgatactcttgctaagaatgcttaa

SEQ ID NO: 43265 - protein, 516 aa, Bombyx mori
MLGAISRVGSGILAVKSVAEKSLSECGKIVAVNAVNKRDYAAKSAGKGQGKVVAVIGAVVDVQFEDNLPPILNALEVQNRSPRLVLEVAQHLGENTVRTIAMDGTEGLVRGQPVLDSGSPIRIPVGAETLGRIINVIGEPIDERGPIPTDKTAAIHAEAPEFVDMSVQQEILVTGIKVVDLLAPYAKGGKIGLFGGAGVGKTVLIMELINNVAKAHGGYSVFAGVGERTREGNDLYHEMIESGVISLKDKTSKVALVYGQMNEPPGARARVALTGLTVAEYFRDQEGQDVLLFIDNIFRFTQAGSEVSALLGRIPSAVGYQPTLATDMGTMQERITTTKKGSITSVQAIYVPADDLTDPAPATTFAHLDATTVLSRAIAELGIYPAVDPLDSTSRIMDPNIIGAEHYNVARGVQKILQDYKSLQDIIAILGMDELSEEDKLTVARARKIQRFLSQPFQVAEVFTGHAGKLVPLEETIKGFSKILAGDYDHLPEVAFYMVGPIEEVVAKADTLAKNA

SEQ ID NO: 43266 - DNA, 1542 bp, Bombyx mori
  CDS (1)..(1542)
atgtttcctactgtctgcagagtaggccgtttggctacgaagacagtagtaaacaatgctactgaaaaagcatcactggtgactggagccgctgtgaacaaacgtgactatgcagccaaggcttccggcaaagggcaaggtaaggtagttgccgttattggtgccgtagtggatgttcagtttgaagacaacttgccgccgatcctaaatgcccttgaggtgcaaaatcgatctccccgcttggtcttggaggtggcgcagcacttgggagagaacactgtacgtaccattgccatggacggtactgaaggcttagtccgtgggcaacccgtactagactctggctcaccaattcgtatcccggtgggagctgaaaccctcggtcgcatcatcaatgtaatcggcgaaccgattgacgagcgtggtcccatccccaccgacaagactgctgctattcatgctgaagctccagagtttgtcgacatgtctgtgcagcaggagattctcgtaactggtataaaagtcgtcgatctgctcgctccttatgccaaaggaggaaagattgggttgtttggcggagctggtgtgggcaaaactgtattgattatggaactgatcaacaatgttgccaaagcccatggtggttactctgtgtttgctggagtaggagagcgtactcgtgaaggaaatgatttataccacgagatgattgaatctggtgtgatttctctaaaagacaaaacatccaaggtagctctagtatatggtcaaatgaacgaacctcctggtgcccgtgctcgtgttgcccttactggtctcactgttgctgaatatttccgtgatcaagaaggacaggatgtactgctcttcattgacaacattttccgtttcactcaggctggatcagaagtgtctgctctgcttggtcgtatcccatctgctgtaggatatcagcctactctggctactgacatgggtactatgcaggaaagaattaccaccaccaagaaaggttccatcacatctgtacaggctatttatgtaccagctgatgacttgacagatcctgctccagctaccacttttgctcacttggatgctaccactgtactctccagagccattgctgaattgggtatctacccagctgtggatcctcttgactcaacttcccgtatcatggaccccaatattattggagctgagcactacaatgttgcacgtggagttcagaaaattcttcaggactacaaatccctgcaggacattattgctattttgggtatggacgagttgtctgaagaagacaagttgacagtggcacgtgcacgtaaaattcagaggttcctctcacaacctttccaagtagctgaggtgttcactggacatgcgggtaaactagtaccacttgaggaaactatcaaaggattctccaaaattctagcaggggactatgatcatttgccagaagtagcattctacatggttggacctattgaggaggttgtggccaaagctgatactcttgctaagaatgcttaa

SEQ ID NO: 43267 - protein, 513 aa, Bombyx mori
MFPTVCRVGRLATKTVVNNATEKASLVTGAAVNKRDYAAKASGKGQGKVVAVIGAVVDVQFEDNLPPILNALEVQNRSPRLVLEVAQHLGENTVRTIAMDGTEGLVRGQPVLDSGSPIRIPVGAETLGRIINVIGEPIDERGPIPTDKTAAIHAEAPEFVDMSVQQEILVTGIKVVDLLAPYAKGGKIGLFGGAGVGKTVLIMELINNVAKAHGGYSVFAGVGERTREGNDLYHEMIESGVISLKDKTSKVALVYGQMNEPPGARARVALTGLTVAEYFRDQEGQDVLLFIDNIFRFTQAGSEVSALLGRIPSAVGYQPTLATDMGTMQERITTTKKGSITSVQAIYVPADDLTDPAPATTFAHLDATTVLSRAIAELGIYPAVDPLDSTSRIMDPNIIGAEHYNVARGVQKILQDYKSLQDIIAILGMDELSEEDKLTVARARKIQRFLSQPFQVAEVFTGHAGKLVPLEETIKGFSKILAGDYDHLPEVAFYMVGPIEEVVAKADTLAKNA

SEQ ID NO: 43268 - DNA, 1869 bp, Drosophila melanogaster
  CDS (1)..(1869)
atgttggtatcatgggctaaaatggctacagcatgtgcaaggattggcctgaagatgggcccgggtaccgggggttaccggggcaactatcttggtaatcctgtggtgtttccccgctaccttcatgcctccctgtccctttgggatgacaaggataagaaaaagtcgggcgatgagtgcgagcccgagccgcaggaagtctgcaagacggacgcggaactggttaagaagaaggatgaagccgaggatgagtgtgaggaaaagaagtccgacggcggaggcaagaagctggagagcaagggtcgcaagggtgtcatccatgctgtcatcggtcccgtcatcgatgtctacttcgaggaggaggttccggaggtgctcaacgcgctccaggtgcaggatgctcccattgctaacctagtgctggaggtattccaccatctgggcaacaatatcgtccgttgcgtggccatggattccaccgaaggactgcgtcgtggtcagccggtcctcgataccggctatcccatccgtgtggcggtgggcaaggccgttttgggacgcatcctcaacgtggtgggcgatcccattgacgatcgcggtgaggtcaagtcggatttctactcctttatccataacgaagccccggagctgaccgacttgagcgtgaagccagagatcctagtcactggcatcaaggtgattgatttgctggctccttacgtaaagggcggtaagatcgggctgtttggaggcgccggcgtgggcaagacggtgctcattatggagctgatcaataacatagccaagtcccatggcggctactccgtgttcgtgggcgcaggagagcgtacccgcgagggcaacgatctgtaccacgagatgatcgagtccaaggtcatctccctggaggatgactcctcgaaggtggttctggtctttggccagatgaacgagcccccgggcgctcgctcccgtgtggtgctcaccggactgaccatcgccgaatatttccgcgacgtggacgggcaggatgtgctgctcttcattgacaacattttccgtttcacccaggcgggatcggaggtgtcggctttgctcgggcgcattccctcggcggtgggctatcagcctaccttaggaaccgacatgggcaccatgcaggaacggatcactagtacccgcaacggttccatcacttctgttcaggctgtctacgtgcccgccgatgatctcagtgatcctgctccggcggctaccttttcgcatttggacgctaccaccgtgctctcgcgtcccattgctgagttgggtatttatccggctgtggatcccttggactcctcgtcccgcatcctcgatcccgatgttgtaggcgaggagcactacaatgtggctcgagcagttcagaagactctgcaggcttacaagtcgctgcaggacatcatcgccattctgggaatggatgaactgtctgaggaggataagttgacggtggccagggctcgcaagatgcagcgtttcctttcgcagccgttccaagtggctgagatcttcactggacacccgggaaagctggtgcctgtggagaagtgtgtggagggcttcaaacgtttgttgaatggtgaatatgacgatatcccggagattgccttctacatggtcggagatgccgaagaggtgctggccaaggccacccaactggccgcctccatgtcaggggatgctcctccagccaaggcggaagccaagaaggacgaaaagaaggacacaaagccagaggagggcaagaaggaggagccgcccaagggagaagacaaaaaggaggaggcaaaggatgacaagccaaaagaaccggaaaagaaagattaa

SEQ ID NO: 43269 - protein, 622 aa, Drosophila melanogaster
MLVSWAKMATACARIGLKMGPGTGGYRGNYLGNPVVFPRYLHASLSLWDDKDKKKSGDECEPEPQEVCKTDAELVKKKDEAEDECEEKKSDGGGKKLESKGRKGVIHAVIGPVIDVYFEEEVPEVLNALQVQDAPIANLVLEVFHHLGNNIVRCVAMDSTEGLRRGQPVLDTGYPIRVAVGKAVLGRILNVVGDPIDDRGEVKSDFYSFIHNEAPELTDLSVKPEILVTGIKVIDLLAPYVKGGKIGLFGGAGVGKTVLIMELINNIAKSHGGYSVFVGAGERTREGNDLYHEMIESKVISLEDDSSKVVLVFGQMNEPPGARSRVVLTGLTIAEYFRDVDGQDVLLFIDNIFRFTQAGSEVSALLGRIPSAVGYQPTLGTDMGTMQERITSTRNGSITSVQAVYVPADDLSDPAPAATFSHLDATTVLSRPIAELGIYPAVDPLDSSSRILDPDVVGEEHYNVARAVQKTLQAYKSLQDIIAILGMDELSEEDKLTVARARKMQRFLSQPFQVAEIFTGHPGKLVPVEKCVEGFKRLLNGEYDDIPEIAFYMVGDAEEVLAKATQLAASMSGDAPPAKAEAKKDEKKDTKPEEGKKEEPPKGEDKKEEAKDDKPKEPEKKD

SEQ ID NO: 43270 - DNA, 1434 bp, Tropheryma whipplei str. Twist
  CDS (1)..(1434): transl_table=11
ttggagattatgacaggggatgcagttgggcggatagtgcgggttacgggctctgtcgtagatgtggagttttcacgcaataaccttcctggcgtttttaacgccttgaagacccgtgtaaaccgttctggaaaagaaattgagataacccttgaagttgctcagcatcttggtgacgacttggtccgtacggttgccatgcaatctactgatggtctaataaggggtcaagaggtgcttgataccggtggacatatcactgtccctgtaggtgatgcgacaaagggaagggtttttaacgttgttggtgaggtcttaaacagtaacggcgaagatatcaaatttgatgagtattggtctatacaccgcaagccgccagaatttagtcttcttgaaagtaagactcagctttttgaaactggcattaaagttattgatcttctaaccccgtatgttcagggcggtaaaatcggactctttggtggtgctggtgttggtaaaactgttcttattcaggaaatgatacaaagagtggcccaggatcatggcggtgtatcggtttttgccggggttggtgagcgtacgcgcgagggtaacgacctgattcgcgagatgcaggatgctggtgtttttgataaaaccgctcttgtttttggacaaatggatgaacctcccggcacacgccttcgtgtcgccctaagtgcccttacgatggcagaatacttccgagatgtccagaagcaggatgtcttattgttcatagataacattttccgtttcacgcaagcaggatcagaggtgtctactttgcttggacgtataccctcggctgttggatatcagccaaatttagctgatgaaatgggtgtcttgcaggagagaattacatcaacacgaggtcactcaattacttctcttcaggcgatctatgtgccggcagatgattatacggacccagccccggcaacaacttttgctcatcttgatgcgacaactgaactaagtcgtgagattgcctcaaaaggcttgtatcctgctgttgacccgcttgcgtcaaccagtcgcatacttgatccaaaatacattggtaaggatcattacagggtcgcagttacagtgaaacagattctgcaaagagataaggagctgcgggaaataattgcaattctcgggattgatgagctatcagaagaggacagagttacagttgcccgcgccaggcggattgagcagttcctgagtcagaatacatatatggcaaagaaatttacgggtgtggacggatcaactgtcccgcttcaggaaacaatcgatggatttgatgcaatctgcagaggtgactgcgatcatattccagaacaggcctttttcaatgtcggcggacttgaggatgttgagcgcaagtggagtaagctgcaaaaggaattaggttaa

SEQ ID NO: 43271 - protein, 477 aa, Tropheryma whipplei str. Twist
MEIMTGDAVGRIVRVTGSVVDVEFSRNNLPGVFNALKTRVNRSGKEIEITLEVAQHLGDDLVRTVAMQSTDGLIRGQEVLDTGGHITVPVGDATKGRVFNVVGEVLNSNGEDIKFDEYWSIHRKPPEFSLLESKTQLFETGIKVIDLLTPYVQGGKIGLFGGAGVGKTVLIQEMIQRVAQDHGGVSVFAGVGERTREGNDLIREMQDAGVFDKTALVFGQMDEPPGTRLRVALSALTMAEYFRDVQKQDVLLFIDNIFRFTQAGSEVSTLLGRIPSAVGYQPNLADEMGVLQERITSTRGHSITSLQAIYVPADDYTDPAPATTFAHLDATTELSREIASKGLYPAVDPLASTSRILDPKYIGKDHYRVAVTVKQILQRDKELREIIAILGIDELSEEDRVTVARARRIEQFLSQNTYMAKKFTGVDGSTVPLQETIDGFDAICRGDCDHIPEQAFFNVGGLEDVERKWSKLQKELG

SEQ ID NO: 43272 - DNA, 1527 bp, Rhodopirellula baltica SH 1
  CDS (1)..(1527): transl_table=11
atgccttccatcgcggcacggcgaatgcttttcattgggttggtctcgagagcactccagagatgtccaaatatgcacactcagccattgccgtcttcgtccgatatcaacaccaataccggaacagctttaatggagaacgaaccgctctcttcgagtgatcctaagcaaggtcatgtggttgcagttcgcggcagtgtgattgacgttcacttccccggcgaacctccggcaatgaactgcgagttgcggattggggacagcggtgatgtggtggcagaagtcgccagccaactcgacccacacaccgtgcgtgccatcgcgatcacatcgccacgcggattgtcacggggaactcccgttcgaagttgtggacgatcaatgcaagtccccgtcggcaagcctctattgggcagagtgctcgatgtgttcggcaacacgctcgacgatggtgaaagtttgaagtccgtcgaacaccgcagcatccatcagacgccaccgacgatcaatcgacgaatcgcgaaatcggaagtgttcacgaccggtatcaaagcaatcgatttgttgtcgccacttgaacgaggtggtaaagcggggctgttcggtggtgcaggagttggcaaaaccgttttgatcaccgaattgatccacaacatcgtcggcggtcacgatgggatcagtttgttttgcggaattggtgagcggtgccgagaggctgaagagttgtaccgcgaaatgggagcagccggtgttcgcgacaacacggtcatggtttttggacagatgaacgaaccgccgggtgcccgatttcgggttgggcatgctgcgctgacgatggcggagtcctttcgggacgatgccaagcaagatgtgctgctgttgattgacaacatctttcggtttgtgcaggccgggatggaagtctccggattgctgggccaattgccatcccgtgtcgggtatcagccttcgctcgcaagcgacctagcggagctcgaagaacgaatctgcaccacgtccgatgcggcgatcacgtcagtgcaagccgtctatgttccggccgatgatttcaccgacccgtcagcggtgcacacctttgctcacctatccgcaaccgtcgttttgtcgcgaaaaagagcgagcgaaggattgtatcccgccatcgatccattgaagtcgacctcagagatgatgcttcccggtgtggttggcgatcggcactacaaaaccgccagcaatgtgcgtcaaacgttggccggatacgaagaattgaaagacatcatcgcgatgctgggcatggaagaactgtctcgccaagatcgtttgacagtgaatcgggccagacgcttggaacggttcttgacccagcccttcttcacaacgcagcaattcaccggtcacgagggacacatggtcagtatcgaagacacattggacggatgcgaacgaatcctgaatgacgagtttcaagatcggcccgagcgagacctgtacatggtgggcaaaatcccgagttccaagccatga

SEQ ID NO: 43273 - protein, 508 aa, Rhodopirellula baltica SH 1
MPSIAARRMLFIGLVSRALQRCPNMHTQPLPSSSDINTNTGTALMENEPLSSSDPKQGHVVAVRGSVIDVHFPGEPPAMNCELRIGDSGDVVAEVASQLDPHTVRAIAITSPRGLSRGTPVRSCGRSMQVPVGKPLLGRVLDVFGNTLDDGESLKSVEHRSIHQTPPTINRRIAKSEVFTTGIKAIDLLSPLERGGKAGLFGGAGVGKTVLITELIHNIVGGHDGISLFCGIGERCREAEELYREMGAAGVRDNTVMVFGQMNEPPGARFRVGHAALTMAESFRDDAKQDVLLLIDNIFRFVQAGMEVSGLLGQLPSRVGYQPSLASDLAELEERICTTSDAAITSVQAVYVPADDFTDPSAVHTFAHLSATVVLSRKRASEGLYPAIDPLKSTSEMMLPGVVGDRHYKTASNVRQTLAGYEELKDIIAMLGMEELSRQDRLTVNRARRLERFLTQPFFTTQQFTGHEGHMVSIEDTLDGCERILNDEFQDRPERDLYMVGKIPSSKP

SEQ ID NO: 43274 - DNA, 1572 bp, Strongylocentrotus purpuratus
  CDS (1)..(1572)
atgtttagcagggtggcaaagacgagtttttcggccgtaagggctgcaaaatcacaattttcacactcattatcacaacagacgagtaaaacatgggtaccagcagcaacatgtagcaaacgatcatatgctgctgaggcaaagacgtcagcatccccagtttcgggtcagatcgtagctgtcatcggagctgtcgtcgacgtccagttcgaggatgacctcccacccattctcaatgccttggaggttcagggaaggacctccaggctggtgttggaagttgcacagcatcttggtgagaacacagttaggacaattgccatggacggtacagaaggtctgatccgaggccagaagtgcgttgacactggctcccccatcagcatccccgtcggccccgagacgctgggacgcatcatcaatgtcattggtgaacccattgacgagagaggaccaattggaacagacaagagatcagcaatccatgcagaagctccagcgtttgtagagatgagtgtaaatcaggagatccttgttactggaatcaaggttgtagatctactggccccatacgccaagggaggaaagattggtctgtttggcggggctggtgtaggaaagactgtactgatcatggagctgattaacaacgtagccaaggcccacggaggttactctgtgttcgctggtgtaggagagaggacccgtgagggtaacgatctctaccatgagatgattgaaggaggtgtcatctccctcaaggacgacacatcaaaggtagcgttggtgtacggacagatgaacgagccccctggcgcccgtgcccgtgtcgccttgaccggactgaccgttgccgaatacttccgtgaccaagagggacaggatgtgctgctcttcattgacaacatcttccgcttcacacaggctggatcagaggtatctgctctgctgggacgtatcccatctgctgtaggataccagccaaccctggccactgacatgggtactatgcaggagcgtatcaccaccaccaagaagggatccatcacctcagtacaggccatctacgtgcccgctgatgatttgactgaccctgcccctgccaccaccttcgcccatttggacgccaccactgtgttgtcccgtggtatcgctgagctgggtatctaccccgctgtggatcctctggattcctcctcccgtatcatggaccccaacgtcgtcggagagcgtcactacggcatcgctcgtggagtgcagaaaatcctccaggacaacaagaccctgcaggacatcatcgccatcttgggtatggacgagttgtccgaggacgacaaactgaccgtgtcccgagccaggaagatccagaggttcttgtcccaacccttccaggtcgccgaggtcttcaccggcagtccaggcaagctcgtctcgatggcagagaccatcgacggattcgagtccattatcaagggcgagtgcgaccatctaccagagattgctttctacatggtaggcaacatccaagatgtcaaggataaggccgacaggctcgcagaagaactatcataa

SEQ ID NO: 43275 - protein, 523 aa, Strongylocentrotus purpuratus
MFSRVAKTSFSAVRAAKSQFSHSLSQQTSKTWVPAATCSKRSYAAEAKTSASPVSGQIVAVIGAVVDVQFEDDLPPILNALEVQGRTSRLVLEVAQHLGENTVRTIAMDGTEGLIRGQKCVDTGSPISIPVGPETLGRIINVIGEPIDERGPIGTDKRSAIHAEAPAFVEMSVNQEILVTGIKVVDLLAPYAKGGKIGLFGGAGVGKTVLIMELINNVAKAHGGYSVFAGVGERTREGNDLYHEMIEGGVISLKDDTSKVALVYGQMNEPPGARARVALTGLTVAEYFRDQEGQDVLLFIDNIFRFTQAGSEVSALLGRIPSAVGYQPTLATDMGTMQERITTTKKGSITSVQAIYVPADDLTDPAPATTFAHLDATTVLSRGIAELGIYPAVDPLDSSSRIMDPNVVGERHYGIARGVQKILQDNKTLQDIIAILGMDELSEDDKLTVSRARKIQRFLSQPFQVAEVFTGSPGKLVSMAETIDGFESIIKGECDHLPEIAFYMVGNIQDVKDKADRLAEELS

SEQ ID NO: 43276 - DNA, 1569 bp, Magnaporthe grisea 70-15
  CDS (1)..(1569)
atgttcaagagcggcctttctcccatcgcgagggcagctcgcccggcctcgcgcctcgctgcgcgccccagcttaagactccccaaatactctctcggtgccaggttcgccagcacacagggtgtcggtgatggaaagattcaccaggtcattggtgccgtcgtggatggtgagcattatccgatcatcaacttgaaattcgacactgccaagctccccccgattcttaacgcccttgagaccaccaacaacaaccagaagctcgtccttgaggtttcgcaacatctgggcgagaatgtcgtccgctgcattgccatggacggtactgagggtctcactcgtggcgccaaggccaaggacacaggtgctcccatcaccattcccgtcggctctggaacccttggtcgtatcatgaacgtcactggtgaccccattgacgagcgtggtcccatcaagaccgacaagtaccttcccattcacgctgaggctcccgagttcgtcgagcagtcgaccactgccgagattctggttaccggtatcaaggtcgtcgatctgcttgccccctacgctcgtggtggaaagattggtctgttcggtggtgccggtgtcggcaagaccgtcttcatccaggagcttatcaacaacatcgccaaggcccacggtggttactccgtcttcactggtgtcggtgagaggacccgtgagggtaacgatttgtaccacgaaatgcaggagacctccgtcattcagcttgatggcgagtccaaggtgtcgctggtcttcggtcagatgaacgagcccccgggagcccgtgcccgtgtcgcccttaccggtcttactgttgctgagcaattcaggaacgagggccaggatgtgctcctgttcattgacaacattttccgatttactcaggccggttccgaggtctcggctctgctgggtcgtatcccctctgccgtcggttaccagcccaccctcgccgtcgacatgggtggtatgcaagagcgtattaccaccacccagaagggttctattacctccgtccaggccgtctacgtccctgctgacgatttgaccgaccctgcccccgccaccacctttgcccacttggacgccaccactgtgttgtcccgtggtatttccgagctgggtatctacccggctgtcgaccctctcgactccaagtcgcgtatgcttgacccccgtatcgtcggtcaggagcactacgaggtcgccacccgcgtccagcaaatcctccaggagtacaagtcgctccaggacatcatcgccattctgggtatggacgagttgtctgaggccgacaagctcactgtcgagcgtgcccgtaagatccagcgtttcctgagccagcctttcactgtcgcccaggtcttcactggtatcgagggcaagcttgtcgaccttaaggacaccattgcctcgttcaaggctatcctggctggtgagggtgactcccttcccgagggtgctttctacatggttggtgaccttgcgtcggcacgtgagaagggtgagaagattctggctgagctcgagaaggacgcgtaa

SEQ ID NO: 43277 - protein, 522 aa, Magnaporthe grisea 70-15
MFKSGLSPIARAARPASRLAARPSLRLPKYSLGARFASTQGVGDGKIHQVIGAVVDGEHYPIINLKFDTAKLPPILNALETTNNNQKLVLEVSQHLGENVVRCIAMDGTEGLTRGAKAKDTGAPITIPVGSGTLGRIMNVTGDPIDERGPIKTDKYLPIHAEAPEFVEQSTTAEILVTGIKVVDLLAPYARGGKIGLFGGAGVGKTVFIQELINNIAKAHGGYSVFTGVGERTREGNDLYHEMQETSVIQLDGESKVSLVFGQMNEPPGARARVALTGLTVAEQFRNEGQDVLLFIDNIFRFTQAGSEVSALLGRIPSAVGYQPTLAVDMGGMQERITTTQKGSITSVQAVYVPADDLTDPAPATTFAHLDATTVLSRGISELGIYPAVDPLDSKSRMLDPRIVGQEHYEVATRVQQILQEYKSLQDIIAILGMDELSEADKLTVERARKIQRFLSQPFTVAQVFTGIEGKLVDLKDTIASFKAILAGEGDSLPEGAFYMVGDLASAREKGEKILAELEKDA

SEQ ID NO: 43278 - DNA, 1542 bp, Gibberella zeae PH-1
  CDS (1)..(1542)
atgttcaagagcggcatttcctccttcgcccgcgcggctcgcccggccgtccttcctcgacgtgccctccgaccttccgctctccgacttcccatctccagccgatgggccagcactggcgttggcgccggcaagattcaccaggtcatcggtgccgtcgttgacgtcaagttcgatggtgctaagctccctgccattctcaactctcttgagtgccagaacaatggccagaagcttgtcctcgaggtttcccaacatttgggtgagagcgtcgtccgttgcattgccatggacggtactgagggtctcgtccgaggcgctactgtccaggacaccggtgctcccatcactattcccgtcggccccgcgactcttggtcgtatcatgaacgttactggtgaccccattgacgagcgtggtcctatcaagactgacaagcgccttcctatccacaccgaagcccccgagttcgttgagcagtccacctctgctgaggtcctcgtcactggtatcaaggttgtcgatcttcttgccccctacgcccgtggtggaaagattggtctcttcggtggtgccggtgtcggcaagactgtcttcattcaggagcttatcaacaacatcgccaaggcccacggtggttactccgtcttcactggtgtcggtgagcgtacccgtgagggtaacgatctgtaccacgaaatgcaggagacttccgtcattcagcttgatggcgagtccaaggtcgccctggttttcggtcagatgaatgagccccctggagcccgtgcccgtgtcgcccttactggattgactgttgctgagtacttcagagatgctgaaggtcaggacgtgcttctcttcattgataacattttccgattcactcaagccggttctgaggtgtctgcccttttgggtcgtatcccctctgccgtcggttaccagcccactctcgccgtcgatatgggtggtatgcaggagcgtattaccaccacccagaagggttccattacctcggtccaggctgtctacgtccctgctgacgatttgactgatcctgcccctgccaccactttcgcccatttggacgccaccactgtcttgtctcgtggtatctctgagttgggtatctaccccgctgtcgaccctctcgactccaagtcccgtatgttggacccccgagttgttggtcaggagcactacgacaccgccacccgtgttcagcagatcctccaggagtacaagtctcttcaggatatcattgctattctgggtatggatgagttgtctgaggccgacaagcttactgtcgagcgtgcccgtaagatccagcgtttcctgagccagcctttcactgttgcccaggttttcactggtattgagggtaagctcgtcgaccttaaggagaccatcaactccttcaaggccattctgagcggtgagggtgataaccttcccgagggtgccttctacatggttggtgacttcgcctccgccaaggccaagggtgagaagattcttgctgagcttgagggtcagtaa

SEQ ID NO: 43279 - protein, 513 aa, Gibberella zeae PH-1
MFKSGISSFARAARPAVLPRRALRPSALRLPISSRWASTGVGAGKIHQVIGAVVDVKFDGAKLPAILNSLECQNNGQKLVLEVSQHLGESVVRCIAMDGTEGLVRGATVQDTGAPITIPVGPATLGRIMNVTGDPIDERGPIKTDKRLPIHTEAPEFVEQSTSAEVLVTGIKVVDLLAPYARGGKIGLFGGAGVGKTVFIQELINNIAKAHGGYSVFTGVGERTREGNDLYHEMQETSVIQLDGESKVALVFGQMNEPPGARARVALTGLTVAEYFRDAEGQDVLLFIDNIFRFTQAGSEVSALLGRIPSAVGYQPTLAVDMGGMQERITTTQKGSITSVQAVYVPADDLTDPAPATTFAHLDATTVLSRGISELGIYPAVDPLDSKSRMLDPRVVGQEHYDTATRVQQILQEYKSLQDIIAILGMDELSEADKLTVERARKIQRFLSQPFTVAQVFTGIEGKLVDLKETINSFKAILSGEGDNLPEGAFYMVGDFASAKAKGEKILAELEGQ

SEQ ID NO: 43280 - DNA, 1524 bp, Candida glabrata CBS 138
  CDS (1)..(1524)
atggtattgcctagactatacgctgcgccatcctcccgtgctgctttgcaagctgctaggatggcctccaaattcaactccccagtgagattcgcctctactgctgctctagcctctggtaaagttagtgctgtcattggtgctatcgtcgatgtccaattcgaagagtccaacttgccagctatcctgaacgctctggagatcaagaccccacaggggaaactggtcctggaggtcgcccagcacttgggtgaaaacaccgtcagaaccattgccatggacggtaccgaaggtctggtcagaggcgagaaggtcgtcgacacaggtgccccaatctccgtccctgtcggcagagagaccctgggcagaatcatcaacgttatcggtgaacctatcgacgagcgtggcccaatcaactcaaagttgagaaagcctatccacgccgaccctccttccttcgcagaacagtccaccgccgccgaagtcctggaaacaggtatcaaggtcgtcgacttgctagccccttacgccagaggtggtaagatcggcctgttcggtggtgccggtgtcggtaagaccgtgttcatccaagaactgatcaacaacatcgcaaaggctcacggtggtttctccgtgttcacaggtgtcggtgaaagaaccagagaaggtaacgatttgtacagagaaatgaaggaaaccggtgtcatcaacttggaaggtgactctaaggtcgccttggtcttcggccaaatgaacgaaccaccaggagccagagccagagtcgccttgaccggtttgaccatcgcagaatacttcagagatgaagaaggtcaagatgtcctgctgttcgtcgacaacattttcagattcacccaagccggttcagaagtctccgctttgctaggtcgtatcccatccgccgtcggttatcaaccaaccttggccaccgatatgggtctgttgcaagaaagaattaccaccacaaagaagggttccgtcacttccgtccaagccgtctacgtgcctgcagatgatttaacagatcctgcccctgccactactttcgcgcacttggacgccaccaccgtcttgtccagaagtatctcagaattgggtatctacccagctgtcgacccattggactccaagtctagattgctagacgctgccgttgtcggtgaagagcattacaacgtcgccacaaaggtccaagaaactttacaaacttacaagtctctgcaagatatcatcgccattttgggtatggatgaattgtccgaacaagataagctaaccgtcgaaagagcaagaaagatccaaagattcttgtcccaaccattcgctgtcgctgaagttttcaccggtatcgaaggtaagctggtcagattgaaggacaccatctcctctttcaaggctgtcttggaaggtaagtacgatgatcttccagaaaatgcattctatatggtcggtggtattgaagatgtcgttgctaaggctgaaaagttggctgctgaagcttcataa

SEQ ID NO: 43281 - protein, 507 aa, Candida glabrata CBS 138
MVLPRLYAAPSSRAALQAARMASKFNSPVRFASTAALASGKVSAVIGAIVDVQFEESNLPAILNALEIKTPQGKLVLEVAQHLGENTVRTIAMDGTEGLVRGEKVVDTGAPISVPVGRETLGRIINVIGEPIDERGPINSKLRKPIHADPPSFAEQSTAAEVLETGIKVVDLLAPYARGGKIGLFGGAGVGKTVFIQELINNIAKAHGGFSVFTGVGERTREGNDLYREMKETGVINLEGDSKVALVFGQMNEPPGARARVALTGLTIAEYFRDEEGQDVLLFVDNIFRFTQAGSEVSALLGRIPSAVGYQPTLATDMGLLQERITTTKKGSVTSVQAVYVPADDLTDPAPATTFAHLDATTVLSRSISELGIYPAVDPLDSKSRLLDAAVVGEEHYNVATKVQETLQTYKSLQDIIAILGMDELSEQDKLTVERARKIQRFLSQPFAVAEVFTGIEGKLVRLKDTISSFKAVLEGKYDDLPENAFYMVGGIEDVVAKAEKLAAEAS

SEQ ID NO: 43282 - DNA, 1512 bp, Debaryomyces hansenii CBS767
  CDS (1)..(1512)
atggtttttccaagattgtttaactctgcttcacgcaatgctttcactgctgctaagcgtaactttgttttcaacagaggtttagcttcagcagctccagtcgccggtaaggttagagctgttattggtgctgttgttgatatccaattcgacgaaggtaacttaccagctattcttaatgctttaacccttaagaacggtgaccaagacttagtcttagaagtcgcccaacatttaggtgaaaacaccgtcagagctattgctatggatggtaccgatggtttagttagaggtgctccagttaacgataccggtgctccaatttctgttcctgttggtcgtgaaaccttaggtcgtattatcaacgttattggtgaaccaattgacgaaagaggcccaatcaagaccaaacaaaagaacccaattcacgctgatccaccttcgttcgtcgaacaatccacttcttccgaagttttagaaaccggtattaaggttgtcgatttattagccccatacgccagaggtggtaagattggtttattcggtggtgccggtgtcggtaaaaccgttttcattcaagaattgattaacaacattgctaaggcccatggtggtttctctgttttcgccggtgtcggtgaacgtaccagagaaggtaacgatttataccgtgaaatgcaagaaactggtgttattaaccttgaaggtgattctaaggtctccttagttttcggtcaaatgaacgaaccaccaggagctagagctagagttgctttaaccggtttaaccattgccgaatacttcagagatgaagaaggtcaagatgtcttgttattcgttgataacatttacagattcacccaagctggttccgaagtctctgctttgttaggtcgtattccatctgctgtcggttatcaaccaaccttagccactgatatgggtttattacaagaacgtattaccaccaccaagaagggttccgttacttctgtccaagccgtctatgtcccagctgatgatttaaccgatccagctccagctaccaccttcgcgcatttagatgccaccactgtcttgtctagaggtatttccgaattaggtatttacccagctgtcgatccattagattccaagtctagattgttagatattgctgttgtcggtaaggaacattatgacgtcgcttccggtgtccaacaaaccttacaagcttacaagtctttacaagatatcattgctattttaggtatggatgaattatctgaacaagataagttaaccgtcgaaagagcacgtaagatccaaagattcttgtctcaaccattcgctgttgctgaagttttcactggtatcccaggtaaattagttagattacaagaaaccgtcaaatctttcaaggaagtcttagatggtaagcacgatcacttaccagaaaatgctttctatatggttggtggtattgaagatgccactgctaaagccgaaaaattagcttctgaatctaaataa

SEQ ID NO: 43283 - protein, 503 aa, Debaryomyces hansenii CBS767
MVFPRLFNSASRNAFTAAKRNFVFNRGLASAAPVAGKVRAVIGAVVDIQFDEGNLPAILNALTLKNGDQDLVLEVAQHLGENTVRAIAMDGTDGLVRGAPVNDTGAPISVPVGRETLGRIINVIGEPIDERGPIKTKQKNPIHADPPSFVEQSTSSEVLETGIKVVDLLAPYARGGKIGLFGGAGVGKTVFIQELINNIAKAHGGFSVFAGVGERTREGNDLYREMQETGVINLEGDSKVSLVFGQMNEPPGARARVALTGLTIAEYFRDEEGQDVLLFVDNIYRFTQAGSEVSALLGRIPSAVGYQPTLATDMGLLQERITTTKKGSVTSVQAVYVPADDLTDPAPATTFAHLDATTVLSRGISELGIYPAVDPLDSKSRLLDIAVVGKEHYDVASGVQQTLQAYKSLQDIIAILGMDELSEQDKLTVERARKIQRFLSQPFAVAEVFTGIPGKLVRLQETVKSFKEVLDGKHDHLPENAFYMVGGIEDATAKAEKLASESK

SEQ ID NO: 43284 - DNA, 1671 bp, Yarrowia lipolytica CLIB122
  CDS (1)..(1671)
atggctccaacgagctcggaaatacattcagcgagggcgattacgccggcgtgtgtttgcggattcgctctgcgaccgaaaccaccccttctgttggctacgttggggttgctgtacctcttgcgtacagctggcacttttttcgctcgggggctaataagctctagagttgggaacaaccgaccaatgacagcgcagcacagctcacacctaaccacacacacacacacgcacacaaacaaaaggatacacaaactagttactaaccccagaaccgttattggtgccgttgtcgatgtccagttcgagcaggataacctccccgctattcttaacgctctgaccattgatcgtggtgagggtaacaagctcgtcctcgaggttgcccagcatctcggtgagaacaccgtccgaaccattgccatggacggtactgagggtcttgtccgaggcacctctgtcgctgacactggtgctcccatcactatccccgtcggccgaggtacccttggtcgaatcatcaacgtttgtggtgagcccattgacgagcgaggacctatcgaggctactaagttcctccccatccacgccgacccccctaccttcgctgagcagtctaccactgctgaggttcttgagaccggtattaaggtcgtcgacctcctcgccccttacgctcgaggtggtaagattggtctcttcggtggtgccggtgtcggtaagaccgttttcatccaggagctgattaacaacattgctaaggcccatggtggtttctccgttttctgcggtgtcggtgagcgaacccgagagggtaacgatctttaccgagagatgaaggagactggtgtcatcaacctcgagggtgagtccaaggtcaccctcgtcttcggtcagatgaacgagcctcccggagcccgagcccgagtcgcccttactggtctgaccattgccgagtacttccgagacgaggagggtcaggatgtgttgctcttcgttgacaacattttccgattcacccaggccggttccgaggtgtccgctctgcttggtcgaattccctccgctgtcggttaccagcccactctggccaccgatatgggtgccctccaggagcgaattaccaccacccagaagggttccgtcacttccgtccaggccgtctacgtgcccgccgatgatctgactgatcctgctcccgccaccaccttcgcccatcttgacgccaccaccgtcctgtcccgaggtatttccgagctgggtatctaccccgctgtcgaccctcttgattccaagtctcgacttctggatatcgatgttgtcggccaggagcactacgacgttgcttccaacgtccagcagaccctccaggcttacaagtctctccaggatatcattgccattcttggtatggatgagctttccgagcaggacaagctgaccgtcgagcgagctcgaaagatccagcgattcctgtctcagcccttcaccgtcgccgaggttttcaccggtattgagggacgacttgtctctcttaaggacactgtccgatctttcaaggagattcttgacggtaagcacgatgctctccctgaggccgctttctacatggtcggcggtatcgaggaggttgtcgccaaggccgagaagcttgctgctgagtccaagtaa

SEQ ID NO: 43285 - protein, 556 aa, Yarrowia lipolytica CLIB122
MAPTSSEIHSARAITPACVCGFALRPKPPLLLATLGLLYLLRTAGTFFARGLISSRVGNNRPMTAQHSSHLTTHTHTHTNKRIHKLVTNPRTVIGAVVDVQFEQDNLPAILNALTIDRGEGNKLVLEVAQHLGENTVRTIAMDGTEGLVRGTSVADTGAPITIPVGRGTLGRIINVCGEPIDERGPIEATKFLPIHADPPTFAEQSTTAEVLETGIKVVDLLAPYARGGKIGLFGGAGVGKTVFIQELINNIAKAHGGFSVFCGVGERTREGNDLYREMKETGVINLEGESKVTLVFGQMNEPPGARARVALTGLTIAEYFRDEEGQDVLLFVDNIFRFTQAGSEVSALLGRIPSAVGYQPTLATDMGALQERITTTQKGSVTSVQAVYVPADDLTDPAPATTFAHLDATTVLSRGISELGIYPAVDPLDSKSRLLDIDVVGQEHYDVASNVQQTLQAYKSLQDIIAILGMDELSEQDKLTVERARKIQRFLSQPFTVAEVFTGIEGRLVSLKDTVRSFKEILDGKHDALPEAAFYMVGGIEEVVAKAEKLAAESK

SEQ ID NO: 43286 - DNA, 1551 bp, Apis mellifera
  CDS (1)..(1551)
atgttgaatgtcgtatcgaaagctgccgctggcgccttaagggccgtcaagccttctatccttcaaaatgaaattaccaaaatttcgggagcattatcagtaaatagtagagattatgcaaaagctgcaagctccaaaggtggagctcaaggaaaaattgttgctgtcattggtgcagttgttgatgtacaatttgatgatgctcttcctccaattcttaatgctttggaagtacaaaatcgcactcccaggctagtccttgaagtagcacagcatttgggagaaaacacagtacgcactattgctatggatggtactgagggtcttgttcgtggacaaagtgttctggattctggatatcctattcgtattcctgttggtgctgagacattgggacgcattattaatgttattggtgaaccaattgatgaacgtggacctattcctactgataaacttgctcctatccatgctgatgctccagaattcgtagatatgtctgttgaacaggaaattttagtaactggaataaaagttgttgatcttcttgctccttatgctaaaggaggaaaaataggtctatttggaggtgctggtgtcggaaaaactgtattaattatggaattaatcaataatgtagcaaaagcccatggtggttattctgtatttgctggtgtgggtgaacgtactcgtgaaggaaatgatttatatcatgaaatgattgaatctggagtcatttcattgaaagataaaacttccaaggtagctctggtatatggtcaaatgaacgaacctccaggtgcacgtgctcgtgtcgctttaactggcttaaccgttgccgaatatttccgtgatcaagaaggacaggatgtattactattcattgataatatctttaggtttactcaagctggttctgaagtatcagctttgttaggtcgtatcccatctgctgtaggttatcagccaacattagcaactgatatgggtagtatgcaggaacgaattacaacaacaaaaaaaggatctattacttctgtgcaagctatttatgtacctgctgatgatttgacagatcctgcacctgccactacctttgctcatttagacgctacaactgtattgtctcgagctattgctgaattaggtatctatcctgctgtcgatccccttgattccacttctcgtatcatggatcctaatataattggtgctgaacattataatgttgctcgtggcgtacagaaaatcttacaggattacaaatcacttcaagatattattgctatcttaggtatggatgaattatcagaagaagataaactcactgttgcacgtgcacgtaaaattcagaggttcttgtctcaaccattccaggttgctgaggtatttactggtcacgctggtaaattagtaccattagaagaaactattaaaggatttaagaaaattcttgctggagattatgatcatttgccagaagttgcattctacatggtcggtccaatcgaagaagtagtagcaaaagcagaatcattggcaaaacaataa

SEQ ID NO: 43287 - protein, 516 aa, Apis mellifera
MLNVVSKAAAGALRAVKPSILQNEITKISGALSVNSRDYAKAASSKGGAQGKIVAVIGAVVDVQFDDALPPILNALEVQNRTPRLVLEVAQHLGENTVRTIAMDGTEGLVRGQSVLDSGYPIRIPVGAETLGRIINVIGEPIDERGPIPTDKLAPIHADAPEFVDMSVEQEILVTGIKVVDLLAPYAKGGKIGLFGGAGVGKTVLIMELINNVAKAHGGYSVFAGVGERTREGNDLYHEMIESGVISLKDKTSKVALVYGQMNEPPGARARVALTGLTVAEYFRDQEGQDVLLFIDNIFRFTQAGSEVSALLGRIPSAVGYQPTLATDMGSMQERITTTKKGSITSVQAIYVPADDLTDPAPATTFAHLDATTVLSRAIAELGIYPAVDPLDSTSRIMDPNIIGAEHYNVARGVQKILQDYKSLQDIIAILGMDELSEEDKLTVARARKIQRFLSQPFQVAEVFTGHAGKLVPLEETIKGFKKILAGDYDHLPEVAFYMVGPIEEVVAKAESLAKQ

SEQ ID NO: 43288 - DNA, 1542 bp, Aspergillus nidulans FGSC A4
  CDS (1)..(1542)
ctggcccggaccttcgggagggctgcttttgctcgaccttcccccgtcgcacgccgcgccctccagccctccaagctcaatggcttcccttcattcgctcgcctcgccagcactgagaccgctgccggtggaaagattcaccaggtcatcggtgccgtcgtcgacgtgaagtttgagggtgagaagcttcccgccattctcaacgccattgagaccgagaacaacggccagaagctcgttctcgaggtttctcaacacttgggtgagaatgtcgtccgtaccattgctatggatggtaccgagggtcttactcgtggtgctcccgcccgtgacactggcgctcccatcaccatccctgtcggccctggcacccttggtcgtatcgtcaacgtcactggtgaccccattgacgagcgtggccccatcaaggccaccaagtatgcccccattcacgctgaggctcccgagttcaccgagcagtccaccactgctgagattctcgtcactggtatcaaggttgttgaccttcttgccccctacgctcgtggtggtaagattggtctcttcggtggtgccggtgtcggtaagaccgtgttcattcaggagctgattaacaacatcgccaaggctcacggtggttactctgttttcaccggtgtcggtgagcgtactcgtgagggtaacgatctgtaccacgaaatgcaggagaccggtgtcattcagctcgatggtgaatccaaggtgtctctggtgttcggtcagatgaacgagccccccggtgctcgtgcccgtgtcgcccttactggtctgaccattgctgaatacttccgtgacgaggagggtcaggacgtgctgctcttcattgacaacattttccgtttcacccaggccggttctgaggtgtctgcccttctcggtcgtatcccctctgccgtcggttaccagcccactctggccgtcgacatgggtggtatgcaggaacgtattaccactaccaccaagggttccattacctccgtccaggccgtctacgtgcccgctgacgatctgactgaccctgcccccgccaccaccttcgctcacttggatgccaccactgtcttgtctcgtggtatttctgagttgggtatctaccctgctgtcgaccctcttgactctaagtctcgtatgctggacccccgtattgtcggtgaggaacactacaacaccgccactcgtgtccagcagatgcttcaggagtacaagtcccttcaggatatcattgccattcttggtatggacgaactttctgaggctgacaagcttactgtcgagcgtgctcgtaagcttgagcgtttcctctctcagcctttcaccgtcgcccaggtcttcactggtatcgagggtaagctcgtcgaccttaaggacaccatcgcctctttcaaggctatcatgaacggtgagggtgatgaccttcctgaggctgccttctacatggttggtgacttggcctccgcccgtgctaagggtgagaagatcttggccgatctcgccaagaactaa

SEQ ID NO: 43289 - protein, 513 aa, Aspergillus nidulans FGSC A4
MARTFGRAAFARPSPVARRALQPSKLNGFPSFARLASTETAAGGKIHQVIGAVVDVKFEGEKLPAILNAIETENNGQKLVLEVSQHLGENVVRTIAMDGTEGLTRGAPARDTGAPITIPVGPGTLGRIVNVTGDPIDERGPIKATKYAPIHAEAPEFTEQSTTAEILVTGIKVVDLLAPYARGGKIGLFGGAGVGKTVFIQELINNIAKAHGGYSVFTGVGERTREGNDLYHEMQETGVIQLDGESKVSLVFGQMNEPPGARARVALTGLTIAEYFRDEEGQDVLLFIDNIFRFTQAGSEVSALLGRIPSAVGYQPTLAVDMGGMQERITTTTKGSITSVQAVYVPADDLTDPAPATTFAHLDATTVLSRGISELGIYPAVDPLDSKSRMLDPRIVGEEHYNTATRVQQMLQEYKSLQDIIAILGMDELSEADKLTVERARKLERFLSQPFTVAQVFTGIEGKLVDLKDTIASFKAIMNGEGDDLPEAAFYMVGDLASARAKGEKILADLAKN

SEQ ID NO: 43290 - DNA, 1539 bp, Candida albicans SC5314
  CDS (1)..(1539): transl_table=12
atgtccaatcagattttcaagaaaattttcgttttttttttccaacatttttttttctgtgcgagggacttccaaccaatagaattccatgattcagtacgatttataaaatatactaacattaatttcttttttttgtttagagccgttattggtgccgttgttgatgtccaattcgacgaaggaaacttgccagctattttgaatgctttgactttgaagaacggtgaccaagacttggtcttggaagttgctcaacatttgggtgaaaacaccgtcagagctattgctatggatggtactgaaggtttagtcagaggtaccgaagtcaacgataccggtgccccaatctccgtcccagtcggtagaggtaccttaggtagaatcatcaatgttgttggtgaaccaattgatgacagaggtccaattgaatgtaaggaaaagaaaccaattcacgctgaaccaccatcattcgttgaacaatccactgctgccgagattttggaaaccggtatcaaggttgtcgacttgttggccccatacgccagaggtggtaagattggtttattcggtggtgctggtgtcggtaagaccgtctttatccaagaattgattaacaacattgccaaagcccatggtggtttctctgtctttaccggtgtcggtgaaagaaccagagaaggtaacgatttgtaccgtgaaatgaaagaaaccggtgtcatcaacttggaaggtgactccaaggtcgctttggtcttcggtcaaatgaacgaaccaccaggtgctagagctagagttgctttgactggtttgaccattgctgaatacttcagagatgaagaaggtcaagatgtcttgttgttcattgataacattttcagattcacccaagctggttccgaagtgtctgctttgttaggtcgtattccatctgctgtcggttatcaaccaaccttagccactgatatgggtcttttgcaagaacgtattaccaccaccaagaaaggttccgtcacctctgtccaagctgtctatgtcccagctgatgatttgaccgatcctgctccagccactacattcgcccatttggatgccactactgtcttgtctagaggtatttctgaattgggtatctacccagctgtcgatccattggattccaaatccagattattggacgcttctgttgttggtcaagaacattacgatgtcgctactggtgttcaacaaactttacaagcttacaaatccttacaagatatcattgctattttgggtatggatgaattgtctgaagctgataaattgactgtcgaaagagcccgtaagatccaaagattcttgtctcaaccattcgctgttgctgaagttttcactggtatcccaggtagattagtcagattgcaagacactgtcaaatcattcaaggatgttttggaaggtaaatacgataacttgccagaaaacgctttctatatggttggtggtatcgaagatgtcgttgctaaagctgaaaaattagctgctgaatccaactaa

SEQ ID NO: 43291 - protein, 512 aa, Candida albicans SC5314
MSNQIFKKIFVFFFQHFFFCARDFQPIEFHDSVRFIKYTNINFFFLFRAVIGAVVDVQFDEGNLPAILNALTLKNGDQDLVLEVAQHLGENTVRAIAMDGTEGLVRGTEVNDTGAPISVPVGRGTLGRIINVVGEPIDDRGPIECKEKKPIHAEPPSFVEQSTAAEILETGIKVVDLLAPYARGGKIGLFGGAGVGKTVFIQELINNIAKAHGGFSVFTGVGERTREGNDLYREMKETGVINLEGDSKVALVFGQMNEPPGARARVALTGLTIAEYFRDEEGQDVLLFIDNIFRFTQAGSEVSALLGRIPSAVGYQPTLATDMGLLQERITTTKKGSVTSVQAVYVPADDLTDPAPATTFAHLDATTVLSRGISELGIYPAVDPLDSKSRLLDASVVGQEHYDVATGVQQTLQAYKSLQDIIAILGMDELSEADKLTVERARKIQRFLSQPFAVAEVFTGIPGRLVRLQDTVKSFKDVLEGKYDNLPENAFYMVGGIEDVVAKAEKLAAESN

SEQ ID NO: 43292 - DNA, 1572 bp, Ustilago maydis 521
  CDS (1)..(1572)
atgcctgtcatccagcgcaccgccgtgcgcgctgccagccgctccgctcttcgagcccgacaaaatgctgccgctttctcctccgtcgctcgcgccgctgtgaccgcttcgtccagcgcccctcgcggtctcgccaccgaggcctcccccaagggccagaccggtgctgtcaaggccgtcattggtcccgttgtcgacgttcagtttgacaccgaggatctaccctccatcttcaacgctctcgaggttcagaatgtcaccggtggtggtcgtctcgttctcgaggtcgcccagcacctgggtgagaacactgtccgagctattgccatggagggtaccgagggtctcgttcgtggtcagaaggtcgtcgacactggtcttcccattcagatccccgtcggtcccggtaccctcggccgtatcatgaacgtcattggtgagcccatggacgagcgtggtcccatcaagggcaacaagcttgctcccatccacgttgagccccctgcgttcgtcgaccagtccaccaaggccgaggtgctcgagaccggtatcaaggtcgtcgacctcctcgccccctacgcccgtggtggtaagattggtctcttcggtggcgccggtgtcggcaagactgtgcttatccaggagctcatcaacaacgtcgctaaagcccacggtggttactctgtcttcaccggtgtcggtgagcgaacccgtgagggtaacgatctttaccacgaaatgatcgagactggtgtcatcaacctggagggtgactccaaggtcgctctcgtcttcggtcagatgaacgagccccctggtgcccgtgcccgtgtcgccctgaccggtctcaccatcgccgagtacttccgtgacgaagagggccaggatgtgcttctcttcatcgacaacattttccgtttcacccaggccggttccgagacctcggctcttctcggtcgtattccctcagccgtaggttaccagcccacccttgccaccgacatgggtgtcatgcaggagcgaattaccaccaccaagaagggctccattacctcggtgcaggccgtctacgtgcccgccgatgacttgactgaccctgcccccgccaccacctttgcccacttggacgccaccaccgtgctgtcccgtggtattgccgagcttggtatctaccctgccgtggaccccctcgactccaagtcacgtatgcttgaccccgccgtcgtcggtcgcgagcactacgacattgccactggtgtccagaagcttctccaggactacaagtcgcttcaggacatcatcgccattctcggtatggacgagctttccgaggaggacaagctcaccgtcgagcgtgcccgtaagatccagcgtttcatgagccagcccttcgctgtcgctcaggtcttcactggtatcgagggcaagctcgtctcgctcaaggacaccatctcggcctgcaaggagatccttcgtggtgaccacgatgctcttcctgagtccgctttctacatgtgcggtggtatcgacgacgtcaagaagaaggccgaggagatcgctcgcagcacctaa

SEQ ID NO: 43293 - protein, 523 aa, Ustilago maydis 521
MPVIQRTAVRAASRSALRARQNAAAFSSVARAAVTASSSAPRGLATEASPKGQTGAVKAVIGPVVDVQFDTEDLPSIFNALEVQNVTGGGRLVLEVAQHLGENTVRAIAMEGTEGLVRGQKVVDTGLPIQIPVGPGTLGRIMNVIGEPMDERGPIKGNKLAPIHVEPPAFVDQSTKAEVLETGIKVVDLLAPYARGGKIGLFGGAGVGKTVLIQELINNVAKAHGGYSVFTGVGERTREGNDLYHEMIETGVINLEGDSKVALVFGQMNEPPGARARVALTGLTIAEYFRDEEGQDVLLFIDNIFRFTQAGSETSALLGRIPSAVGYQPTLATDMGVMQERITTTKKGSITSVQAVYVPADDLTDPAPATTFAHLDATTVLSRGIAELGIYPAVDPLDSKSRMLDPAVVGREHYDIATGVQKLLQDYKSLQDIIAILGMDELSEEDKLTVERARKIQRFMSQPFAVAQVFTGIEGKLVSLKDTISACKEILRGDHDALPESAFYMCGGIDDVKKKAEEIARST

SEQ ID NO: 43294 - DNA, 1557 bp, Tribolium castaneum
  CDS (1)..(1557)
atgttgggtgctgtggcaagagctggatccagccttttggctggaaaaaccatcgaaaaacttggaagtgagtcgctgaaagtcgtctccgtgtacaatggatcccaacgtggtttggctgccaaggccgccgcctccggcaaacccaacggtaaagtggttgccgtaatcggtgccgtcgtcgacgtccaattcgacgacaaccttcccccaatccttaacgcccttgaagtccaaaaccgttccccacgtcttgtcctggaagtcgcccaacatttgggtgaaaacaccgtccgtaccatcgccatggacggtaccgaaggtctcgtacgtggacaagccgtcagcgataccggctatcccatccgtatcccagtcggcgctgaaacccttggccgcattataaacgtcattggtgaacccattgacgaaagaggtccagtaccaaccgataaacttgcacccattcatgctgaagctcccgaattcgttgaaatgagtgtcgagcaagagattctcgtcactgggattaaagttgttgatttgttggcaccgtatgccaagggcgggaaaattgggctttttggaggcgctggagtcgggaagactgtgctgattatggagttgatcaataatgtggctaaggcacatggtgggtattccgtgtttgccggagttggggagaggaccagagaagggaatgatttgtaccatgaaatgatcgagtctggtgttatttccttgaaggataagacatcgaaggtagcgttggtgtatggacaaatgaacgaaccaccaggcgccagagctagggtggctttgaccggattgacagtcgctgaatatttcagggatcaagaaggacaagatgtgctgttgtttattgataatattttcaggttcacccaagctggttctgaagtatcagctctgttgggtcgtatcccctctgctgtgggctaccagccgactttagccactgacatgggtagcatgcaggaacgaattaccaccacgaaaaagggctcaatcacgtcagtccaggccatttacgtgcccgctgacgatttaactgaccccgcccctgcgacaacattcgcccacttggacgccacaactgtcctgtcccgtgctattgccgaattgggcatttacccggccgtggatcccctggattccacctcgcgtattatggaccccaacatcatcgggcaggagcactacaatgtggcccgtggcgtccagaaaatcctccaggattataaatcgctccaggatattattgccatcttgggcatggacgagctgtctgaagacgacaagttgacggtggcacgtgccaggaagatccagcgtttcctgtcgcagccgttccaagtcgctgaagttttcaccggacatgctggcaagttggtgccgttgcaggagaccatcaaaggattccagaagattctaggaggggagtacgaccatttgcccgaagttgcgttctatatggtcgggcccattgaagaggtcgtacagaaagcagagaagttagccgagtctactgcttaa

SEQ ID NO: 43295 - protein, 518 aa, Tribolium castaneum
MLGAVARAGSSLLAGKTIEKLGSESLKVVSVYNGSQRGLAAKAAASGKPNGKVVAVIGAVVDVQFDDNLPPILNALEVQNRSPRLVLEVAQHLGENTVRTIAMDGTEGLVRGQAVSDTGYPIRIPVGAETLGRIINVIGEPIDERGPVPTDKLAPIHAEAPEFVEMSVEQEILVTGIKVVDLLAPYAKGGKIGLFGGAGVGKTVLIMELINNVAKAHGGYSVFAGVGERTREGNDLYHEMIESGVISLKDKTSKVALVYGQMNEPPGARARVALTGLTVAEYFRDQEGQDVLLFIDNIFRFTQAGSEVSALLGRIPSAVGYQPTLATDMGSMQERITTTKKGSITSVQAIYVPADDLTDPAPATTFAHLDATTVLSRAIAELGIYPAVDPLDSTSRIMDPNIIGQEHYNVARGVQKILQDYKSLQDIIAILGMDELSEDDKLTVARARKIQRFLSQPFQVAEVFTGHAGKLVPLQETIKGFQKILGGEYDHLPEVAFYMVGPIEEVVQKAEKLAESTA

SEQ ID NO: 43296 - DNA, 1458 bp, Chlorokybus atmophyticus
  CDS (1)..(1458): transl_table=11
atgaccacgaccaacgcagtcaaaacaaaaaatatagggtatattactcagattattggccctgtaatggatgttaagttttctccaggcaaaatgcctaacatttataatgcattaattgttaatggtaaaaacgaagctggtgacgaaattagcgtaacttgtgaagttcaacaattactaggggataataaagtaagagctatctctatgagtggtactgatgggcttatgagaggtatggaagtattagacacaggagctccattaagtgtacctgtaggtgaagctactcttggacgtatttttaatgtactaggcgaacctgtagataatcttggaccggttgctaacaaatctacattacctattcacagggatccgcccgcttttaccgaattagatactaaattatcaatctttgaaacaggaataaaagttgtagatcttttagccccttatcgtcgaggagggaagattggtttatttggtggcgcgggtgttggaaaaacagtacttattatggaattaattaataatattgccaaagcccatggtggagtttccgtttttggtggtgtaggagaacggacacgcgaaggaaatgacttataccaagagatgaaagagtctaaagtgatcaatgaagaaaacttatctgaatcaaaggttgctttagtttatggtcaaatgaatgaaccaccaggtgcacgtatgagagttgggttaactgcacttacgatggctgaatatttccgagatgttaataaccaagacgttttgctgtttattgacaatattttccgattcgttcaagcgggttccgaagtatccgctcttcttggtagaatgccgtctgcagtaggttatcaaccgactcttagtagagaaatgggtactcttcaagaacgtattacttctaccaaaaaaggatccattacatctattcaagctgtttatgtgcctgccgatgacttaacagatccagcacctgctactacatttgctcatttagatgctactactgtattatctagaggtttagctgctaaaggtatttatcctgctgtagatcctttggattctacttctactatgttgcaaccatggattgttggagaagaacattatgacacagctcaacgtgtaaaacagactttacaacgatacaaagagctacaggacattattgcgattcttggtttagatgaattgtcagaagaagaccgtttaacagtagctagagcacgcaagattgaacgttttctttcacaaccattctttgtagctgaagtctttaccggatctcctggtaaatatgtaagcttagcggatacaatcaaaggttttctaatgattctttccggagaattagatagtcttccagaacaagcattttatctagtaggcgacattggagaagctattgcaaaagcagaaaaactaaaagataaatag

SEQ ID NO: 43297 - protein, 485 aa, Chlorokybus atmophyticus
MTTTNAVKTKNIGYITQIIGPVMDVKFSPGKMPNIYNALIVNGKNEAGDEISVTCEVQQLLGDNKVRAISMSGTDGLMRGMEVLDTGAPLSVPVGEATLGRIFNVLGEPVDNLGPVANKSTLPIHRDPPAFTELDTKLSIFETGIKVVDLLAPYRRGGKIGLFGGAGVGKTVLIMELINNIAKAHGGVSVFGGVGERTREGNDLYQEMKESKVINEENLSESKVALVYGQMNEPPGARMRVGLTALTMAEYFRDVNNQDVLLFIDNIFRFVQAGSEVSALLGRMPSAVGYQPTLSREMGTLQERITSTKKGSITSIQAVYVPADDLTDPAPATTFAHLDATTVLSRGLAAKGIYPAVDPLDSTSTMLQPWIVGEEHYDTAQRVKQTLQRYKELQDIIAILGLDELSEEDRLTVARARKIERFLSQPFFVAEVFTGSPGKYVSLADTIKGFLMILSGELDSLPEQAFYLVGDIGEAIAKAEKLKDK

SEQ ID NO: 43298 - DNA, 1461 bp, Candidatus Protochlamydia amoebophila UWE25
  CDS (1)..(1461): transl_table=11
gtgaatttttcgaatcatttgaagaaactcaatagaaaaggctcaaataaaaataaaaggcaaatgatggcggtaggaaaagtcaaacagattgtaggtcccacattagatatcgagtttcctcctgggcagcttccaaacattttaaatgcgattaaaatcattgatcccaaagatcaacgagaattaattgctgaagttgcgatgcacttaggagataaccaagttcgttgtattgccctatcatctacagatggtttggtgagagaagcccaagccgttgatactgaagctcctatttctattcctgtgggaagtccaacacttggccggctccttaatgtcctaggtcaaccgatcgacgaaatgggagctatcgaaaacgctgaaatttctcctattcacaaagcttcccccactttcgaagagcaagatacgcagggagtcatttttgaaacagggattaaggttattgaccttctttgcccctatacaaaaggagggaaagttggattgtttggaggggcaggagttggtaaatcagtcattgtaatggaattaattcataacattgccacccatcatggaggctattctgttttttgcggaatcggggaaagaacaagagaaggaaatgatttatggttagaaatgaaagagtccggtattctctctaagactagtctcgtatttggccagatgaacgaacctcctggggcaagaatgcgagtaggtttaacaggattaacgatggcagagcattttagagaccaagagcatcaaaatgtccttttattcattgataatattttccgttttgttcaagcaggatcagaagtttctgcgttgctaggtagaatgccgtccgctgtcggttatcagccaactttagcaagtgaaattggaagtttacaagaaagaatcacttcgacaaagcatggttctattacctcagtccaagcgatttatgttccagcagatgattatacagatccggcaccagctagtatttttccccatttagatgctgcaacaactctctcgcgtcaaattgcggaactgggcatttatccagctgtagatcctttaaattcaagttcgcggattttagacccccacgttttaggtgaagagcattatcaggttgctagacaagtgcaaaaagttttgcagcgttataaagatttgcaagacatcattgcaattttgggaattgatgaattatctgaagaagatcagttaacagtttctcgtgctcgtcgcattcaaaaatttttatcgcaaccattttttgttgccgaaacgtttacaggaaaaaaaggacgttttgttaaattgcctgatactatcaaaggattcaaaatgatagtagaaggcgaaatggataatattcctgagcaagctttttatatggtgggaacaattgaagaagttttcgaaaaagctgagcaaatgaaataa

SEQ ID NO: 43299 - protein, 486 aa, Candidatus Protochlamydia amoebophila UWE25
MNFSNHLKKLNRKGSNKNKRQMMAVGKVKQIVGPTLDIEFPPGQLPNILNAIKIIDPKDQRELIAEVAMHLGDNQVRCIALSSTDGLVREAQAVDTEAPISIPVGSPTLGRLLNVLGQPIDEMGAIENAEISPIHKASPTFEEQDTQGVIFETGIKVIDLLCPYTKGGKVGLFGGAGVGKSVIVMELIHNIATHHGGYSVFCGIGERTREGNDLWLEMKESGILSKTSLVFGQMNEPPGARMRVGLTGLTMAEHFRDQEHQNVLLFIDNIFRFVQAGSEVSALLGRMPSAVGYQPTLASEIGSLQERITSTKHGSITSVQAIYVPADDYTDPAPASIFPHLDAATTLSRQIAELGIYPAVDPLNSSSRILDPHVLGEEHYQVARQVQKVLQRYKDLQDIIAILGIDELSEEDQLTVSRARRIQKFLSQPFFVAETFTGKKGRFVKLPDTIKGFKMIVEGEMDNIPEQAFYMVGTIEEVFEKAEQMK

SEQ ID NO: 43300 - DNA, 1425 bp, Legionella pneumophila subsp. pneumophila str. Philadelphia 1
  CDS (1)..(1425): transl_table=11
atgggtcatgaatacaattggaaaatgatggataaaaacacggctgttgctcaaactcatggaactcccatcggcaggataatcgaaatcaatggccctgttgtcaggatacattgtgatgtactacctcctttgcatcaatctcttaaaacttacacggacagtgatgaatacattttggaagtgtgtcagcatcttgatgagcatcatgtgagagccatcacgctccaccgtgcctcaggattgcaaagaggtttaatagtttatgaccaaggcacttcgttacgaattcccgtttcaaaagaatgcttgggccgccttttaaatatttttggtgagccattagacggagccccgccattagaaacccatgaatatcgtgatgttctggcaaacttagcgccacttgaaatgacgagcactcaagaaaccattcttgagactggaattaaagtcattgatttactttgtcctttcgtcagagggtgtaaaacgggattgtttggtggtgcaggagttgggaaaaccgtactcctgatggaattgatgcatgccattattcaattgcatcaagggacctctgtctttgctggtgttggggagcgcattcgggaaggacatgaattgtggcatgagatgaaatccgcaggcgtaatggataaaaccctcatggtgtttggtcaaatggacgaatcaccgggagtgcgttttcgcacagggttatcggcattaacttatgcggaatatttgcgtgatacgttgggccatgaggttctttttcttgtggataatatttatcgttttgtgcaagccggcagtgaaatttcggggttacttggccgaatgccggctagtgtcggttatcaacccaccttaatgactgagatagcggaacttgaagagcgcatgacatcgactgcaaaaggagcagtgacctcggtacaagcggtttatgttccggctgatgatatgagcgatccggcggtgaccgggattattactcatttggattccatcatagtactctctcgcgcacaagcaggcaaaggcatttatcccgccgtggatcccttagcttccaagagtcaatttatggataaaatcctattgggcgagcgacattattccattgcacaagccgtacgagaacacctggaacgttatcaagaattagaagacatgatttctatgatggggattgaagagctttctcctaaagaccgtgctattgtgttaagagcacgtaaactgcagcgctatcttagccaacccttccatgtcaccaaacttcaaacaggaatggaagggaaatcggtttcattagaacacacattaaccgattgcgaatcatttctaagaggcgattacgatgaattttcagaagaagcgtgttacatgaggggtgccatggataaagggagataa

SEQ ID NO: 43301 - protein, 474 aa, Legionella pneumophila subsp. pneumophila str. Philadelphia 1
MGHEYNWKMMDKNTAVAQTHGTPIGRIIEINGPVVRIHCDVLPPLHQSLKTYTDSDEYILEVCQHLDEHHVRAITLHRASGLQRGLIVYDQGTSLRIPVSKECLGRLLNIFGEPLDGAPPLETHEYRDVLANLAPLEMTSTQETILETGIKVIDLLCPFVRGCKTGLFGGAGVGKTVLLMELMHAIIQLHQGTSVFAGVGERIREGHELWHEMKSAGVMDKTLMVFGQMDESPGVRFRTGLSALTYAEYLRDTLGHEVLFLVDNIYRFVQAGSEISGLLGRMPASVGYQPTLMTEIAELEERMTSTAKGAVTSVQAVYVPADDMSDPAVTGIITHLDSIIVLSRAQAGKGIYPAVDPLASKSQFMDKILLGERHYSIAQAVREHLERYQELEDMISMMGIEELSPKDRAIVLRARKLQRYLSQPFHVTKLQTGMEGKSVSLEHTLTDCESFLRGDYDEFSEEACYMRGAMDKGR

SEQ ID NO: 43302 - DNA, 1452 bp, Corynebacterium glutamicum ATCC 13032
  CDS (1)..(1452): transl_table=11
atgactacagctcttgaagagcagaacgcacagcaggcagccactgccggccgtgtcgtgcgtgtcattggtgcggtcgtcgacgtggagtttccccgcggcgagctgccagcactgtacaacgcacttactgtagaggtaaccctcgaatcagttaagaagaccgttgttctcgaggttgctcagcacctcggcgacaacctcatccgcaccatcgctatggcaccaaccgacggacttgtccgcggtgctgctgtaaccgatactgcacgcccaatttccgtaccagtgggcgatgttgttaagggccacgtattcaacgctttgggcgactgcctagacgacgtttccctgaacaacaacccagagatcgagcgttggggcatccaccgcgagccaccatcattcgatcagcttgagggtaagaccgagatcctggaaacaggcatcaaggttatcgaccttctcaccccttacgttaagggtggaaagatcggcctcttcggtggtgcaggtgtgggtaagaccgttcttatccaggaaatgatcacccgtattgcacgtgagttctccggtacttccgtgttcgcaggtgttggtgagcgtacccgtgagggcaccgacctcttcctcgaaatggaagaaatgggcgttctccaggacaccgccctggtgttcggtcagatggatgagccaccaggagtccgtatgcgcgtggctctgtccggcctgaccatggcggagtacttccgcgatgttcagaaccaggacgtgctgctgttcatcgacaacatcttccgtttcacccaggcaggttctgaggtttccacccttctgggtcgtatgccttccgccgtgggttaccagccaaccctggctgacgagatgggtgttctccaggagcgcattacctccaccaagggccgttcgattacctctctgcaggccgtttacgttcctgccgatgactacaccgacccggctccagcgaccaccttcgctcacttggatgcaaccaccgagcttgaccgctccattgcttccaagggtatttacccagcagtgaacccactgacctccacctctcgtattctcgagccagcaatcgttggtgagcgtcactacgaggtttctcagcgtgtcatcggcattctgcagaagaacaaggaacttcaggacatcatcgccatccttggtatggacgagctttctgaagaggacaagatcaccgttgcacgtgcgcgtcgcatcgagcgcttcctgggtcagaacttcttcgttgcagagaagttcaccggtcttcctggctcctacgtgccactgaccgacaccgtcgacgctttcgagcgtatttgcaacggcgacttcgaccactacccagagcaggctttcaacggcctcggtggtttggacgatgtcgaagctgcatacaagaagctgaccggaaagtaa

SEQ ID NO: 43303 - protein, 483 aa, Corynebacterium glutamicum ATCC 13032
MTTALEEQNAQQAATAGRVVRVIGAVVDVEFPRGELPALYNALTVEVTLESVKKTVVLEVAQHLGDNLIRTIAMAPTDGLVRGAAVTDTARPISVPVGDVVKGHVFNALGDCLDDVSLNNNPEIERWGIHREPPSFDQLEGKTEILETGIKVIDLLTPYVKGGKIGLFGGAGVGKTVLIQEMITRIAREFSGTSVFAGVGERTREGTDLFLEMEEMGVLQDTALVFGQMDEPPGVRMRVALSGLTMAEYFRDVQNQDVLLFIDNIFRFTQAGSEVSTLLGRMPSAVGYQPTLADEMGVLQERITSTKGRSITSLQAVYVPADDYTDPAPATTFAHLDATTELDRSIASKGIYPAVNPLTSTSRILEPAIVGERHYEVSQRVIGILQKNKELQDIIAILGMDELSEEDKITVARARRIERFLGQNFFVAEKFTGLPGSYVPLTDTVDAFERICNGDFDHYPEQAFNGLGGLDDVEAAYKKLTGK

SEQ ID NO: 43304 - DNA, 1425 bp, Methanosarcina barkeri str. Fusaro
  CDS (1)..(1425): transl_table=11
atggtagatagaagtcggcccttgaatctcggtaaggtcatctcggtgcgcggcagcattgtagatgtattgttcgagaggcatttgccacctgtatatacactgctacgtgcaggaaggctacgtgcaggaagggaaagccagattgccatagaagttttgacgcaacttgacgcgcatcatgttcgtggaattgctctgaccccaactgagggtcttgctcgaggcatggcagtggaagatacaggtgggcctttgaaagcgcctgttggtagggaaatcctttctcgaatgttcgatgtgtttggaaataccatagaccgcaggaaacctccgtctgatatccagtggcgctcaatccatcaagctccgccaccactgatgcgtcgatccactacgtctgaaatcttcgagactggaatcaaagctatagatgtactggtaccgcttgagcgtggaggtaaagcaggtctattcggaggagcaggcgttggtaagacagtgttgctaaccgagatgattcataacgtagtcaagcaacaccagggagtgagcatattttgcggaataggcgagcgttgtcgagaaggggaagaactttatcgtgatatgaaagacgctggtgtgcttccgcatacggttatggtattcggccagatgaacgagccaccaggcgcccgttttcgtgtagggcatacggcactgacaatggcagagtacttcagagacgatgaacgccgagatgtgctactgcttatagataacattttcaggtttattcaggctggttccgaagtatctggcttgatggggcagatgccttcacgcctgggatatcagccgacattgggaactgaattatccgagttagaagagcgcatatctactactgatgccggagccataatgtcgattcaagcggtgtatgtgcctgctgacgatttcactgacccttcggctgtgcatacattctcgcatctatcggcatcaattgtcctctctcgtaagagggcaagcgaggggctttatccggctattgaccctttgcagtcaaactccaaaatggccacacctggcattattggtgaaaggcattatcacctggctcagaaaatcaggcagacgcttgcgcaatactcagaacttaaagatattatctcaatgcttggcctggagcaattatcgcctgaggaccgcaatgttgtagcccgcgctcgccgcctggaacgtttcctgacgcagccgtttttcaccactgagcagttcacaggcattaaaggcaaaaccgttagcctttcagatgcgctcgacggctgcgatcgtatcttgcatgatgaattcaaagactattccgaaggcgacctctacatgatcggaacaattgacgaagcaatagccaaaaaatcaagccgggaaaaatcatga

SEQ ID NO: 43305 - protein, 474 aa, Methanosarcina barkeri str. Fusaro
MVDRSRPLNLGKVISVRGSIVDVLFERHLPPVYTLLRAGRLRAGRESQIAIEVLTQLDAHHVRGIALTPTEGLARGMAVEDTGGPLKAPVGREILSRMFDVFGNTIDRRKPPSDIQWRSIHQAPPPLMRRSTTSEIFETGIKAIDVLVPLERGGKAGLFGGAGVGKTVLLTEMIHNVVKQHQGVSIFCGIGERCREGEELYRDMKDAGVLPHTVMVFGQMNEPPGARFRVGHTALTMAEYFRDDERRDVLLLIDNIFRFIQAGSEVSGLMGQMPSRLGYQPTLGTELSELEERISTTDAGAIMSIQAVYVPADDFTDPSAVHTFSHLSASIVLSRKRASEGLYPAIDPLQSNSKMATPGIIGERHYHLAQKIRQTLAQYSELKDIISMLGLEQLSPEDRNVVARARRLERFLTQPFFTTEQFTGIKGKTVSLSDALDGCDRILHDEFKDYSEGDLYMIGTIDEAIAKKSSREKS

SEQ ID NO: 43306 - DNA, 1542 bp, Rubrobacter xylanophilus DSM 9941
  CDS (1)..(1542): transl_table=11
atggcggagaacggcggagccgagagggctgtgagccaggacggccgcagggacggccagccccgcgagggcggggtcggacgtgtcgtagaggtcaaggggccggtggtcgacgtccggtttccgccggaccagatcccggagatctacaacgccctgacctgcaagatagagaccgaggagggggagcacaccctcaccctcgaggtccagcagctgctcggggacgacatggtgcgcaccgtggccatgtcctccaccgacggcctcaggcggggcgtcgaggtgcaggacaccggcaggccgatagccgtcccggtgggcgaggcggtcctcgggcgggtgctcgacgtgctcggggagccggtggacgagcaggggccggtcgagggcgaggccgaccgctggccgatccaccgccccgcccccaagttcgaggacctctccaccaaggccgagcagttcgtctccggcatcaaggtcatagacctgctgtgcccggtgaggaggggcggcaaggtcggcctgttcgggggcgcgggcgtgggcaagaccgtgctcatcaccgagctgatcaacaacatcgccctgcagtacgagggcacctcggtcttcaccggcgtgggggagcggacccgcgaggggacggccctctacggcgagatggaggaggccggggttctcaagaacacggcgctgatcttcggccagatgaacgagccgcccggggcccgcttccgggtggggctgaccggcgtgaccatcgccgagtacttcagggacgtgctcgggcaggacgtgctgttcttcctggacaacatcttccggttcgcccaggcgggcaacgaggtctcggcgctgatgggccggatgccctcggaggtcggctaccagcccacgctggggaccgagatgggggcgctgcaggagaggatcacctccaccaagaagggttcgatcaccagcttccaggcggtctacgtcccggcggacgacccgacggaccccgcgccgttcacggtcttcgcccacctggactccaccgtcgagctctcccggagcctcttcgagcaggccatcttcccggcggtggacccgctggcctcctcctcgaccatcctcgaccccgacgtggtcgggcaggagcactacgaggtcgcccaggaggtcaagggcatcctgcagcgctacaaggagctgcaggacatcatcgccatcctcggcatcgacgagctctccgaggaggacaaggtgatcgtggcccgcgcccggcggctgcagcgcttcctcagccagccgttcttcgtggccgagcagttcaccagcctccccggcaagttcgtggagctcgaggagaccgtccagagcttccgggaggtcgtcgagggcaagcacgacgacctgcccgagcaggccttctacctggtcggcggcatcgacgacgttctggagaaggcgcgccagctctccggcgaggaggaggaaggcgaggaggccgccaaggaggaggccggcgtgggggccggcggcgagggcagctga

SEQ ID NO: 43307 - protein, 513 aa, Rubrobacter xylanophilus DSM 9941
MAENGGAERAVSQDGRRDGQPREGGVGRVVEVKGPVVDVRFPPDQIPEIYNALTCKIETEEGEHTLTLEVQQLLGDDMVRTVAMSSTDGLRRGVEVQDTGRPIAVPVGEAVLGRVLDVLGEPVDEQGPVEGEADRWPIHRPAPKFEDLSTKAEQFVSGIKVIDLLCPVRRGGKVGLFGGAGVGKTVLITELINNIALQYEGTSVFTGVGERTREGTALYGEMEEAGVLKNTALIFGQMNEPPGARFRVGLTGVTIAEYFRDVLGQDVLFFLDNIFRFAQAGNEVSALMGRMPSEVGYQPTLGTEMGALQERITSTKKGSITSFQAVYVPADDPTDPAPFTVFAHLDSTVELSRSLFEQAIFPAVDPLASSSTILDPDVVGQEHYEVAQEVKGILQRYKELQDIIAILGIDELSEEDKVIVARARRLQRFLSQPFFVAEQFTSLPGKFVELEETVQSFREVVEGKHDDLPEQAFYLVGGIDDVLEKARQLSGEEEEGEEAAKEEAGVGAGGEGS

SEQ ID NO: 43308 - DNA, 1506 bp, Cytophaga hutchinsonii ATCC 33406
  CDS (1)..(1506): transl_table=11
atggcaaatattggtaaaatcactcagattattggtccggttgtagacgttggatttgaaggagagtacgctcttccgcaaattttagatgcattggaagtaactcgtccggatggacaaaaagtaatccttgaatgtcagcagcatttaggagaagatcgtgtacgtacaatcgcgatggactctacagatggtttgacaagaggaatggaagttaaaacatacggtatgccgatttctatgcctgtaggcgaagatatccgtggccgtttatataatgtggttggcgatgcaatcgatggtattccatcgggagtagctgctaaccgtatgtcaattcaccgtcaggctcctaaatttgaagatttatctacaaatacagaagtattgtttacgggtatcaaagtaattgatttgcttgagccatatgtaaaaggtggtaaaatcggtcttttcggtggtgccggtgtaggtaaaacagtgttgatcatggaattgatcaacaacattgcaaaagcatatgcaggtctttctgtatttgccggtgttggtgagcgtacacgtgaaggaaacgatttgcttcgtgaaatgattgaatcaaacgtaatccgttacggggatgaattcaaacattctatggaaaaaggagagtgggatttatctaaagtagatgctactgaattattaaagtctcaggcaacattggtgttcggtcagatgaacgaacctcctggagcaagagcaagagttgcgttggctggtcttacagttgcggaatatttccgtgatggagatggccagggccagggccgtgatatcttattctttattgataacatattcagatttacacaagcaggttcagaagtatctgccttgttaggtcgtatgccatctgccgtaggttaccaaccgacattggcaacagaaatgggtgcgatgcaggaacgtattacttcaacaaaaagaggttctattacatctgtacaagccgtttatgtaccagctgatgatttaaccgatccggctccggcaactacatttgcgcacttggatgctacaacggtattgaaccgtaaaatttctgaattaggtatctatcctgctgtggatccattggattctacatcacgtatccttagccctgaaattttaggtagcgaacattacgattgcgcacaacgtgtaaaagaaattttacagcgttacaaagaacttcaggatatcatcgccattcttggtatggatgaactttctgaagaagataagcaggcggttcaccgcgcgcgtcgtgtgcaacgtttcttatctcagcctttccacgtagcggaacagtttacaggtctaaaaggtgagttagtaaatattaaagatactatcaaaggatttaacatgatcatggacggtgcattagaccacttgcctgaagcagcgtttaaccttgtaggtagcattgagcaggcaattgctaaaggcgagaagcttgttgctgattctaaaaaataa

SEQ ID NO: 43309 - protein, 501 aa, Cytophaga hutchinsonii ATCC 33406
MANIGKITQIIGPVVDVGFEGEYALPQILDALEVTRPDGQKVILECQQHLGEDRVRTIAMDSTDGLTRGMEVKTYGMPISMPVGEDIRGRLYNVVGDAIDGIPSGVAANRMSIHRQAPKFEDLSTNTEVLFTGIKVIDLLEPYVKGGKIGLFGGAGVGKTVLIMELINNIAKAYAGLSVFAGVGERTREGNDLLREMIESNVIRYGDEFKHSMEKGEWDLSKVDATELLKSQATLVFGQMNEPPGARARVALAGLTVAEYFRDGDGQGQGRDILFFIDNIFRFTQAGSEVSALLGRMPSAVGYQPTLATEMGAMQERITSTKRGSITSVQAVYVPADDLTDPAPATTFAHLDATTVLNRKISELGIYPAVDPLDSTSRILSPEILGSEHYDCAQRVKEILQRYKELQDIIAILGMDELSEEDKQAVHRARRVQRFLSQPFHVAEQFTGLKGELVNIKDTIKGFNMIMDGALDHLPEAAFNLVGSIEQAIAKGEKLVADSKK

SEQ ID NO: 43310 - DNA, 1455 bp, Trichodesmium erythraeum IMS101
  CDS (1)..(1455): transl_table=11
atggtaagcaccttagaaaaaacaaacgtaggatctattactcaaattattggtccagtagtagatgttaagtttcctagtggaaatcttccagaaatctacaacgccttaacaattacagctaaaaatgaagctggacaagatgtatccgtgacctgtgaagtacaacaacttctaggggataaccaagtccgagctgtggccatgagtgctacagatggcctagtgcgtggcatggaagtagtagatacccgtgcagcaattagtgtaccagtaggaaatgccacccttggtagaatatttaatgttgtcggtgaaccagtagatgaattaggtccagttggtactgaagacaaatctcctattcaccgtgaagctcctaaactagtagatctagaaactcagccttcggtatttgaaacaggtattaaagttgtagacctacttgccccttatcgtcgtggtggaaaaattgggctatttggtggtgctggtgtaggtaaaaccgttatcatcatggaattaattaacaacatcgctaaagctcacggtggagtatccgtttttggtggtgtgggagagcggactcgtgaaggtaatgacctttacaatgagatgattgagtccaaagtaattaacccagaaaaccttagtgaatctaaagtggctctggtttatggtcagatgaatgaaccaccaggagctaggatgcgtgttggtctttcagctttgacaatggcagaatatttccgggatgttagtaagcaagacgtactactatttattgataatatcttcagatttgtacaagccggttctgaagtatctgctcttttaggaagaatgccttctgcggtgggatatcaacctacccttggtacagagatgggtgaattgcaagaacgaattacttctacaaaagaaggttctattacttctattcaagctgtgtatgtacctgcggatgacttgacagatcccgcacctgctactacttttgctcatctagatgctacaacagtattatcaaggggtcttgcttctaagggaatctatccagcagttgaccccttagattctacatctactatgttacaaccaagtgtagttggtaaagaacactatgatgttgctcgtgcagtacaatctactctacaaagatacaaagaacttcaagatattatcgctattcttggtttagatgaattatcagaagatgaccgtctggttgtagctcgtgctcgtaaaattgagcgctttttatcacaaccattctttgtagctgaagtatttaccggttctcctggtcaatatgtgaagttagaagatactatgaaaggtttcaaaatgattttatctggtgaacttgacgatttaccagagcaagctttctacatggtaggtggtattgaccaggtaattgccaaagctgaaaaacttaaagcagaagcatag

SEQ ID NO: 43311 - protein, 484 aa, Trichodesmium erythraeum IMS101
MVSTLEKTNVGSITQIIGPVVDVKFPSGNLPEIYNALTITAKNEAGQDVSVTCEVQQLLGDNQVRAVAMSATDGLVRGMEVVDTRAAISVPVGNATLGRIFNVVGEPVDELGPVGTEDKSPIHREAPKLVDLETQPSVFETGIKVVDLLAPYRRGGKIGLFGGAGVGKTVIIMELINNIAKAHGGVSVFGGVGERTREGNDLYNEMIESKVINPENLSESKVALVYGQMNEPPGARMRVGLSALTMAEYFRDVSKQDVLLFIDNIFRFVQAGSEVSALLGRMPSAVGYQPTLGTEMGELQERITSTKEGSITSIQAVYVPADDLTDPAPATTFAHLDATTVLSRGLASKGIYPAVDPLDSTSTMLQPSVVGKEHYDVARAVQSTLQRYKELQDIIAILGLDELSEDDRLVVARARKIERFLSQPFFVAEVFTGSPGQYVKLEDTMKGFKMILSGELDDLPEQAFYMVGGIDQVIAKAEKLKAEA

SEQ ID NO: 43312 - DNA, 1392 bp, Shewanella sp. MR-7
  CDS (1)..(1392): transl_table=11
atgagcacaggtactgttgtccaagtgattggcgcggttgtggacgtagagtttccacaagatgccgtacctcaggtatatgacgctctgaagatcacaggtgaaggctcctgtaatggtttggtgctggaagttcagcaacaactaggtggtggtgtagttcgtaccatcgctatgggtacttctgatggtctgcgtcgtggtcttgaggtagtaaactcaggttcacctatttctgttcctgttggtaccgccactcttggccgtatcatgaacgttttaggcgagcctattgatgaagctggcgcaattggcgaagaagaacgttatgttattcaccgcagcgctccttcatacgaagatcaatcaaacacgactgaactgttagagactggtatcaaggttatcgaccttgtatgtccattcgctaagggtggtaaagtaggtctgttcggtggtgcgggtgttggtaagacagttaacatgatggaactgatcaacaacatcgctaaagctcactcaggtctttctgtattcgccggtgtaggtgagcgtactcgtgagggtaacgacttctactacgagatgaaggattctggcgttctcgacaaagtagccatggtatatggtcaaatgaacgagccaccaggaaaccgtctgcgtgtagcactgaccggtctgactatggctgaaaaattccgtgacgaaggtcgtgacgttctgttgttcgttgacaacatctaccgttacaccctagccggtactgaagtatcagcactgttaggtcgtatgccttctgcggtaggttaccaaccaactctggctgaagaaatgggcgttctgcaagagcgtattacttcaactaagactggttctattacctctgtacaagcggtatacgtacctgcggacgacttgactgacccgtcaccagcaacaaccttcgctcacttagatgcgactgttgtattgtcacgtcaaatcgcttctctgggtatttacccagcggttgacccactggattctacttctcgtcaattagatccattagtggttggtcaagagcactatgacgtagctaacggtgtacaaactgttctgcaacgctacaaagagctgaaagacatcattgcgattctcggtatggacgaactgtcagacgacgataagatgaccgtttcccgtgcacgtaagattgagcgtttcttgtctcagcctttccacgtagcagaagtctttactggttctcctggtaagtacgtttctctgaaagacactatccgtggcttcaagggaattctgagtggtgagttcgatcacattccagaacaagcgttctacatggttggttctatcgacgaagctgtcgagaaagctaacaaaaagaaataa

SEQ ID NO: 43313 - protein, 463 aa, Shewanella sp. MR-7
MSTGTVVQVIGAVVDVEFPQDAVPQVYDALKITGEGSCNGLVLEVQQQLGGGVVRTIAMGTSDGLRRGLEVVNSGSPISVPVGTATLGRIMNVLGEPIDEAGAIGEEERYVIHRSAPSYEDQSNTTELLETGIKVIDLVCPFAKGGKVGLFGGAGVGKTVNMMELINNIAKAHSGLSVFAGVGERTREGNDFYYEMKDSGVLDKVAMVYGQMNEPPGNRLRVALTGLTMAEKFRDEGRDVLLFVDNIYRYTLAGTEVSALLGRMPSAVGYQPTLAEEMGVLQERITSTKTGSITSVQAVYVPADDLTDPSPATTFAHLDATVVLSRQIASLGIYPAVDPLDSTSRQLDPLVVGQEHYDVANGVQTVLQRYKELKDIIAILGMDELSDDDKMTVSRARKIERFLSQPFHVAEVFTGSPGKYVSLKDTIRGFKGILSGEFDHIPEQAFYMVGSIDEAVEKANKKK

SEQ ID NO: 43314 - DNA, 1497 bp, Platanus occidentalis
  CDS (1)..(1497): transl_table=11
atgagaattaatcctactacttccggtcctggggtttccgcacttgaagaaaaaaacctggggcgtatcgctcaaatcattggtccggtactagatgtagcttttccccccggcaaaatgcctaatatttacaatgctttggtagttaagggtcgagatactgtcgggcagcaaattaatgtgacttgtgaggtacagcaattattaggaaataatcgagttagagctgtagctatgagtgctacagatggcctgacgaggggaatggaagtgattgacacgggagctcctctaagtgttccagtcggtggagcgactctcggacgaattttcaatgttcttggagaacctgttgataatttaggtcctgtagatactcgcacaacatctcctattcatagatctgcgcctgcttttatacagttagataccaaattatctatttttgaaacaggaattaaggtagtggatcttttagctccctatcgccgtggaggaaaaatcggactattcgggggagctggggtgggtaaaacagtactcatcatggaattgatcaacaacattgccaaagctcatggcggtgtatctgtatttggcggagtaggcgaacgtactcgtgaaggaaatgatctttacatggaaatgaaagaatctggagtgattaatgaacaaaatattgcagaatcaaaagtagctctagtatatggtcagatgaatgaaccgccgggagctcgtatgagagttggtttgactgccctaactatggcggagtatttccgggatgttaatgaacaagacgtacttctatttatcgacaatatcttccgtttcgtccaagcaggatccgaagtatctgctttattaggcagaatgccttctgctgtgggttatcaacctacccttagtacagaaatgggttctttgcaagaaagaattacttctacaaaagaaggatccataacttctattcaagcagtttatgtacccgcggatgatttgaccgaccctgctcctgccacgacatttgcacatttagatgctactaccgtactatcaagaggattagctgccaaaggtatctatccagcagtggatcctttagattcaacgtcaactatgctccaacctcggatcgttggtgaggaacattatgaaactgcgcaaagagttaagcaaactttacaacgttacaaagagcttcaggacattatagctatccttgggttggacgaattatccgaagaggatcgtttaaccgtagcaagggcacgaaaaattgagcgtttcttatcacaacccttcttcgtagcagaagtatttaccggttctccagggaaatatgttggtttagcagaaacaattagggggtttcaactgatcctttccggagaattagatggtcttcctgagcaggccttttatttggtaggtaacatcgatgaagctaccgcgaaggctatgaacttagaagtggagagcaaattgaagaaatga

SEQ ID NO: 43315 - protein, 498 aa, Platanus occidentalis
MRINPTTSGPGVSALEEKNLGRIAQIIGPVLDVAFPPGKMPNIYNALVVKGRDTVGQQINVTCEVQQLLGNNRVRAVAMSATDGLTRGMEVIDTGAPLSVPVGGATLGRIFNVLGEPVDNLGPVDTRTTSPIHRSAPAFIQLDTKLSIFETGIKVVDLLAPYRRGGKIGLFGGAGVGKTVLIMELINNIAKAHGGVSVFGGVGERTREGNDLYMEMKESGVINEQNIAESKVALVYGQMNEPPGARMRVGLTALTMAEYFRDVNEQDVLLFIDNIFRFVQAGSEVSALLGRMPSAVGYQPTLSTEMGSLQERITSTKEGSITSIQAVYVPADDLTDPAPATTFAHLDATTVLSRGLAAKGIYPAVDPLDSTSTMLQPRIVGEEHYETAQRVKQTLQRYKELQDIIAILGLDELSEEDRLTVARARKIERFLSQPFFVAEVFTGSPGKYVGLAETIRGFQLILSGELDGLPEQAFYLVGNIDEATAKAMNLEVESKLKK

SEQ ID NO: 43316 - DNA, 1497 bp, Nandina domestica
  CDS (1)..(1497): transl_table=11
atgagaatcaatcctactacttctggtcctggggtttccgcacttgaagaaaaaaaccaggggcgtatcgttcaaatcattggtccggtactggatgtagcctttccaccgggcaagatgcctaatatttacaatgctttggtagttaaaggtcaagatactgttggccaacaaattaatgtgacttgtgaagtacagcaattattaggaaataatcgagttagagctgtagctatgagtgctacagatggtctgatgagaggaatggaagtgattgacacaggagctcctctaagtgttccggttggtggagcgactctcggacgaattttcaacgttcttggagagcctgttgataatttaggtcctgtagatacccgcacaacatctcctattcatagatctgcgcctgcctttatacagttagataccaaattatctatttttgaaacagggattaaagtagtggatcttttagctccctatcgccgtggaggaaaaatcggactattcgggggggctggagtaggtaaaacagtactcatcatggaattgatcaacaacattgccaaagctcatggaggtgtatccgtatttggcggagtaggcgaacgtactcgtgaaggaaacgatctttacatggaaatgaaagaatccggagtgattaatgaacaaaatattgcagaatcaaaagtagccctagtctatggtcagatgaatgaaccgccgggagctcgtatgagagttggattgactgccctaaccatggccgaatatttccgggatgttaatgaacaagacgtacttctatttattgacaatatttttcgtttcgtccaagcaggatccgaagtatctgctttattaggcagaatgccctctgctgtaggttatcaaccgactcttagtacagaaatgggttctttgcaagaaagaattacttctaccaaagagggatccataacttccattcaagcagtttatgtacctgcggacgatttgactgaccccgcccctgccacaacatttgcacatttagatgccactaccgtactatcaagaggactggctgccaaaggtatctatccagcagtagatcctttagattcaacgtcaactatgctccaacctcggatcgttggtgaggaacattatgaaactgcgcaaagagttaagcaaactttacaacgttacaaagaacttcaggacattatagctattcttggattggacgaattatccgaagatgatcgtttaaccgtagcaagagcacgaaaaattgagcgtttcttatcacaacccttcttcgtagcagaagtttttacaggttccccgggaaaatatgttggtctaacagaaacaattagggggtttcaactgatcctttccggagaattagatagtcttcccgagcaggccttttatttggtaggtaacatcgatgaagctaccgcgaaggctatgaacttagacgtggagagcaaattgaagaaatga

SEQ ID NO: 43317 - protein, 498 aa, Nandina domestica
MRINPTTSGPGVSALEEKNQGRIVQIIGPVLDVAFPPGKMPNIYNALVVKGQDTVGQQINVTCEVQQLLGNNRVRAVAMSATDGLMRGMEVIDTGAPLSVPVGGATLGRIFNVLGEPVDNLGPVDTRTTSPIHRSAPAFIQLDTKLSIFETGIKVVDLLAPYRRGGKIGLFGGAGVGKTVLIMELINNIAKAHGGVSVFGGVGERTREGNDLYMEMKESGVINEQNIAESKVALVYGQMNEPPGARMRVGLTALTMAEYFRDVNEQDVLLFIDNIFRFVQAGSEVSALLGRMPSAVGYQPTLSTEMGSLQERITSTKEGSITSIQAVYVPADDLTDPAPATTFAHLDATTVLSRGLAAKGIYPAVDPLDSTSTMLQPRIVGEEHYETAQRVKQTLQRYKELQDIIAILGLDELSEDDRLTVARARKIERFLSQPFFVAEVFTGSPGKYVGLTETIRGFQLILSGELDSLPEQAFYLVGNIDEATAKAMNLDVESKLKK

SEQ ID NO: 43318 - DNA, 1377 bp, Alkalilimnicola ehrlichei MLHE-1
  CDS (1)..(1377): transl_table=11
atgagctctggaaagattgttcaagtcatcggtgctgtggtggacgtggagttcccgcaggatcaggtgcccaagatctatgacgcgcttatcgtggacgagcgtggcctgaccctggaagtccagcagcagctgggcgacggggtggtgcgcaccatcgccatgggttccagtgacggcctgaagcgctccgaaaaggtcagcgccactggcaagccgatctccgtaccggtgggtaagggcaccctcggccggatcatggacgtcctgggcgagcccgtggatgagaagggcgcggtcgagaccgaggagcgctggggcattcatcggtcggcaccgagctttgccgagcaggccgggggcgccgagctgctcgagaccggtatcaaggtgatcgacctactctgccccttcgccaagggcggcaaggtcggcctcttcggcggcgccggcgtgggcaagaccgtcaacatgatggagctcatccgtaacatcgccaccgagcacgccggttactcggtgttcgccggggtgggggagcgtacccgtgagggcaacgacttctaccacgagatgaaagactccaacgtgctcgacaaggtcgccctggtctacggccagatgaacgagccgccgggcaaccgcctgcgtgtcgcgctgaccggcctgaccatggccgagtacttccgcgacgaggggcgtgacatcctgatgtttatcgacaacatctaccgttacaccctggcgggcaccgaggtgtcggcgctgctgggccgcatgccctccgcggtgggctatcagccgaccctggccgaggaaatgggtaagctccaggagcgcattacctccaccaagaccggatcgatcacctcggtgcaggcggtttacgtgccggcggatgacctcactgacccgtcgccggccaccaccttcgcccacctggacgccaccgtcgtgctggcccgcggtatcgccgagctgggcatctacccggccgtggatccgctcgactccacctcccgccagctcgatccgctggtggtcggcgaggagcactacaacgtggcgcgcggtgtccagggggtgcttcagcgctacaaggagctgcgcgacatcatcgcgatcctgggtatggacgagctgtcggaagacgacaaactgaccgtggcccgggcccgtaagatccagcggttcctgtcgcagcccttcttcgtggccgaggtcttcaccggtgccccgggcaagtacgtgcccctgaaggacaccatcgcctccttcaaggccatcctggacggcgagtacgaccacctgccggagcaggccttctacatggtcggcaccgtggacgaggcggccgagaaggcgaagaacctgtaa

SEQ ID NO: 43319 - protein, 458 aa, Alkalilimnicola ehrlichei MLHE-1
MSSGKIVQVIGAVVDVEFPQDQVPKIYDALIVDERGLTLEVQQQLGDGVVRTIAMGSSDGLKRSEKVSATGKPISVPVGKGTLGRIMDVLGEPVDEKGAVETEERWGIHRSAPSFAEQAGGAELLETGIKVIDLLCPFAKGGKVGLFGGAGVGKTVNMMELIRNIATEHAGYSVFAGVGERTREGNDFYHEMKDSNVLDKVALVYGQMNEPPGNRLRVALTGLTMAEYFRDEGRDILMFIDNIYRYTLAGTEVSALLGRMPSAVGYQPTLAEEMGKLQERITSTKTGSITSVQAVYVPADDLTDPSPATTFAHLDATVVLARGIAELGIYPAVDPLDSTSRQLDPLVVGEEHYNVARGVQGVLQRYKELRDIIAILGMDELSEDDKLTVARARKIQRFLSQPFFVAEVFTGAPGKYVPLKDTIASFKAILDGEYDHLPEQAFYMVGTVDEAAEKAKNL

SEQ ID NO: 43320 - DNA, 1428 bp, Hyphomonas neptunium ATCC 15444
  CDS (1)..(1428): transl_table=11
atgagcacccccgcaaacggcaaaggccgcatttcccaggttatcggcgccgttgtcgacgttgagttcgacggcgagctgccatcgatcctcaacgccctcgagaccttcaacaacggctcgcgccttgttctcgaagtcgcccagcacctcggcgagaatactgtccgcacgatcgccatggactcgaccgaaggtctggttcgcgggcagcccgtgtcggacatcggtacgccgatcacggttccagttggcccggccactcttggccgcatcatgaacgtcatcggcgagccgattgacgagcgcggcccggtcaatgccgacacctacatgccgatccacgctcaggcgcctgccttcgttgatcaggccacggaatccgaagtactcgtcaccggtatcaaggttatcgaccttctctgcccctacgcgaaaggcggcaagatcggcctcttcggcggcgccggcgtgggcaagacggttctgatcatggaactggtgaacaacattgcgaaactgttcggcggctactcggtgtttgccggcgtcggcgagcggacccgtgaaggtaacgacctctatcacgagatgatcgagtcgaacgttatcaacctcgaaggcgaaagccgcatgtcgctggtttatggccagatgaacgagcctccaggcgcccgtgcacgggttgctctgactggtctgacgcaagcggaatacttccgcgatgtggaaggcaaggacgtgctgttcttcgtcgacaacatcttccgcttcacccaggcaggttcggaagtgtccgctctgctcggccgtattccttcggccgtgggttaccagccgacgctggcgactgacatgggcgcgcttcaggagcgcatcacctcgaccaacaaagggtcgatcacgtcggtccaggccgtctacgttcctgcggacgaccttactgaccctgcgcctgccacatcgtttgctcaccttgacgcgacaacggttctcaaccgcgcgatctccgagaagggcatctaccctgctgtggacccgcttgactccacctcgcgtattctcgaccctatggttgtcggcgaagagcactacgaagtggctcgcggcgttcagcagatcctgcagaagtacaaagagcttcaggacatcatcgccatcctcggcatggacgagctttcggaagacgacaaagtcaccgttgcgcgcgctcgtaaagttgagcgtttcctgtcgcagccattcgacgttgcccaggtcttcaccggttcgccaggcgtccaggtgaaactcgaagatacgatcaaaggcttcaaaggcctgatcagcggcgagttcgaccacctgccagagcctgccttctacatggtcggcaacatcgaggaagccaaagccaaagctgcgaagctgatggcggacgctgcctga

SEQ ID NO: 43321 - protein, 475 aa, Hyphomonas neptunium ATCC 15444
MSTPANGKGRISQVIGAVVDVEFDGELPSILNALETFNNGSRLVLEVAQHLGENTVRTIAMDSTEGLVRGQPVSDIGTPITVPVGPATLGRIMNVIGEPIDERGPVNADTYMPIHAQAPAFVDQATESEVLVTGIKVIDLLCPYAKGGKIGLFGGAGVGKTVLIMELVNNIAKLFGGYSVFAGVGERTREGNDLYHEMIESNVINLEGESRMSLVYGQMNEPPGARARVALTGLTQAEYFRDVEGKDVLFFVDNIFRFTQAGSEVSALLGRIPSAVGYQPTLATDMGALQERITSTNKGSITSVQAVYVPADDLTDPAPATSFAHLDATTVLNRAISEKGIYPAVDPLDSTSRILDPMVVGEEHYEVARGVQQILQKYKELQDIIAILGMDELSEDDKVTVARARKVERFLSQPFDVAQVFTGSPGVQVKLEDTIKGFKGLISGEFDHLPEPAFYMVGNIEEAKAKAAKLMADAA

SEQ ID NO: 43322 - DNA, 1515 bp, Oenococcus oeni PSU-1
  CDS (1)..(1515): transl_table=11
atggcagaaaagaaaacaacaaaagctactgcttcaagtacgagcaaagttgctaaaagaacccgtggttcaaagtctactcaaactaaggcctctgtttcgaatgaaaaggatttggctgaaggaactgttcttcaggttatcggaccgattgtagatgtccagtttcctgataataagaaacttcctgatatcaacaatgctttaaaggttcaacgaattgatggttctgaattgactatcgaagtttcaattgatcttggcgacagtgtagttcggacgattgcgatggattcgacagatggattgactcgtggcatgaaggttcttgataccggtgctcctattgaagttccggttggagaagcgacgttgggacgtgtctttaatgttcttggtgagcctgttgatggaggagatccaattcctaatagcgttgaccgccatccgattcatcgttcggcgccaaagtatgatgaattggcaacttcaaccgaagtacttgaaacaggtatcaaagttattgatttacttgagccctatttgcgtggtggaaaaactggactatttggtggcgccggcgttggtaagactgttttaattcaggaattaattcataatatcgctcagggccataatggaatttctgtctttaccggagttggtgaacgtactcgtgaaggcaatgatatgtattacgaaatgaaggcaagcggtgttcttaaaaataccgccatggtctatggacaaatgaacgagccgcctggagcgcgtatgcgtgtcggtttgactggactgacgatggccgaagattttcgtgatcaagaaggtaaggatgttctcttatttattgataacatctttaggttcacacaagccggttcggaagtttctgctttacttggccgtattccttcagccgttggttaccagccgacattagctacggaaatgggtcaactgcaggaacggattacttcaactaagaagggatcagttacttcaattcaagcggtttacgttccggctgatgattatactgatccggctccggcaacaacttttgctcatttggatgctacaaccaatttggagcggtctctaacacaacaaggtatttatcccgctgttgatccattggaatctacttctagtgctttaacacctgatattgttggtgaagatcactatgaggttgctacacaggttcaacatttcttgcagcgttataaggagttgcaggatatcatttcgattctaggaatggatgaattgtctgatgaagagaaaacgatcgttaatcgtgctcgtcgtatccaattcttcttaagtcagcctttttctgttgctgaacagtttaccggcgttcctggacagtatgttccggttgaggacacagttcgtggatttaaggaaattcttgatggcaagcatgacgatcttcctgaagaagcatttagaaatgttggtacgatagaacaagcagttgaaaaggctaaaaagctggaaagctag

SEQ ID NO: 43323 - protein, 504 aa, Oenococcus oeni PSU-1
MAEKKTTKATASSTSKVAKRTRGSKSTQTKASVSNEKDLAEGTVLQVIGPIVDVQFPDNKKLPDINNALKVQRIDGSELTIEVSIDLGDSVVRTIAMDSTDGLTRGMKVLDTGAPIEVPVGEATLGRVFNVLGEPVDGGDPIPNSVDRHPIHRSAPKYDELATSTEVLETGIKVIDLLEPYLRGGKTGLFGGAGVGKTVLIQELIHNIAQGHNGISVFTGVGERTREGNDMYYEMKASGVLKNTAMVYGQMNEPPGARMRVGLTGLTMAEDFRDQEGKDVLLFIDNIFRFTQAGSEVSALLGRIPSAVGYQPTLATEMGQLQERITSTKKGSVTSIQAVYVPADDYTDPAPATTFAHLDATTNLERSLTQQGIYPAVDPLESTSSALTPDIVGEDHYEVATQVQHFLQRYKELQDIISILGMDELSDEEKTIVNRARRIQFFLSQPFSVAEQFTGVPGQYVPVEDTVRGFKEILDGKHDDLPEEAFRNVGTIEQAVEKAKKLES

SEQ ID NO: 43324 - DNA, 1401 bp, Leuconostoc mesenteroides subsp. mesenteroides ATCC 8293
  CDS (1)..(1401): transl_table=11
atgagtactggaaaagtcgtacaagtgattggtccggtcgtcgatattgcgtttgaagcagggcaacaagttcctgatatcaacaatgcccttgtaattgataagggtaatgggcaatcattgacagttgaagtatctttggctttgggtgacggcgttgtccgcacgattgccatggactcaacagacgggctccaacgaggcatgggagtagttgacactggtaatcctattgaggttccagttggtgaagctacacttggtcgtgtcttcaacgtattgggtgaacctgtagataataatggtgcaattgcttctgatgttcgtcgtagctcaattcatcgtgatgcaccaaagtatgatgagttgacaagctcgacagagatattggaaacaggtattaaagttattgatttgcttgctccatatgttcgtggtggaaaaattggtttgtttggtggtgccggtgttggtaagacagttctgattcaagaattaattcacaacattgcgcaaggccacaacggtatttcggtctttactggtgtcggggaacgtacccgtgaaggtaatgacatgtaccatgaaatggaagaatcaggcgttttgaaacaaactgccatggtttatggtcaaatgaacgaaccaccaggtgcacgtatgcgtgttgccttaacaggtttgacaatggctgaaaacttccgtgataatgaaggtaaggatgtgttgttgtttatcgataacattttccgtttcactcaggctggttctgaagtgtcagctttgttgggacgtattccatcagccgttggttatcagccaacattggcaacagaaatgggccaattgcaggaacgaattacttcaactaagaagggttcagttacttcaattcaagccgtttatgtgcctgccgatgattatactgatccagcgcctgctacaacattcgcgcatttggatgcaacaactaacttggaacgtgcattgacacaacaaggtatctacccagccgttgatcctttggcatcaacttcttctgctttggatccacaaattgttggtcaagaacattatgaagttgctactgaagtacaacgtacactgcaacgttatcgtgaattgcaagatatcatttcaattctgggtatggatgaattgtcagatgaagagaagacgactgttaaccgtgcacgtcgtattcaattcttcttgtcacaaccattttcagttgccgaaacgtttactggtatcaatggtgaatatgtaccagttgctgaaactgtacgttcattcaaggaaattttggatggtaaatatgatgatttgccagaagatgcattccgtaacgttggtgctattgaacaggttgttgaaaaagccaagacaatggcccaataa

SEQ ID NO: 43325 - protein, 466 aa, Leuconostoc mesenteroides subsp. mesenteroides ATCC 8293
MSTGKVVQVIGPVVDIAFEAGQQVPDINNALVIDKGNGQSLTVEVSLALGDGVVRTIAMDSTDGLQRGMGVVDTGNPIEVPVGEATLGRVFNVLGEPVDNNGAIASDVRRSSIHRDAPKYDELTSSTEILETGIKVIDLLAPYVRGGKIGLFGGAGVGKTVLIQELIHNIAQGHNGISVFTGVGERTREGNDMYHEMEESGVLKQTAMVYGQMNEPPGARMRVALTGLTMAENFRDNEGKDVLLFIDNIFRFTQAGSEVSALLGRIPSAVGYQPTLATEMGQLQERITSTKKGSVTSIQAVYVPADDYTDPAPATTFAHLDATTNLERALTQQGIYPAVDPLASTSSALDPQIVGQEHYEVATEVQRTLQRYRELQDIISILGMDELSDEEKTTVNRARRIQFFLSQPFSVAETFTGINGEYVPVAETVRSFKEILDGKYDDLPEDAFRNVGAIEQVVEKAKTMAQ

SEQ ID NO: 43326 - DNA, 1449 bp, Solibacter usitatus Ellin6076
  CDS (1)..(1449): transl_table=11
atggtaacgaccaacgtggtaaccggcaaagtagtcgtggtgtccggtccggccgtggattgcgaatttcccgagggacagattcccccggtgcatacggcgatccggatcatcagcgagggtttcgacattccgacgccgatcgatatcatctgcgaagtgcagcagcacatcggtgaagggcgcgtgcgtaccatcgcgctgcagcccaccgaagggctggttcgcggcatgcaggcaatcagcctgggccacccggtggaagtgccggtgggtccggaaacgttgggccgcgtgctcaacgttatcggcgagccggtggacgagatggggccggtcaacgccaagaagcattatccgattcaccgtccggcgccctcctttgaagaccagtcaacgcgcctcgaaatgttcgagaccggcatcaaggtcatcgatctgatcgagccttacttgcgcggcggcaaaatcggtctgttcggcggcgcgggcgtcggcaagaccgtcatcattcaggagctgatcaacaacctcgccatgaagcacggcggcgtctcggtgttcgccggcgtgggcgagcgcaccagggaaggcaacgatctctggctggaattccaggaatcgggcgttatcgacccgcacgattacaccaaatccaagtgcgccctgatctacgggcagatgaccgagccgcccggagcgcgtctgcgcgtcggcctcaccgggttgacggtcgccgagtacttccgcgatgaagaacaccaggacgtactgctcttcatcgacaatattttccgcttcacgcaggccggttcggaagtctccgcgctgctcggacgtatgcccagcgcggtcgggtaccagcccaacctggctaccgagatgggcgaattgcaggagcgcatcacctccaccaagaacggttccatcacctccgtgcaggccatctacgtgccggccgacgactacaccgaccccgctcccgcaacggccttcgcgcacctggacgccaccacgaatctctcgcgcgacatcgccgcgctgggcatttatccggcggtcgatccgctggcatccacctcgcgcattctggatccgcacatcgtcggcgaagatcactatgcaaccgcgcagatggtgaagggaacactgcagcgctacaaagacctgcaggacatcatcgccattctcggtatcgacgaactgtcggacgaagacaaactaactgtggcccgcgcgcgcaaggtgcagaaattcctttcgcagcccttccacgtggccgagcagttcaccggcttcaagggcaagtatgtgaagctggccgatagcatcaagggtttccgcgagatcgtggaaggcaagcacgatggcgtccccgaacaggcgttctacatgcaggggaccatcgaggacgtgctcgaaaaagcggaagccatgaagaaggcgtag

SEQ ID NO: 43327 - protein, 482 aa, Solibacter usitatus Ellin6076
MVTTNVVTGKVVVVSGPAVDCEFPEGQIPPVHTAIRIISEGFDIPTPIDIICEVQQHIGEGRVRTIALQPTEGLVRGMQAISLGHPVEVPVGPETLGRVLNVIGEPVDEMGPVNAKKHYPIHRPAPSFEDQSTRLEMFETGIKVIDLIEPYLRGGKIGLFGGAGVGKTVIIQELINNLAMKHGGVSVFAGVGERTREGNDLWLEFQESGVIDPHDYTKSKCALIYGQMTEPPGARLRVGLTGLTVAEYFRDEEHQDVLLFIDNIFRFTQAGSEVSALLGRMPSAVGYQPNLATEMGELQERITSTKNGSITSVQAIYVPADDYTDPAPATAFAHLDATTNLSRDIAALGIYPAVDPLASTSRILDPHIVGEDHYATAQMVKGTLQRYKDLQDIIAILGIDELSDEDKLTVARARKVQKFLSQPFHVAEQFTGFKGKYVKLADSIKGFREIVEGKHDGVPEQAFYMQGTIEDVLEKAEAMKKA

SEQ ID NO: 43328 - DNA, 1425 bp, Magnetococcus sp. MC-1
  CDS (1)..(1425): transl_table=11
atgagcgtagcacgcactggaaaagtggtacaggtagtcggaccggttgtggacgtccgcttcgagggcgaattgcccaacatcctcaatgcgttacacatggtgcgcaatggtgagcgtctggttttggaagtcgccacgcacatgggtgagggcaccgtgcgtgccatcgccatggacagcaccgacggtgtcgtccgcggcatggaagtaaccgacactggggacactatccgcgtgcctgtgggtcgtcaaaccctgggccgtattcttaacgtggtgggtgagcctcaagatgaaaaaggcccagtcgaaaccaccgagaccctgccgattcaccgtcctgctccggcctttgcccagcaagccaccagcgcagagatattggaaaccggcatcaaggtgatcgacttgctggccccctatgctaagggtggtaaagtgggtctgttcggcggtgcgggtgtgggtaagacggtgttgatcatggagctgatcaacaacgtagcccaggaacatggtggttattcggtgtttgccggtgtgggtgagcgtacccgcgaaggtaacgacctttaccacgagatggccgagtctggtgttattgatcccaatagctgggagaactctaaggccgctctgatctatggtcagatgaacgaaccccctggggcccgtgctcgggtggcgttgaccggtctgacggtggctgaatatttccgtgatttggggggccaggatgtgctcttcttcgtggataacatcttccgcttcacccaggctggtgctgaagtgtcggcgctgttgggtcgtatcccttctgcggtgggttatcagcctaccctaggtaccgacatgggtgctttgcaagagcgtatcaccaccaccaaaaccggttccatcacctctgtgcaagccgtctatgtgccggccgatgacttgaccgaccctgctccagccaccaccttctcccacttggatgccaccacggtgctaaaccgtgccatctctgagatgggtatctatcctgctgtggatcctctggactccacctcgcgggtgttggatcctaaggttgtgggtgaagagcattaccatacagcccgtgaagttcagcgcattctgcaaacctataaatccttgcaggatatcatcgccattctcggtatggatgagctttccgaagaagataagctggtggtgaaccgcgcgcgtaaaattcagcgtttcctctcccagcctttccatgtggctgaagtgtttaccggtaccaagggtgtctatgtacccgttaaaaagacggtacagggctttaaagagctgtgtgaaggcaagtatgacaatgtgccagaagcagccttctacatggtaagcgacattgatgctgctttggcaaaagctgagaagctgaaagcggcgagctaa

SEQ ID NO: 43329 - protein, 474 aa, Magnetococcus sp. MC-1
MSVARTGKVVQVVGPVVDVRFEGELPNILNALHMVRNGERLVLEVATHMGEGTVRAIAMDSTDGVVRGMEVTDTGDTIRVPVGRQTLGRILNVVGEPQDEKGPVETTETLPIHRPAPAFAQQATSAEILETGIKVIDLLAPYAKGGKVGLFGGAGVGKTVLIMELINNVAQEHGGYSVFAGVGERTREGNDLYHEMAESGVIDPNSWENSKAALIYGQMNEPPGARARVALTGLTVAEYFRDLGGQDVLFFVDNIFRFTQAGAEVSALLGRIPSAVGYQPTLGTDMGALQERITTTKTGSITSVQAVYVPADDLTDPAPATTFSHLDATTVLNRAISEMGIYPAVDPLDSTSRVLDPKVVGEEHYHTAREVQRILQTYKSLQDIIAILGMDELSEEDKLVVNRARKIQRFLSQPFHVAEVFTGTKGVYVPVKKTVQGFKELCEGKYDNVPEAAFYMVSDIDAALAKAEKLKAAS

SEQ ID NO: 43330 - DNA, 1392 bp, Shewanella sp. ANA-3
  CDS (1)..(1392): transl_table=11
atgagcacaggtactgttgtccaagtgattggcgcggttgtggacgtagagtttccacaagatgccgtacctcaggtatatgacgctctgaagatcacaggtgaaggctcctgtaatggtttggtgctggaagttcagcaacaactaggtggtggtgtagttcgtaccatcgctatgggtacttctgatggtctgcgtcgtggtcttgaggtagtaaactcaggttcacctatttctgttcctgttggtactgccactcttggccgtatcatgaacgtattaggcgaccctattgatgaagctggcgcaattggcgaagaagaacgttatgtgattcaccgcagcgctccttcatacgaagagcaatcaaacacgactgaactgttagagactggtatcaaggttatcgaccttgtatgtccattcgctaagggtggtaaagtaggtctgttcggtggtgcgggtgttggtaagacagttaacatgatggaactgattaacaacatcgctaaagctcactcaggtctttctgtattcgccggtgtaggtgagcgtactcgtgagggtaacgacttctactacgagatgaaggattctggcgttctcgacaaagtagccatggtttatggtcaaatgaacgagccaccaggaaaccgtctgcgtgtagcactgaccggtctgactatggctgaaaaattccgtgacgaaggtcgtgacgttctgttgttcgttgacaacatctaccgttacaccctagccggtactgaagtatcagcactgttaggtcgtatgccttctgcagtaggttaccaacccactctggctgaagaaatgggcgttctgcaagagcgtattacttcaactaagactggttctattacctctgtacaagcggtatacgtacctgcggacgacttgactgacccgtcaccagcaacaaccttcgctcacttagatgcgactgttgtattgtcacgtcaaatcgcttctctgggtatttacccagcggttgacccactggattcgacttctcgtcaattagatccattagtggttggtcaagagcactatgacgtagctaacggtgtacaaactgttctgcaacgctacaaagagctgaaagacatcattgcgattctcggtatggacgaactgtcagacgaagataagatgaccgtttcccgtgctcgtaagattgagcgtttcttgtctcagcctttccacgtagcagaagtctttactggttctcctggtaagtacgtatctctgaaagacactatccgtggcttcaagggaattctgagtggcgagttcgaccacattccagaacaagcgttctacatggttggttctatcgacgaagctgtcgagaaagctaacaaaaagaaataa

SEQ ID NO: 43331 - protein, 463 aa, Shewanella sp. ANA-3
MSTGTVVQVIGAVVDVEFPQDAVPQVYDALKITGEGSCNGLVLEVQQQLGGGVVRTIAMGTSDGLRRGLEVVNSGSPISVPVGTATLGRIMNVLGDPIDEAGAIGEEERYVIHRSAPSYEEQSNTTELLETGIKVIDLVCPFAKGGKVGLFGGAGVGKTVNMMELINNIAKAHSGLSVFAGVGERTREGNDFYYEMKDSGVLDKVAMVYGQMNEPPGNRLRVALTGLTMAEKFRDEGRDVLLFVDNIYRYTLAGTEVSALLGRMPSAVGYQPTLAEEMGVLQERITSTKTGSITSVQAVYVPADDLTDPSPATTFAHLDATVVLSRQIASLGIYPAVDPLDSTSRQLDPLVVGQEHYDVANGVQTVLQRYKELKDIIAILGMDELSDEDKMTVSRARKIERFLSQPFHVAEVFTGSPGKYVSLKDTIRGFKGILSGEFDHIPEQAFYMVGSIDEAVEKANKKK

SEQ ID NO: 43332 - DNA, 1458 bp, Mycobacterium avium 104
  CDS (1)..(1458): transl_table=11
atgcctgctactgaaaccgccgacaagaacacgaagtcggccaacagcgacaccagcggccgggtggtgcgggtcaccggaccggtcgtcgacgtcgagttcccgcggggttcggtgccggccctgttcaacgcactgcacgcggagatcacgttcgaggagctggccaagacgctgacgctcgaggtcgcccagcacctcggggacaacctggtgcgcaccatctcgctgcagcccaccgacggcctggtgcgcggcgtcgaggtgatcgacaccggtcgttccatctcggtgccggtcggccaggaggtcaagggccacgtgttcaacgccctggggcactgcctggacaagccgggttacggagaagacttcgaacactggtcgattcaccgcaagccgccgccgttcgaggagctggagccccgcacggagatgctcgagacgggtctgaaggtcgtcgacctgctcacaccgtacgtgcgtggcggcaagatcgccctgttcggcggcgccggcgtgggcaagacggtgctcatccaggagatgatcaaccgcatcgcccgcaacttcggtggtacctcggtgttcgccggggtgggggagcgcacccgtgagggcaacgacctgtgggtcgagttgcaggaagccaacgtgctcaaggacaccgcgctggtgttcggtcagatggacgagccgcccggcacccgtatgcgggtggcgctgtccgcgttgaccatggcggagtggttccgcgacgaggcgggccaggacgtgctgttgttcatcgacaacatcttccggttcacccaggccggctccgaggtctcgaccctgctcggccggatgccctcggcggtggggtatcagcccacgctggccgacgagatgggcgagctgcaggagcgcatcacctcgacccgtggccggtccatcacgtcgatgcaggcggtctacgtgcccgccgacgactacaccgacccggcgccggcgacgacgttcgcgcacctggacgccaccaccgagctgtcgcgttcggtgttctccaagggcatcttccccgcggtggacccgctggcgtccagctcgaccattctcgacccgggcgtggtcggcgaagagcactaccgggtggcgcaggaagtcatccgaatcctgcagcgctacaaggaccttcaggacatcatcgccatcctcggtatcgacgagctgtccgaggaggacaagcagttggtcaaccgggcgcggcggatcgagcggttcctgtcgcagaacatgatggcggccgagcagttcaccggccagccgggttcgacggtcccgctcaaggagaccatcgaggcattcgaccggctcaccaagggtgagttcgaccacgtgcccgagcaggccttcttcctgatcggtggcctggacgacctggccaagaaggcagagagccttggcgccaagctgtaa

SEQ ID NO: 43333 - protein, 485 aa, Mycobacterium avium 104
MPATETADKNTKSANSDTSGRVVRVTGPVVDVEFPRGSVPALFNALHAEITFEELAKTLTLEVAQHLGDNLVRTISLQPTDGLVRGVEVIDTGRSISVPVGQEVKGHVFNALGHCLDKPGYGEDFEHWSIHRKPPPFEELEPRTEMLETGLKVVDLLTPYVRGGKIALFGGAGVGKTVLIQEMINRIARNFGGTSVFAGVGERTREGNDLWVELQEANVLKDTALVFGQMDEPPGTRMRVALSALTMAEWFRDEAGQDVLLFIDNIFRFTQAGSEVSTLLGRMPSAVGYQPTLADEMGELQERITSTRGRSITSMQAVYVPADDYTDPAPATTFAHLDATTELSRSVFSKGIFPAVDPLASSSTILDPGVVGEEHYRVAQEVIRILQRYKDLQDIIAILGIDELSEEDKQLVNRARRIERFLSQNMMAAEQFTGQPGSTVPLKETIEAFDRLTKGEFDHVPEQAFFLIGGLDDLAKKAESLGAKL

SEQ ID NO: 43334 - DNA, 1455 bp, Nocardioides sp. JS614
  CDS (1)..(1455): transl_table=11
atgactgcaacgatcgaagagacccaggagaccggctccgctggcgtcggtcggatcgcccgggtgatcggcccggtcgtcgacgtcgagttcccggtggactcgatgccggagatctacaacaagctcgagtgcgagctcacgctcgaaggcgaggccaagatcctctcgctcgaggtcgcccagcacatcggtgacggcatggtccgcgcgatctcgctgcagccgaccgacggcctggtccgcggggcgcaggtgacggacacgggcggcccgatcacggtgcccgtcggcgacgcgaccctcggcaaggtgttcaacaccctcggcgaggtgctcaacctcgaggagggcgagaccttcgaggtcaaggagcgctggggcatccaccgcaaggcgcccgcgttcgaccagctggagtcgaagacccagatgttcgagaccggcatcaaggtcatcgacctgctcacgccgtacgtgcagggcggcaagatcggcctgttcggcggtgccggcgtcggcaagaccgtgctgatccaggagatgatcgcccgcgtcgccaaggaccacggtggcgtgtcggtgttcgccggcgtcggcgagcgcacccgtgagggcaacgacctgatcgtcgagatggaggaggccggcgtcatcggccagaccgccctcgtgttcggtcagatggacgagccgccgggcacccgtctgcgggtcgcgctgtccgcgctgacgatggcggagtacttccgcgacgtgcagggccaggacgtgctgctgttcatcgacaacatcttccggttcacccaggcgggttcggaggtgtcgaccctgctgggccggatgccctccgcggtgggctaccagccgaacctcgccgacgagatgggcacgctccaggagcggatcacctcgacgcgtggtcactcgatcacctcgatgcaggcgatctacgtgccggccgacgactacaccgacccggcaccggcgacgacgttcgcccacctggacgcgacgaccgagctctcccgtgagatcgcctcgctcggcatctacccggccgtggacccgctgacctcgacctcgcggatcctcgacccgcagtacatcgggcaggcgcactacgactgcgcgatccggatcaagcagatcctgcagcgcaacaaggagctccaggacatcatcgcgatcctgggtgtggacgagctctccgaagaggacaagatcatcgtgtcccgggctcgccggatccagcggttcctgtcccagaacacctacgtcgccaagcagttcaccggcatcgagggctcgaccgttcccgtgtcggagacgatcgaggggttcaacaagatcgccgacggcgagtacgaccacgtggccgagcaggccttcttcatgtgcggcggtctggacgacgtcgagcagaagtgggccgagatccagaagagcctctga

SEQ ID NO: 43335 - protein, 484 aa, Nocardioides sp. JS614
MTATIEETQETGSAGVGRIARVIGPVVDVEFPVDSMPEIYNKLECELTLEGEAKILSLEVAQHIGDGMVRAISLQPTDGLVRGAQVTDTGGPITVPVGDATLGKVFNTLGEVLNLEEGETFEVKERWGIHRKAPAFDQLESKTQMFETGIKVIDLLTPYVQGGKIGLFGGAGVGKTVLIQEMIARVAKDHGGVSVFAGVGERTREGNDLIVEMEEAGVIGQTALVFGQMDEPPGTRLRVALSALTMAEYFRDVQGQDVLLFIDNIFRFTQAGSEVSTLLGRMPSAVGYQPNLADEMGTLQERITSTRGHSITSMQAIYVPADDYTDPAPATTFAHLDATTELSREIASLGIYPAVDPLTSTSRILDPQYIGQAHYDCAIRIKQILQRNKELQDIIAILGVDELSEEDKIIVSRARRIQRFLSQNTYVAKQFTGIEGSTVPVSETIEGFNKIADGEYDHVAEQAFFMCGGLDDVEQKWAEIQKSL

SEQ ID NO: 43336 - DNA, 1401 bp, Azoarcus sp. BH72
  CDS (1)..(1401): transl_table=11
atgagtaacggtactatcgttcagtgcatcggcgcggtggtggacatccagttcccgcgcgattcgatgcccaaggtgtatgacgccctgaagcttgaggacgccgccgactccttcgccgaagctggcctgaccttcgaggtccagcagcaactcggcgacggcgtggtgcgtacgattgcgctgggttcctccgacggcctgcgccgcggcatgaaggtgtccaacaccggcaagccgatctcggtgcctgtcggccacggcacgctgggccgcatcatggacgtgctcggccgcccgatcgacgaagcgggtccggttgaaaccgacgagctgcgcgcgatccaccagaaggcgccgaagttcgacgagctgtccccgtccgtggaactgctcgaaaccggcatcaaggttattgacctgatctgcccgttcgcgaagggcggcaaggtgggcctgttcggcggcgccggtgtgggcaagaccgtgaacatgatggagctgatcaacaacatcgccaagcagcactcgggcttgtcggtgttcgctggcgtgggcgagcgtacccgtgagggcaacgacttctaccacgaaatgaaggactccaacgttctcgacaaggtcgcgatggtgttcggtcagatgaacgaacccccgggcaaccgtctgcgcgtcgcgctgaccggtctgaccatggcggagcgtttccgcgacgaaggccgcgacatcctgttcttcgtggataacatctaccgctacaccctggccggtaccgaagtgtccgcgctgctgggtcgtatgccttccgcggtgggttaccagccgacgctggccgaagaaatgggccgtctgcaggaacgcatcacctcgaccaaggtgggctcgatcacctcgatccaggccgtgtatgtgccggcggatgacttgaccgacccgtcgcctgccaccaccttcctgcacctcgactccaccgtcgtgctgtcgcgtgacatcgctgcgctgggtatctaccccgccgtcgatccgctcgactccaccagccgccagctcgatccgctggtcgtcggtgaagagcactactcggtcgctcgcgccgtgcagcagaccctgcagaagtacaaggaactgcgtgacatcatcgcgattctgggtatggacgaactgtcgccggacgacaagctcgccgtggcccgtgcgcgtaagatccagcgcttcctgtcgcagcccttccacgttgccgaagtgttcaccggttcgccgggcaagtacgtttcgctgaaggacaccatcgccggcttcaaggcgatcgtgaacggcgaatacgaccacctgccggaacaggccttctacatggtcggcggcatcgaggaagtgctcgagaaggcgaagaagctgcagtaa

SEQ ID NO: 43337 - protein, 466 aa, Azoarcus sp. BH72
MSNGTIVQCIGAVVDIQFPRDSMPKVYDALKLEDAADSFAEAGLTFEVQQQLGDGVVRTIALGSSDGLRRGMKVSNTGKPISVPVGHGTLGRIMDVLGRPIDEAGPVETDELRAIHQKAPKFDELSPSVELLETGIKVIDLICPFAKGGKVGLFGGAGVGKTVNMMELINNIAKQHSGLSVFAGVGERTREGNDFYHEMKDSNVLDKVAMVFGQMNEPPGNRLRVALTGLTMAERFRDEGRDILFFVDNIYRYTLAGTEVSALLGRMPSAVGYQPTLAEEMGRLQERITSTKVGSITSIQAVYVPADDLTDPSPATTFLHLDSTVVLSRDIAALGIYPAVDPLDSTSRQLDPLVVGEEHYSVARAVQQTLQKYKELRDIIAILGMDELSPDDKLAVARARKIQRFLSQPFHVAEVFTGSPGKYVSLKDTIAGFKAIVNGEYDHLPEQAFYMVGGIEEVLEKAKKLQ

SEQ ID NO: 43338 - DNA, 1398 bp, Neisseria meningitidis FAM18
  CDS (1)..(1398): transl_table=11
atgagccaaggcaaaatcgtacaaattatcggtgcggttgttgacgtggaatttccacgcgacatgattccgcgcgtttacgacgctttgaaattagacgaaaacggtctgactttggaagtccaacagcttttgggcgacggcgtagtccgtaccattgcgatgggcagctcggacggtttgaaacgcggcatgactgtgagcaataccggtgcgcccattactgtgccggtaggtaaaggtacgttgggacgcattgtcgatgtattgggaacgcctgttgacgaggcaggtccaatcgataccgacaagagccgtgccatccaccaagccgctcctaagtttgacgaactgtcttccacaaccgaattgctcgaaacgggcattaaagtgattgacttgctgtgtccgtttgccaaaggcggtaaagtaggtctgttcggcggtgccggtgtgggtaaaaccgtgaacatgatggaattgatcaacaacatcgccaaagcgcacagcggcttgtccgtgttcgcaggcgtgggtgagcgtacccgcgaaggtaacgacttctaccacgagatgaaagattccaacgtattggataaagtggcaatggtttacggtcagatgaacgaacctccgggcaaccgtttgcgcgtcgcattgaccggtttgaccatggcggaatacttccgtgacgaaaaagacgaaaacggcaaaggccgcgacgtattgttcttcgtggacaacatctaccgttacactctagctggtaccgaagtatccgcattgttgggccgtatgccgtctgcagtgggctaccaaccgacattggcagaagaaatgggtcgtttgcaggagcgtattacctctacccaaaccggttctattacttctatccaagccgtatatgtacctgcggacgacttgaccgacccgtctccggcaacaacgttcgcccacttggacgcaaccgtcgtattgagccgcgatattgcctctttgggtatttacccggcagtcgatccgcttgattctacttcgcgccaactggatccgatggtattgggtcaagagcactacgacgtagcgcgcggcgtacagtccaccctgcagaaatacaaagaattgcgcgacatcatcgccatcttgggtatggacgaattgtctgatgaagacaaactgaccgtaatgcgtgcgcgtaaaatccaacgcttcctgtcccaaccgttccacgttgccgaagtgtttacaggttctccgggcaaatatgtcgccctgcgcgataccattgccggcttcaaagccatcttgaacggcgaatacgaccatctgcccgaacaggcattctacatggtcggcagcatcgaagaagcggttgagaaagcgaaaaccttaaactga

SEQ ID NO: 43339 - protein, 465 aa, Neisseria meningitidis FAM18
MSQGKIVQIIGAVVDVEFPRDMIPRVYDALKLDENGLTLEVQQLLGDGVVRTIAMGSSDGLKRGMTVSNTGAPITVPVGKGTLGRIVDVLGTPVDEAGPIDTDKSRAIHQAAPKFDELSSTTELLETGIKVIDLLCPFAKGGKVGLFGGAGVGKTVNMMELINNIAKAHSGLSVFAGVGERTREGNDFYHEMKDSNVLDKVAMVYGQMNEPPGNRLRVALTGLTMAEYFRDEKDENGKGRDVLFFVDNIYRYTLAGTEVSALLGRMPSAVGYQPTLAEEMGRLQERITSTQTGSITSIQAVYVPADDLTDPSPATTFAHLDATVVLSRDIASLGIYPAVDPLDSTSRQLDPMVLGQEHYDVARGVQSTLQKYKELRDIIAILGMDELSDEDKLTVMRARKIQRFLSQPFHVAEVFTGSPGKYVALRDTIAGFKAILNGEYDHLPEQAFYMVGSIEEAVEKAKTLN

SEQ ID NO: 43340 - DNA, 1425 bp, Magnetospirillum magnetotacticum MS-1
  CDS (1)..(1425): transl_table=11
atggcaaacaagaacgtcggcacgattacccaggtcctgggcgccgtcgtggacgtgcgcttcgacggccagctgccggccatcctcagcgcgcttcacctggaacatcagggtaagaagctggttctcgaagtcgctcagcatctgggcgagtccaccgtgcgtaccatcgccatggactccacggacggcctgacgcggggcaccgaagtggtggacaccggcgccgccatccagatgcccgtcggccccgagaccctgggccgtatcatcaacgtgatcggcgagcccatcgacgagcgcggccccatcggcaacaagaccaccctgccgatccatgcggacgccccggacttcgtggaccagtccaccgagaccgagatcctggtcaccggcatcaaggtcatcgacctgctggctccctactgcaagggcggcaagatcggcctgttcggcggcgccggcgtgggcaagaccgtgctgatcatggagctgatcaacaacatcgccaaggcgcacggtggttactccgtgttcgccggtgtgggcgagcgtacccgcgaaggcaacgacctctatcacgaaatgatcgagtcgggcgttatcaagctggacggcccgggctccaaggtggccctggtctatggccagatgaacgagcccccgggcgcccgtgcccgcgtcgccctgtcgggtctgaccgtcgccgagtatttccgcgacgtggaaggccaggacgtgctgttcttcgtggacaacatcttccgcttcacccaggccggttccgaagtgtccgctctgctgggccgcatcccgtcggcggtgggctatcagcccactctcgccaccgacatgggcgctctgcaggaacgcatcacctcgaccaagaagggctcgatcacctcggtgcaggccatttacgtgcccgccgacgatctcaccgacccggctccggccacgtccttcgcccacttggacgccaccaccgtgctgaatcgtcagatcgccgagctgggcatctacccggccgtggatccgctcgactccacgtcgcgcgttctggacccccgcgtggtcggcaacgaccactaccagaccgcccgcgacgtgcagcgcatcctgcagacctacaagtcgctgcaggacatcatcgccattctgggcatggatgagctgtcggaagaggacaagctggtggtgacccgcgctcgtaagatccagcgcttcctgtcccagcccttccatgtggccgaaatcttcaccggctcgccgggcaagctggtggccatcgaagacaccatcaagggcttcaaggccatcgtggctggcgaatacgatcatctgcccgaggctgccttctacatggtcggcggcatcgacgaagtgatcgagaaggccaagaagatggccgccgaagcggcctaa

SEQ ID NO: 43341 - protein, 474 aa, Magnetospirillum magnetotacticum MS-1
MANKNVGTITQVLGAVVDVRFDGQLPAILSALHLEHQGKKLVLEVAQHLGESTVRTIAMDSTDGLTRGTEVVDTGAAIQMPVGPETLGRIINVIGEPIDERGPIGNKTTLPIHADAPDFVDQSTETEILVTGIKVIDLLAPYCKGGKIGLFGGAGVGKTVLIMELINNIAKAHGGYSVFAGVGERTREGNDLYHEMIESGVIKLDGPGSKVALVYGQMNEPPGARARVALSGLTVAEYFRDVEGQDVLFFVDNIFRFTQAGSEVSALLGRIPSAVGYQPTLATDMGALQERITSTKKGSITSVQAIYVPADDLTDPAPATSFAHLDATTVLNRQIAELGIYPAVDPLDSTSRVLDPRVVGNDHYQTARDVQRILQTYKSLQDIIAILGMDELSEEDKLVVTRARKIQRFLSQPFHVAEIFTGSPGKLVAIEDTIKGFKAIVAGEYDHLPEAAFYMVGGIDEVIEKAKKMAAEAA

SEQ ID NO: 43342 - DNA, 1419 bp, Haemophilus somnus 2336
  CDS (1)..(1419): transl_table=11
atgaaattgttgcgggtgcagcagcaatttaatggagataaggtaatgtcagcaggaaaaattatacagattatcggtgcggtaattgatgttgaattcccacaaaatgcagtaccaaaagtttatgatgcattaaaagttgaatcaggattaactcttgaagttcaacaacagttgggtggcggtgtagtacgttgtatcgcattgggttcatctgatggtctaaaacgtggtttaaaagtagaaaatacaggaaatccaatttctgttcctgtgggaacaaaaacactaggacgtattatgaacgttctgggagagcctattgatgaaaaaggagaaattggtgcggaagaatattgggctatacatcgtgctgcaccaagctatgaagaacaatcaaatagtacagaacttttagaaacaggtatcaaagttattgacctaatttgtccttttgctaaaggtggtaaagttggtttatttggtggtgccggtgtaggtaaaactgtaaatatgatggaattaatccgtaatattgcaatcgaacattcaggttattcagtatttgcaggtgtaggtgagcgtactcgagagggtaatgatttctaccatgaaatgacagaatctaatgtattagataaagtatcgctggtttatggtcaaatgaatgaaccgccgggtaaccgtttacgtgttgctttaacaggattgactatggcggaaaaattccgtgatgaaggtcgtgacgtattatttttcgtagataatatctatcgttataccttggcaggtacagaagtatccgctcttttaggtcgtatgccttctgcggtaggttatcaaccgacattagcagaagaaatgggtgttttacaagagcgtattacttcaacaaaaacgggttctattacttccgttcaggctgtttatgttccggcggatgacttgacagacccttctccggcaacaacctttgctcatttggattcaacagtggtgttaagtcgtaatatcgcttctttgggtatttatccagctgttgatcctttggattctacttcacgtcaattagatccattagtagtaggacaggaacattatgatgtagctcgaggtgtgcagggtattttgcaacgctataaagaattaaaggatattattgctatcctcggtatggatgagctttccgaagatgataagctagtggtagcacgagcacgtaaaatagaacgtttcttgtcacaaccgttctttgttgcagaagtatttactggttctcctggtaaatatgtatcactaaaagatactattcgtggtttcaaaggtattttagatggtgaatacgatcatataccggaacaagcgttctatatggttggctcaatcgaagaagtgctagaaaaagccaaaaaaatgtag

SEQ ID NO: 43343 - protein, 472 aa, Haemophilus somnus 2336
MKLLRVQQQFNGDKVMSAGKIIQIIGAVIDVEFPQNAVPKVYDALKVESGLTLEVQQQLGGGVVRCIALGSSDGLKRGLKVENTGNPISVPVGTKTLGRIMNVLGEPIDEKGEIGAEEYWAIHRAAPSYEEQSNSTELLETGIKVIDLICPFAKGGKVGLFGGAGVGKTVNMMELIRNIAIEHSGYSVFAGVGERTREGNDFYHEMTESNVLDKVSLVYGQMNEPPGNRLRVALTGLTMAEKFRDEGRDVLFFVDNIYRYTLAGTEVSALLGRMPSAVGYQPTLAEEMGVLQERITSTKTGSITSVQAVYVPADDLTDPSPATTFAHLDSTVVLSRNIASLGIYPAVDPLDSTSRQLDPLVVGQEHYDVARGVQGILQRYKELKDIIAILGMDELSEDDKLVVARARKIERFLSQPFFVAEVFTGSPGKYVSLKDTIRGFKGILDGEYDHIPEQAFYMVGSIEEVLEKAKKM

SEQ ID NO: 43344 - DNA, 1374 bp, Actinobacillus pleuropneumoniae serovar 1 str. 4074
  CDS (1)..(1374): transl_table=11
atggcaacaggaaaaattgtacagattatcggtgcggtaatcgacgttgaattcccgcaagatgcagtaccaaaagtatatgatgccttaaaagttgaatcgggtttaacccttgaggttcaacaacaattaggtggtggacttgtgcgttgtatcgcattaggtacatcagacggtttaaaacgcggcttaaaagttgaaaatacgggtaacccgattcaagtaccggtcggtaccaagactctaggtcgtattatgaacgtattaggtgagccgatcgatgaaaaaggtcctatcggcgaagaagctcgttgggatattcaccgtgcggcaccaagctacgaagaacaatcaaacagtacggaattacttgaaaccggtattaaagttatcgacttaatttgtccgttcgcaaaaggtggtaaagtcggtttattcggtggtgcgggtgtaggtaaaaccgttaatatgatggaattaatccgtaatatcgcaatcgaacactccggttactcagtattcgcaggtgttggtgagcgtactcgtgaaggtaatgacttctatcacgaaatgacggattctaacgtattagataaagtatcacttgtttacggtcagatgaacgagccgccgggtaaccgtctgcgtgttgcattaaccggtttaacaatggcggaaaaattccgtgatgaaggtcgtgacgtgttattcttcgtagataacatctaccgttatacacttgcaggtacggaagtatcggcattattaggtcgtatgccgtcagcggtaggttaccaacctacacttgcggaagaaatgggtgtattacaagaacgtattacatcaaccaaaacaggttcgattacttctgttcaagcggtttacgttccagcggatgacttaacggacccatctccggcaacaactttcgcacacttagactcaacggttgtattaagtcgtaatatcgcatctcttggtatttaccctgcggttgatccactagattcaacttctcgtcaattagatccattagtcgtcggtgaagaacactataatgtagctcgtggtgtacaaggcacattacaacgctataaagagttaaaagacatcatcgctattttaggtatggatgagttatctgaagacgataaattagtggttgctcgtgcgcgtaagatcgaacgtttcttatcacaaccattcttcgttgcggaagtatttaccggttctccgggtaaatatgtatcgttaaaagatacaatccgtggcttcaaaggtatcttagaaggcgaattcgaccatattccggaacaagcgttctatatggcgggttctattgacgaagtagtggaaagagcgagcaagatgtaa

SEQ ID NO: 43345 - protein, 457 aa, Actinobacillus pleuropneumoniae serovar 1 str. 4074
MATGKIVQIIGAVIDVEFPQDAVPKVYDALKVESGLTLEVQQQLGGGLVRCIALGTSDGLKRGLKVENTGNPIQVPVGTKTLGRIMNVLGEPIDEKGPIGEEARWDIHRAAPSYEEQSNSTELLETGIKVIDLICPFAKGGKVGLFGGAGVGKTVNMMELIRNIAIEHSGYSVFAGVGERTREGNDFYHEMTDSNVLDKVSLVYGQMNEPPGNRLRVALTGLTMAEKFRDEGRDVLFFVDNIYRYTLAGTEVSALLGRMPSAVGYQPTLAEEMGVLQERITSTKTGSITSVQAVYVPADDLTDPSPATTFAHLDSTVVLSRNIASLGIYPAVDPLDSTSRQLDPLVVGEEHYNVARGVQGTLQRYKELKDIIAILGMDELSEDDKLVVARARKIERFLSQPFFVAEVFTGSPGKYVSLKDTIRGFKGILEGEFDHIPEQAFYMAGSIDEVVERASKM

SEQ ID NO: 43346 - DNA, 1389 bp, Fusobacterium nucleatum subsp. vincentii ATCC 49256
  CDS (1)..(1389): transl_table=11
gtgaacaaaggaactataacacaaattataagtgctgttgtagacgttgcttttaaagatgagttgcctgcaatatataatgctttaaaagtaaaattagaagataaagaacttgttctagaagttgaacaacaccttggtaacaacgttgtaagaactgttgctatggattcaactgatggattaaaaagaggaatggaagttatagacacaggaaaaccaattacaataccagttggaaaagctgttctaggtagaatattaaatgttttaggagagcctgttgataatcaaggaccaataaatgctgaaacatttttacctattcatagagaagctccagaatttgatgacttagaaactgaaactgaaatatttgaaacaggaataaaagttatagacttattagcaccatatattaaaggtggaaaaataggattatttggtggagcaggagtaggtaaaactgttctaataatggaacttatcaataacattgcaaaaggacatggaggaatttcagtttttgcaggggttggagaaagaacaagagaaggtagagatttatatggtgaaatgactgaatcaggagttatcacaaaaacagctcttgtttatggacaaatgaatgagccacctggagcaagacttagagttgcactaacaggacttactgttgcagaaaattttagagataaagatggacaagatgttcttctatttatagataatatatttagatttacacaagcaggttcagaagtttcagctttacttggaagaattccatctgctgttggatatcaaccaaacttagcaactgaaatgggtgctttacaagaaagaataacatctacaaaatctggttcaattacatcagtacaagctgtatatgtaccagcagatgacttgactgacccagcaccagctacaaccttctctcacttggatgcaacaacagttctttcaagaaatattgcatcactagggatatatccagctgttgatccattagattcaacatctaaggctctatcagaagatgtagttggaaaagaacattatgaagtagctagaaaagtgcaagaagttttacaaagatataaggaacttcaagatataatagctatcttaggtatggatgagctatctgatgaagataaacttactgtatcaagagctagaaaaattgaaagatttttctcacaaccattctctgttgcagaacaatttactggaatggaaggaaaatatgttcctgtaaaagaaacaataagaggatttagagaaattttagaaggaaaacatgatgatattcctgaacaagcattcctatatgttggtacaatagaagaagccgttgctaaatcaaaagatttagtaaaataa

SEQ ID NO: 43347 - protein, 462 aa, Fusobacterium nucleatum subsp. vincentii ATCC 49256
MNKGTITQIISAVVDVAFKDELPAIYNALKVKLEDKELVLEVEQHLGNNVVRTVAMDSTDGLKRGMEVIDTGKPITIPVGKAVLGRILNVLGEPVDNQGPINAETFLPIHREAPEFDDLETETEIFETGIKVIDLLAPYIKGGKIGLFGGAGVGKTVLIMELINNIAKGHGGISVFAGVGERTREGRDLYGEMTESGVITKTALVYGQMNEPPGARLRVALTGLTVAENFRDKDGQDVLLFIDNIFRFTQAGSEVSALLGRIPSAVGYQPNLATEMGALQERITSTKSGSITSVQAVYVPADDLTDPAPATTFSHLDATTVLSRNIASLGIYPAVDPLDSTSKALSEDVVGKEHYEVARKVQEVLQRYKELQDIIAILGMDELSDEDKLTVSRARKIERFFSQPFSVAEQFTGMEGKYVPVKETIRGFREILEGKHDDIPEQAFLYVGTIEEAVAKSKDLVK

SEQ ID NO: 43348 - DNA, 1374 bp, Haemophilus influenzae R2846
  CDS (1)..(1374): transl_table=11
atgtcagcaggaaaaattgtacaaatcatcggtgcggtgattgacgttgaatttccacaagatgcagtgccaaaagtttacgatgcattaaaagttgaatcaggtttaacacttgaggtgcaacaacaattaggtggcggagtagttcgttgtattgcattgggtacatctgatggtttaaaacgtggcttaaaagtagaaaacacaaataacccaattcaagtaccagtaggcacaaaaacacttggtcgtattatgaatgtgttgggcgaaccaattgacgaacaaggagcaattggtgaagaagagcgttgggctatccaccgttcggcaccgagctatgaagaacaatcaaacagtacggaattattagaaactggtatcaaagtgatcgacttaatttgtccattcgcaaaaggtggtaaagttggtttattcggcggtgcaggtgtaggtaaaaccgtaaatatgatggagttgattcgtaatattgcgattgagcattcaggttactctgtatttgcgggtgtaggcgaacgtactcgtgaaggtaatgacttctatcatgaaatgaaagattctaacgtattagataaagtatctttggtttatggtcaaatgaacgagccaccaggtaaccgtttacgtgttgcattgactggtttaactatggctgaaaaattccgtgatgaaggtcgagatgtattattctttgtggataatatctatcgttatacccttgctggtacggaagtatctgcgttattaggtcgtatgccatccgcagtaggttaccaaccgacattggcagaagaaatgggtgtgttacaagaacgtatcacttcaaccaaaacaggttctatcacttctgtgcaagcggtgtacgtaccagcggatgacttaactgacccatctccagcaacaactttcgcacatttagactcaactgttgtattaagtcgtcaaattgcgtcattaggtatttatcctgcagtggatccattagattcaacttcacgtcagttagacccgcttgttgttggtcaagaacattatgatgttgctcgtggtgtacaaggtattttacaacgttataaagaattgaaagatattatcgcaattcttggtatggatgaattatctgaagaagataaattagtggtagcacgtgcacgtaaaattgaacgtttcttatcacaaccattctttgttgcagaagtcttcacaggttcaccaggtaaatacgtgacattaaaagacaccatccgtggcttcaaaggtatcttagagggcgaatatgaccatattcctgaacaagcgttctatatggttggttcaatcgatgaagtgttagaaaaagccaaaaatatgtaa

SEQ ID NO: 43349 - protein, 457 aa, Haemophilus influenzae R2846
MSAGKIVQIIGAVIDVEFPQDAVPKVYDALKVESGLTLEVQQQLGGGVVRCIALGTSDGLKRGLKVENTNNPIQVPVGTKTLGRIMNVLGEPIDEQGAIGEEERWAIHRSAPSYEEQSNSTELLETGIKVIDLICPFAKGGKVGLFGGAGVGKTVNMMELIRNIAIEHSGYSVFAGVGERTREGNDFYHEMKDSNVLDKVSLVYGQMNEPPGNRLRVALTGLTMAEKFRDEGRDVLFFVDNIYRYTLAGTEVSALLGRMPSAVGYQPTLAEEMGVLQERITSTKTGSITSVQAVYVPADDLTDPSPATTFAHLDSTVVLSRQIASLGIYPAVDPLDSTSRQLDPLVVGQEHYDVARGVQGILQRYKELKDIIAILGMDELSEEDKLVVARARKIERFLSQPFFVAEVFTGSPGKYVTLKDTIRGFKGILEGEYDHIPEQAFYMVGSIDEVLEKAKNM

SEQ ID NO: 43350 - DNA, 1395 bp, Burkholderia vietnamiensis G4
  CDS (1)..(1395): transl_table=11
atgagtactgctgctttggtagaaggcaagatcgtacagtgcatcggcgccgttatcgacgtggaattcccgcgcgacagcatgccgaagatctacgacgcgcttattctcgatggctcggaactgacgctcgaagtccagcagcagctgggcgacggcgtggtccgcaccatctgtctgggtgcatccgacggcctgcgccgcggcctgaccgtgaagaacacggccaagccgatttcggtgccggtcggcaagccgaccctcggtcgtatcatggacgtcctcggccgtccgatcgacgaggccggcccgatcgaaagcgaacatacgcgttcgatccaccagaaggctccggcgttcgacgagctgtcgccgtcgaccgaactgctcgaaacgggtatcaaggtcatcgacctgatctgcccgttcgcgaagggcggcaaggtcggtctgttcggtggtgcaggcgtgggcaagaccgtcaacatgatggagctcatcaacaacatcgcgaaggagcacggcggttactccgtgttcgcgggcgtgggcgagcgtacccgtgaagggaacgacttctaccacgaaatgaaggactcgaacgttctcgacaaggtcgcgctggtgtacggccagatgaacgagccgccgggcaaccgtctgcgcgtcgcgctgaccggcctgacgatggctgagcacttccgtgacgaaggcctcgacgtgctgttcttcgtcgacaacatctaccgtttcacgctggccggtaccgaagtgtcggcactgctcggccgtatgccgtcggcagtgggctatcagccgacgctggctgaagaaatgggcaagctgcaagagcgcatcacgtcgaccaagaagggctcgattacgtcggttcaggccgtgtacgtccctgcggacgacttgaccgacccgtcgccggcgaccaccttcggtcacttggacgcaaccgtcgttctgtcgcgtgacatcgcttcgctgggtatctacccggcggtcgacccgctcgactcgacgtcgcgccagatcgacccgaacgtgatcggcgaagagcactacacgatcacgcgtcgcgttcagcaaacgctgcagcgctacaaggaactgcgcgacatcatcgcgattctgggcatggacgaactgtcgccggaagacaagctgtcggtcgcacgtgcgcgtaagatccagcgtttcctgtcgcagccgttccacgtcgcggaagtgttcacgggctcgccgggcaagtacgtgccgctgaaggaaacgatccgcggcttcaagatgatcgtcgacggcgagtgcgaccacctgccggaacaggcgttctacatggtcggcacgatcgacgaagccttcgaaaaggccaagaagatccagtaa

SEQ ID NO: 43351 - protein, 464 aa, Burkholderia vietnamiensis G4
MSTAALVEGKIVQCIGAVIDVEFPRDSMPKIYDALILDGSELTLEVQQQLGDGVVRTICLGASDGLRRGLTVKNTAKPISVPVGKPTLGRIMDVLGRPIDEAGPIESEHTRSIHQKAPAFDELSPSTELLETGIKVIDLICPFAKGGKVGLFGGAGVGKTVNMMELINNIAKEHGGYSVFAGVGERTREGNDFYHEMKDSNVLDKVALVYGQMNEPPGNRLRVALTGLTMAEHFRDEGLDVLFFVDNIYRFTLAGTEVSALLGRMPSAVGYQPTLAEEMGKLQERITSTKKGSITSVQAVYVPADDLTDPSPATTFGHLDATVVLSRDIASLGIYPAVDPLDSTSRQIDPNVIGEEHYTITRRVQQTLQRYKELRDIIAILGMDELSPEDKLSVARARKIQRFLSQPFHVAEVFTGSPGKYVPLKETIRGFKMIVDGECDHLPEQAFYMVGTIDEAFEKAKKIQ

SEQ ID NO: 43352 - DNA, 1452 bp, Crocosphaera watsonii WH 8501
  CDS (1)..(1452): transl_table=11
atggtagctacaacacaagaaacaagcgttggtaaaatcactcaaatcatcggtcctgtggtcgatgctgaatttcccagtggtaatttacctcgtatctataacgccctcaaagtagaagggcaaaacttcgcaggagacaccgtttccgttacctgtgaagtgcaacagttactcggtgataaccaagtccgcgccgttgctatgagtgggacagatggtttagtcagaggtatggacattgttgattcaggctcacctatcagcgttcccgtgggaaaagccaccttggggcgtatttttaacgttttaggggaacctgtagatgaaatgggagacgtgggcaacgaagaaacctctcctatccaccgtcccgcccccaaattaacggacttagaaactaaacctaaagtctttgaaactggtatcaaggttatcgatctcctcaccccttaccgtcaaggcggaaaaattggtttgtttggcggagcaggtgtgggaaaaaccgttattatgatggagttgatcaacaacatcgccatccaacacgggggtgtatccgtgttcgctggagtaggggaacggactcgcgaaggaaatgacctctacaacgaaatgatcgaatctaaggtaattaaccccgagaacctctcagaatcgaaaattgccctagtttacggacaaatgaacgaaccccccggagcgagaatgcgggtcggtttatctggtttgaccatggcggaatacttccgtgatgtcaacaagcaagacgtattgttatttgttgataatattttccgtttcgttcaagctggttctgaagtatctgcactcttaggacggatgccttctgcggtgggatatcaacccactctaggcacggacgtgggggatctacaagaacgtattacctctaccaaagaaggttctattacctccattcaggcggtttatgtacctgcggatgatttaaccgatcctgctcctgctactaccttcgctcacttagacggaaccactgtattatcccgtggtttagcttctaaaggtatttatcctgcggttgatcccctagactccactagcactatgttacagcctagtgttgttggggacgaacactatgataccgctcgtgctgtacaatctaccctacaacggtacaaagagttacaggatattatcgccattctcggattggacgaattgtcagaagacgatcgtcgtaccgtagatcgggcccgtaaaatcgagcgtttcttatctcaacctttctttgtagcagaagtatttaccggatctcctggtaagtatgtttctttagcagacaccatcaaaggcttccagatgattctcgatggtcagttagatgatcttcctgaacaagctttttacttagtgggagacattgaggaagctaaagctaaagctgaaaaactaaaacaagcatag

SEQ ID NO: 43353 - protein, 483 aa, Crocosphaera watsonii WH 8501
MVATTQETSVGKITQIIGPVVDAEFPSGNLPRIYNALKVEGQNFAGDTVSVTCEVQQLLGDNQVRAVAMSGTDGLVRGMDIVDSGSPISVPVGKATLGRIFNVLGEPVDEMGDVGNEETSPIHRPAPKLTDLETKPKVFETGIKVIDLLTPYRQGGKIGLFGGAGVGKTVIMMELINNIAIQHGGVSVFAGVGERTREGNDLYNEMIESKVINPENLSESKIALVYGQMNEPPGARMRVGLSGLTMAEYFRDVNKQDVLLFVDNIFRFVQAGSEVSALLGRMPSAVGYQPTLGTDVGDLQERITSTKEGSITSIQAVYVPADDLTDPAPATTFAHLDGTTVLSRGLASKGIYPAVDPLDSTSTMLQPSVVGDEHYDTARAVQSTLQRYKELQDIIAILGLDELSEDDRRTVDRARKIERFLSQPFFVAEVFTGSPGKYVSLADTIKGFQMILDGQLDDLPEQAFYLVGDIEEAKAKAEKLKQA

SEQ ID NO: 43354 - DNA, 1419 bp, Exiguobacterium sibiricum 255-15
  CDS (1)..(1419): transl_table=11
atgaacgaactcggtttaaaaggccgcgtcgtcgcggtcatgggacctgtcatcgacgttaagttcgacggacacttgccgaacatctacaacgcgcttcgtattcaatatacgccgcaaacagtagaagaagtggctatcgacttgacgcttgaggtcgccttgcaccttggtgacgacgtcgtccgtaccattgcgatggattctacggatggtgtacgccgcggagtggaagtactggacactggtgctccaatctcggtacctgtcggagaagcaacgcttggtcgcgtcttcaacgtactcggtaacccaattgatgaaaaagaactcgatgcaagcgtggaacgtcttccgatccacaaaaaagcaccgacgtttgataacctttcaacaaaagttgaaatcctcgaaacaggaattaaagtcgttgacttactcgctccttacatcaagggtggtaagattggtctcttcggtggtgctggtgtaggtaagaccgtcctcatccaggaattgatcaacaacatcgcccaagagcacagcggtatctcggtattcgcaggtgttggtgagcggacgcgtgaaggtaatgacttgtaccacgagatgacggattcaggcgttatcaaacaaacagcgatggtcttcggtcagatgaacgagccgccgggcgcacgtcttcgtgttgccttgactggtttgacaatggcagaatacttccgtgatgagcagggacaagacgttcttctcttcgttgataacatcttccgttacacacaagcaggttcagaggtatcggcccttctcggtcgtatgccgtctgccgttggttaccagccgacacttgcgacagagatgggtatgcttcaagagcgtatcacgtcaacaaacaaaggttcggttacatcgatccaagcggtttatgtaccggccgatgactatactgacccggctcctgcaacgacgtttgcccacttggatgcaacgacgaaccttgagcgccgtctctctgagatgggtatctatcctgccgtggatccacttgcttctacatcacgtgccctttcaccggaaatcgtcggcgaagagcattacggcgtagcacgtcaagttcaggaaacacttcagcgttacaaagaacttcaagatatcatcgcgatcctcggtatggacgagttgtctgaagaagacaaattgactgtacaccgtgcgcgtcgtatccagttcttcttgtcgcagaacttccacgtagctgagcagttcacaggacaaaaaggatcgtacgtcccggttaaggacacgatccgcggcttcaaagaaatcctcggtgggaaacacgatgatctgacggaagaagcattccgtctcgtcggtccgatcgaagatgcgattgaaaaagcgaagacgcttgtctaa

SEQ ID NO: 43355 - protein, 472 aa, Exiguobacterium sibiricum 255-15
MNELGLKGRVVAVMGPVIDVKFDGHLPNIYNALRIQYTPQTVEEVAIDLTLEVALHLGDDVVRTIAMDSTDGVRRGVEVLDTGAPISVPVGEATLGRVFNVLGNPIDEKELDASVERLPIHKKAPTFDNLSTKVEILETGIKVVDLLAPYIKGGKIGLFGGAGVGKTVLIQELINNIAQEHSGISVFAGVGERTREGNDLYHEMTDSGVIKQTAMVFGQMNEPPGARLRVALTGLTMAEYFRDEQGQDVLLFVDNIFRYTQAGSEVSALLGRMPSAVGYQPTLATEMGMLQERITSTNKGSVTSIQAVYVPADDYTDPAPATTFAHLDATTNLERRLSEMGIYPAVDPLASTSRALSPEIVGEEHYGVARQVQETLQRYKELQDIIAILGMDELSEEDKLTVHRARRIQFFLSQNFHVAEQFTGQKGSYVPVKDTIRGFKEILGGKHDDLTEEAFRLVGPIEDAIEKAKTLV

SEQ ID NO: 43356 - DNA, 1461 bp, Kineococcus radiotolerans SRS30216
  CDS (1)..(1461): transl_table=11
atgaccgccaccgtcaacgaagcgccggccagcaccagcaagggtgcgacaggccgcatcgcccgagtcatcggccccgtcgtcgacgtcgagttctcggccgacacgatgccggaccagaacaacgccctcaccacccaggtgaccatgggtggcaccacccagaccgtgaccctcgaggtggcctcccacctcggcgacaacatggtccgtgccatctccctgaagccgaccgacggcatggtccgcggcgcggccgtcgtcgacaccggcgccccgatctcggtgcccgtcggcaacgcgaccctgggtcacgtcttcaacgccatcggcgagtgcctcaacctcgaggagggtgagcagctcgaggtccacgagcgctggcccatccaccgcaaggccccgaacttcgaccagctcgagtcgcggaccacgatgttcgagaccggcatcaaggtcatcgacctgctgaccccgtacgtccagggcgggaagatcggcctcttcggcggtgcgggcgtcggcaagaccgtcctcatccaggagatgatccagcgcgtcgcccagaaccacggcggtgtgtcggtgttcgccggggtcggcgagcgcacccgtgagggcaacgacctcatcggcgagatggccgaggccggcgtcttcgacaagacggccctcgtcttcggccagatggacgagccgccgggcacccgcctgcgcgtggccctgtccgcgctgaccatggcggagtacttccgcgacgtgcagaaccaggacgtgctgctcttcatcgacaacatcttccggttcacccaggccggttcggaggtgtcgaccctgctgggccgcatgccctccgccgtggggtaccagccgacgctggccgacgagatgggcgtcctccaggagcgcatcacctcgacccgcggtcactcgatcacctcgctgcaggcgatctacgtccccgccgacgactacaccgacccggcgccggccacgacgttcgcgcacctcgacgcgacgacggagctctcccgcgagatcgcctcgcgcggtctgtacccggctgtggacccgctgacctcgacgtcgcgcatcctggacccgctgtacatcgcgcaggaccactacgacaccgcggtccgcgtcaagcagatcctgcagcgcaacaaggagctgcaggacatcatcgccatcctcggtgtcgacgagctgtcggaggaggacaagctgacggtgagccgtgctcgccgcatccagcagttcctctcgcagaacacctacatggcggagaagttcaccggcgtcgagggctcgacggtcccgctcaaggagaccatcgagggcttctccaagatcgccgacggcgagctcgaccacgtcgccgagcaggccttcttcaacgtcggtggcctcgaggacgtcgagcgcaactgggctcgcatccagaaggaaaccgcctga

SEQ ID NO: 43357 - protein, 486 aa, Kineococcus radiotolerans SRS30216
MTATVNEAPASTSKGATGRIARVIGPVVDVEFSADTMPDQNNALTTQVTMGGTTQTVTLEVASHLGDNMVRAISLKPTDGMVRGAAVVDTGAPISVPVGNATLGHVFNAIGECLNLEEGEQLEVHERWPIHRKAPNFDQLESRTTMFETGIKVIDLLTPYVQGGKIGLFGGAGVGKTVLIQEMIQRVAQNHGGVSVFAGVGERTREGNDLIGEMAEAGVFDKTALVFGQMDEPPGTRLRVALSALTMAEYFRDVQNQDVLLFIDNIFRFTQAGSEVSTLLGRMPSAVGYQPTLADEMGVLQERITSTRGHSITSLQAIYVPADDYTDPAPATTFAHLDATTELSREIASRGLYPAVDPLTSTSRILDPLYIAQDHYDTAVRVKQILQRNKELQDIIAILGVDELSEEDKLTVSRARRIQQFLSQNTYMAEKFTGVEGSTVPLKETIEGFSKIADGELDHVAEQAFFNVGGLEDVERNWARIQKETA

SEQ ID NO: 43358 - DNA, 1506 bp, Croceibacter atlanticus HTCC2559
  CDS (1)..(1506): transl_table=11
atgtctaaagtcacaggaaaagttgctcaaattattggccctgttgttgacgttgcgtttgacacagaaggcgaacttccaaaaatttacgattctcttgaaataaaaagagaagacggatctatcttagttctagaagtacaatcacacattggtgaaaacaccgtgcgtactatctctatggactctacagatggattgtcaagaggtactgctgttgaagcgacaaacgctccaatacaaatgcctattggtgatgtttacgggagactatttaatgttgtaggagatcctattgatggtatggaagacatgcctaagactggagacaacggtctaccaattcaccgtaatgcacctaagtttgaagatctatctgtatctacagaagttctttttactggtattaaagtaattgaccttattgaaccttatgctaaaggtggtaagattggtttatttggtggtgcaggtgtaggtaaaactgtacttattcaagaattaattaacaacattgcaaaaggacacggtggtttgtctgtatttgcaggtgttggagagcgtactcgtgagggtaacgatttacttcgtgagatgttagagtctggtattattaaatacggagatgactttatgcactctatggaagaaggtggatgggatctttctaaagtagataaaactgctatgaaagactctaaagcaacgttcgtattcggacaaatgaatgagccaccaggagcacgtgctcgtgtagcactttcaggattaactattgcagaatacttccgtgatggagcaggagatggtcaaggaaaagatgtattatttttcgtagataatatattccgttttacacaagcaggatcagaggtgtcagcacttcttggtcgtatgccttctgcggtaggttaccaacctaccttagcaaccgaaatgggagctatgcaagagcgtattacatcaactaaaaaaggatctattacatctgtacaagcggtatacgtacctgcagatgaccttaccgatccagcaccagcaacaacgtttgctcacttagatgcaactactgtattgtctcgtaagattgcagagcttggtatttatccagcggtagatccgttagattctacatctcgtatccttactgcagatattttaggtaatgagcattatgactgtgcacaacgtgtaaaagagcttttgcagagatataaagaactacaagatattattgctattcttggtatggaagaattatctgaagaagataaaatggctgtagggcgcgctcgtcgtgtacagcgtttcctttctcagccgttccacgtagcagagcagtttacaggtattcctggtgtcttagtagatattaaggaaactattaaaggcttcaacatgattatggacggtgagttagatcacctgccagaagcagctttcaaccttaaaggaactatagaggaagcaattgaagctggtgagaaaatgttagcagagtcttaa

SEQ ID NO: 43359 - protein, 501 aa, Croceibacter atlanticus HTCC2559
MSKVTGKVAQIIGPVVDVAFDTEGELPKIYDSLEIKREDGSILVLEVQSHIGENTVRTISMDSTDGLSRGTAVEATNAPIQMPIGDVYGRLFNVVGDPIDGMEDMPKTGDNGLPIHRNAPKFEDLSVSTEVLFTGIKVIDLIEPYAKGGKIGLFGGAGVGKTVLIQELINNIAKGHGGLSVFAGVGERTREGNDLLREMLESGIIKYGDDFMHSMEEGGWDLSKVDKTAMKDSKATFVFGQMNEPPGARARVALSGLTIAEYFRDGAGDGQGKDVLFFVDNIFRFTQAGSEVSALLGRMPSAVGYQPTLATEMGAMQERITSTKKGSITSVQAVYVPADDLTDPAPATTFAHLDATTVLSRKIAELGIYPAVDPLDSTSRILTADILGNEHYDCAQRVKELLQRYKELQDIIAILGMEELSEEDKMAVGRARRVQRFLSQPFHVAEQFTGIPGVLVDIKETIKGFNMIMDGELDHLPEAAFNLKGTIEEAIEAGEKMLAES

SEQ ID NO: 43360 - DNA, 1425 bp, Sulfitobacter sp. EE-36
  CDS (1)..(1425): transl_table=11
atggcaaatgcagtcggcaaaatcacacaagtcatcggcgccgtcgtcgatgtgcagttcgaggatcacctgccagagatcctcaacgctgttgtaactgaaaaccacggcaagaaactgatcctcgaagtggctcagcaccttggcgaaaacaccgtgcgtaccatcgcgatggacgcgaccgaaggtctggttcgcggccagcgcgtcgaagacacaggcgcgcccatctcgatcccagtgggtaacgccacattgggccgcatcatgaacgttgttggcgaagccatcgacgaaaaaggcgacatccaatcggccgagcgtcgctcgatccacgctgacgcgcccgaattcgcggaacagtcgaccacatccgaagtgctggaaacgggcatcaaggttatcgaccttctggcaccttacgccaagggtggtaaaattggtctgttcggtggtgccggtgttggcaaaaccgttctgatcatggaactgatcaacaacatcgccaaagtgcactccggttattcggttttcgcgggcgttggtgaacgtacccgtgaagggaacgacctgtaccacgagatgatcgaatccaacgttatcaaccctgatgatctggaaaaatcgcaggttgcgctggtgtacggccagatgaacgagcctcccggagcgcgtatgcgcgttgctctgaccggtctgacactggccgaacagttccgcgaccaatccggtaccgacgttctgttcttcgtcgacaacatcttccgctttacccaagccggttccgaggtttcggctctgctgggtcgtatcccttcggccgtgggctaccagccaacactggcgaccgacatgggtgcgatgcaagaacgtattacatcgaccaaatccggttcgattacatcggttcaggccgtttacgttcctgcggatgaccttaccgaccctgcgcccgcgacatcctttgcgcaccttgacgcgacaaccgttctggaccgttcgatctcggaaaagggtatctaccctgctgttgatccgcttggctccacatcgcgtctgatggacccatccatcgttggcgaagagcactacaacgtggcacgtgacgttcagggtatcctgcaacgctacaagtcgctgcaggacatcatcgcgattctcggcatggacgaactgtcggaagacgacaaactgaccgttgcccgtgcgcgtaagatcgaacgcttcctgagccagcctttcgacgttgcgaaagtgttcaccggctccgacggtaagcaggttccactggaagagacaatcacctccttcaaggcggttgttgccggtgaatacgatcacctgcccgaaggtgccttctacatggttggcggcatcgaagaagtgaaagcgaaagctgaaaaaatggcggcagacgccgcttaa

SEQ ID NO: 43361 - protein, 474 aa, Sulfitobacter sp. EE-36
MANAVGKITQVIGAVVDVQFEDHLPEILNAVVTENHGKKLILEVAQHLGENTVRTIAMDATEGLVRGQRVEDTGAPISIPVGNATLGRIMNVVGEAIDEKGDIQSAERRSIHADAPEFAEQSTTSEVLETGIKVIDLLAPYAKGGKIGLFGGAGVGKTVLIMELINNIAKVHSGYSVFAGVGERTREGNDLYHEMIESNVINPDDLEKSQVALVYGQMNEPPGARMRVALTGLTLAEQFRDQSGTDVLFFVDNIFRFTQAGSEVSALLGRIPSAVGYQPTLATDMGAMQERITSTKSGSITSVQAVYVPADDLTDPAPATSFAHLDATTVLDRSISEKGIYPAVDPLGSTSRLMDPSIVGEEHYNVARDVQGILQRYKSLQDIIAILGMDELSEDDKLTVARARKIERFLSQPFDVAKVFTGSDGKQVPLEETITSFKAVVAGEYDHLPEGAFYMVGGIEEVKAKAEKMAADAA

SEQ ID NO: 43362 - DNA, 1425 bp, Roseovarius nubinhibens ISM
  CDS (1)..(1425): transl_table=11
atggcaaatgcaaaaggcacaatcactcaggtgatcggcgccgtggtggacgttcagttcggcgaccacctgcccgaaattctgaacgccctgaccaccgacaacaacggcaagaaactggtcctcgaagtggcccagcaccttggtgagaacaccgtgcggaccatcgcgatggacagcaccgagggtctcgtgcgcggtcaggaagtgaccgacaccgacggcccgatcaccgtgcccgtcggcaacgccaccctgggccgtatcctcaacgtcgtgggcgagcccgtggacgagggtgccccgatcaaggcaaccgaaacccgcgccatccaccaagaagcgcccgagttccaagaacagtcgaccgagtcggaagttctggtcaccgggatcaaggtggttgacctgctggccccctacgcaaaaggcggcaagatcggcctcttcggcggtgccggcgtgggcaagaccgttctcatcatggaactgatcaacaacatcgccaaagtgcactcgggtttctcggtgttcgccggtgtgggtgagcggacccgtgagggcaacgacctctatcacgagatgatcgaatccaacgttatcaaccccgataacctggaagagagccaagtggccctcgtctacggtcagatgaacgaacctccgggagcgcgtatgcgtgtggccctgaccggtctgaccctggccgagcagttccgcgaccagtccgggaccgacgttctgttcttcgtcgacaacatcttccgctttacccaagccggttcggaagtgtcggcccttcttggtcgtattccttcggctgtgggctatcagccgacgctggcgaccgacatgggcgcgatgcaggaacgcatcacctcgaccaaatcgggttcgatcacctcggtgcaggccgtctacgttcccgcggacgaccttaccgaccccgcgcctgcgacctcgttcgcgcacctcgacgccaccaccgttctgtcgcgtgccatctccgagctgggcatctacccggcggtggacccgctcgacagtacgtcgcgcctgatggacccggcgatcgttggtgaagagcactaccaagtggcccgtgacgtgcagggtatcctgcaacgctacaagtcgctgcaggacatcatcgccatcctcggcatggacgaactgtcggaagaggacaagctgaccgtggcccgtgcccggaagatccagcgtttcctcagccagcccttcgacgtggcaaaggtcttcaccggttcggacggtgtgcaggtgcctctcgaagacacgatccggtcgttcaaggccgtggttgccggcgaatatgaccacctgcccgaaggtgccttctacatggttggcggcatcgacgacgtggtggccaaagccgagaagatggctgccgacgcggcctaa

SEQ ID NO: 43363 - protein, 474 aa, Roseovarius nubinhibens ISM
MANAKGTITQVIGAVVDVQFGDHLPEILNALTTDNNGKKLVLEVAQHLGENTVRTIAMDSTEGLVRGQEVTDTDGPITVPVGNATLGRILNVVGEPVDEGAPIKATETRAIHQEAPEFQEQSTESEVLVTGIKVVDLLAPYAKGGKIGLFGGAGVGKTVLIMELINNIAKVHSGFSVFAGVGERTREGNDLYHEMIESNVINPDNLEESQVALVYGQMNEPPGARMRVALTGLTLAEQFRDQSGTDVLFFVDNIFRFTQAGSEVSALLGRIPSAVGYQPTLATDMGAMQERITSTKSGSITSVQAVYVPADDLTDPAPATSFAHLDATTVLSRAISELGIYPAVDPLDSTSRLMDPAIVGEEHYQVARDVQGILQRYKSLQDIIAILGMDELSEEDKLTVARARKIQRFLSQPFDVAKVFTGSDGVQVPLEDTIRSFKAVVAGEYDHLPEGAFYMVGGIDDVVAKAEKMAADAA

SEQ ID NO: 43364 - DNA, 1404 bp, Oceanicola batsensis HTCC2597
  CDS (1)..(1404): transl_table=11
gtgacccaggtcatcggcgccgttgtggacgtgcagttcgacgatcacctgccggagatcctcaacgcactgaccaccgacaacaacggcaccaagctggttctggaagtggcgcagcaccttggtgagaacaccgtgcgcaccatcgcgatggacgcgaccgaaggtctggtccgcggccaggaagtgaccgacaccgacggcccgatctcggtgccggtcggcacggcgacgctgggccgcatcctgaacgtgatcggcgagccggtcgacgagaagggcccggtcgaggcggacgaattccggccgatccacgcgccggcccccgacttcgccgaccaggcgaccgaagccgaggtcctcgtgaccggcatcaaggtgatcgacctgctggccccctacgccaagggcggcaagatcggtctcttcggcggtgccggtgtgggcaagacggttctcatccaggaactgatcaacaacatcgccaaggtgcactcgggtctgtccgtgttcgccggtgtgggcgaacggacccgcgagggcaacgacctctaccacgagatgatcgagtcgggcgttctgaccccggacaacctgccggattccaagatcgccctggtctacggccagatgaacgaaccgccgggtgcgcgcgcgcggatcgcccttaccggcctgacgctggcggaacagttccgcgacgcgaccgggacggacgttctgttcttcgtcgacaacatcttccgcttcactcaggcgggctcggagatgtcggcgcttctgggtcgtattccctcggccgtgggctaccagccgacgctggccaccgacatgggcgcgatgcaggaacggatcacctcgaccaagaacgggtcgatcacctcgatccaggccgtctacgttcccgcggacgacctgaccgacccggcgccggccacgaccttcgcccacctcgacgcgacgacggttctcaaccgtgcgatctcggagcttggcatctacccggccgtggacccgctcgactcgacctcgcgtctcatggacccgcagatcgtcggcgaggaacactaccaggtggcccgtgacgtgcagggtatccttcagcgctacaagtcgctgcaggacatcatcgcgatcctcgggatggacgaactgtcggaagaggacaagctgaccgtggcccgcgcccggaagatccagcgcttcctgtcgcagccgttcgacgtggcgaaggtcttcaccggctcggatggtgtgcaggttcccctggaagacacgatcgcgtcgttcaaggccgtggtcgccggcgagtacgaccacctgcccgaagcggccttctacatggtcggcggcatcgacgaagtgaaagccaaggccgagaagctggccgcggaagcggcgtaa

SEQ ID NO: 43365 - protein, 467 aa, Oceanicola batsensis HTCC2597
MTQVIGAVVDVQFDDHLPEILNALTTDNNGTKLVLEVAQHLGENTVRTIAMDATEGLVRGQEVTDTDGPISVPVGTATLGRILNVIGEPVDEKGPVEADEFRPIHAPAPDFADQATEAEVLVTGIKVIDLLAPYAKGGKIGLFGGAGVGKTVLIQELINNIAKVHSGLSVFAGVGERTREGNDLYHEMIESGVLTPDNLPDSKIALVYGQMNEPPGARARIALTGLTLAEQFRDATGTDVLFFVDNIFRFTQAGSEMSALLGRIPSAVGYQPTLATDMGAMQERITSTKNGSITSIQAVYVPADDLTDPAPATTFAHLDATTVLNRAISELGIYPAVDPLDSTSRLMDPQIVGEEHYQVARDVQGILQRYKSLQDIIAILGMDELSEEDKLTVARARKIQRFLSQPFDVAKVFTGSDGVQVPLEDTIASFKAVVAGEYDHLPEAAFYMVGGIDEVKAKAEKLAAEAA

SEQ ID NO: 43366 - DNA, 1458 bp, Erythrobacter sp. NAP1
  CDS (1)..(1458): transl_table=11
atggcaaccgcaccagtcctcaaccagaccaccaacggcacgatcagccaggtcatcggcgctgtcgtcgacgtgcagttccccggtgaactgcccgcaattctgaccgcgctcgaaaccaaaaacgacggcaagacgctcgtcctcgaagtcgcgcagcaccttggcgaaaacaccgtccgcaccatcgcgatggatgcgaccgaaggccttgttcgtggtcaggaagtcatcaacaccggcgcgcagatcagcgttccggttggccccaagacgctcggccgcatcatgaacgtcgtcggcgaagccatcgacgagcgtggcccggttggcgctgacatgaccagcccgatccacgcagaggctcctgcctttgtcgaccagtcgaccgaagccgacattctcgtcaccggcatcaaggtgatcgaccttctcgctccttacgcgaagggcggcaagatcggcctgtttggcggcgctggcgttggcaagaccgttctcattcaggaactcatcaacaacatcgcaaagggccacggcggcgtgtccgtgttcgcaggcgttggtgagcgcacccgtgaaggtaacgacctctaccacgaattcctcgacgctggcgttatcgccaaggacgaagacggcaacgctatctcggaaggctccaaggttgcgctcgtcttcggtcagatgaacgagcctccgggcgcacgtgcacgcgttgctctgtcgggtctgaccatggccgaatatttccgcgaccaagaaggccaggacgtcctgttcttcgtcgacaacatcttccgctttacgcaggcgggttcggaagtgtccgcgcttctcggccgtattccttcggcagtgggctatcagccgaccctgtcgaccgacatgggtaacctgcaggaacgcatcacctcgaccaccaagggctcgatcacctcggtgcaggccatctacgttcctgcagatgacttgaccgacccggcgcctgcaacctcgtttgctcaccttgacgcaacgaccactctgtcgcgcgccatctcggagctcggcatctacccggcggtggacccgctggactcgaccagccgcgttctcgagccgcgcgttgtcggtcaggaacactacgaaaccgctcgccgcgttcaggaaacgctgcagaagtacaagagccttcaggacatcatcgccattctcggcatggacgagctttcggaagaagataagctcaccgttgcccgtgcgcgcaagatccagaagttcctttcgcagccgttccacgtggctgaggtcttcaccaacatcccgggcctgttcgtgcagctcgaagatacgatcaagtcgttcaaggctgtggtcgatggtgaatacgaccaccttcccgaagcggccttctacatggttggcggcatcgacatggttgtcgaaaaggcagccaagctcgccgaggaaagctaa

SEQ ID NO: 43367 - protein, 485 aa, Erythrobacter sp. NAP1
MATAPVLNQTTNGTISQVIGAVVDVQFPGELPAILTALETKNDGKTLVLEVAQHLGENTVRTIAMDATEGLVRGQEVINTGAQISVPVGPKTLGRIMNVVGEAIDERGPVGADMTSPIHAEAPAFVDQSTEADILVTGIKVIDLLAPYAKGGKIGLFGGAGVGKTVLIQELINNIAKGHGGVSVFAGVGERTREGNDLYHEFLDAGVIAKDEDGNAISEGSKVALVFGQMNEPPGARARVALSGLTMAEYFRDQEGQDVLFFVDNIFRFTQAGSEVSALLGRIPSAVGYQPTLSTDMGNLQERITSTTKGSITSVQAIYVPADDLTDPAPATSFAHLDATTTLSRAISELGIYPAVDPLDSTSRVLEPRVVGQEHYETARRVQETLQKYKSLQDIIAILGMDELSEEDKLTVARARKIQKFLSQPFHVAEVFTNIPGLFVQLEDTIKSFKAVVDGEYDHLPEAAFYMVGGIDMVVEKAAKLAEES

SEQ ID NO: 43368 - DNA, 1386 bp, Pseudoalteromonas tunicata D2
  CDS (1)..(1386): transl_table=11
atgagtttaggtaaggtcgtccaaattatcggcgccgttgtggatattgaattcccacaaaatagcgtgcctgccgtatatgacgcagtcaacattacagatggcgatttagctggtttaactctagaagttcaacagcagctaggtggcggtgtggtacgtggtatcgcacttggtactacagacggtttacgtcgtggtgctacagtacaaaacactggtaaagcaattcaagtgccagtaggtaaagcaacactaggtcgtatcatgaacgtacttggtgagccaatcgatgaagcaggtccaatcggtgaagaagagcgtatgtctattcaccgtgcagcaccaagctacgaagagcaatcaagctcaatcgaacttttagaaacgggtatcaaggttatcgaccttgtatgtccattcgctaaaggtggtaaagttggtttattcggtggtgccggtgtaggtaaaaccgtaaacatgatggaacttatccgtaacatcgcaatcgagcacagcggttattcagtattcgctggtgttggtgagcgtacacgtgaaggtaacgatttctatcacgaaatgaacgaatctaacgtacttgataaagtatcgctagtttacggtcagatgaatgagccaccaggcaaccgtttacgtgttgctttaacgggtctaactatggctgagaagttccgtgacgaaggtcgcgatgtacttttcttcgtagataatatctaccgttacacactagctggtacagaagtatctgcacttttaggtcgtatgccatcagccgtaggttaccaaccaacgcttgctgaagaaatgggtgtactacaggagcgtatcgcttctactaaaacaggttcaattacttcaatccaagcggtatacgtacctgcggatgacttaacagatccatcaccagcaacaacgtttgctcacttagatgcaacagttgtactttctcgtgatatcgcatctttaggtatctatccagcggttgacccactagattcatcatctcgtcaacttgatccattagtaatcggtcaagagcattatgatgcagcacgtggtgttcaaacagttcttcaacgttataaagaactaaaagacatcattgcgattctaggtatggatgaattatcagatgaagataagcaattagtatctcgtgctcgtaaaatccaacgtttcctatctcagccgttcttcgttgctgaggtatttacaggtgcgtcaggtaaatacgtttcattaaaagatactattgcaggctttaaaggcatcttaaacggtgactatgatgcgcttcctgagcaagcattctacatggttggctctatcgatgaagcgatcgaaaaagctaaaaacatgtaa

SEQ ID NO: 43369 - protein, 461 aa, Pseudoalteromonas tunicata D2
MSLGKVVQIIGAVVDIEFPQNSVPAVYDAVNITDGDLAGLTLEVQQQLGGGVVRGIALGTTDGLRRGATVQNTGKAIQVPVGKATLGRIMNVLGEPIDEAGPIGEEERMSIHRAAPSYEEQSSSIELLETGIKVIDLVCPFAKGGKVGLFGGAGVGKTVNMMELIRNIAIEHSGYSVFAGVGERTREGNDFYHEMNESNVLDKVSLVYGQMNEPPGNRLRVALTGLTMAEKFRDEGRDVLFFVDNIYRYTLAGTEVSALLGRMPSAVGYQPTLAEEMGVLQERIASTKTGSITSIQAVYVPADDLTDPSPATTFAHLDATVVLSRDIASLGIYPAVDPLDSSSRQLDPLVIGQEHYDAARGVQTVLQRYKELKDIIAILGMDELSDEDKQLVSRARKIQRFLSQPFFVAEVFTGASGKYVSLKDTIAGFKGILNGDYDALPEQAFYMVGSIDEAIEKAKNM

SEQ ID NO: 43370 - DNA, 1407 bp, Photobacterium sp. SKA34
  CDS (1)..(1407): transl_table=11
atggctacaggtaagatcgtacagatcatcggtgcggtagtcgacgtagagtttccacaggactctgtaccacaggtatacgatgcccttcatgttgatgtgaaagagaacggtacattagtactggaagttcagcagcaacttggtggtggcgttgttcgtggtatcgctatgggtacttctgatggcttacgtcgtggtttgtctgttgagaatacaggccgcccaattgaagtaccagtaggtacagcgactctaggacgtatcatgaacgttcttggtcaacctattgatgagtgtggtgagatcggtgagcaagagcgttatgctattcaccgtgaagcaccaagctatgaagatcagtcaaatgtaactgaactcctagaaacaggtgttaaggttatcgacctaatctgtccattcgctaagggtggtaagatcggtctgtttggtggtgctggtgttggtaaaaccgttaacatgatggaacttatcaacaacatcgccctaaaacactcaggtttatctgtgtttgcaggtgttggtgagcgtactcgtgaaggtaacgatttctactacgagatgcaggaagcaggtgttgttaacatcgaaaatcctgaagagtctaaagtagcaatggtttacggccagatgaacgagccaccaggtaaccgtctacgtgttgctctaactggccttacaatggctgagcgcttccgtgacgaaggtcgtgacgtactgttatttatcgataacatctaccgttatacccttgcaggtactgaagtatcagcactgcttggtcgtatgccttctgcggtaggttaccagcctacgcttgcagaagaaatgggtgtccttcaggaacgtatcacgtcaacgaagtctggctctatcacgtctgttcaggcggtatacgtacctgccgatgacttgactgacccatcaccagcaacaacctttgctcacttagatgcaacggttgtactttcgcgtcagatcgcatcgctaggtctataccctgcgatcgacccattggattcaacatcacgtatgcttgatccattggtagtaggtcaagagcactacgacattgcacgtggcgttcagagtctacttcaacgttataaagaactaaaagacatcatcgctattcttggtatggatgagctatctgaagaagataagcaagctgtatcacgtgcacgtaagattgaacgtttcctaactcaaccttaccacgtagcagaagtctttactggtgacccaggtatctacgtaacgttgaaagacacactacgtagcttcaaaggcttattagcgggtgaatacgacgatatccctgagcaggcatttatgtactgtggtgcggttgaagacgtattagaaaacgcgaagaagctgtaa

SEQ ID NO: 43371 - protein, 468 aa, Photobacterium sp. SKA34
MATGKIVQIIGAVVDVEFPQDSVPQVYDALHVDVKENGTLVLEVQQQLGGGVVRGIAMGTSDGLRRGLSVENTGRPIEVPVGTATLGRIMNVLGQPIDECGEIGEQERYAIHREAPSYEDQSNVTELLETGVKVIDLICPFAKGGKIGLFGGAGVGKTVNMMELINNIALKHSGLSVFAGVGERTREGNDFYYEMQEAGVVNIENPEESKVAMVYGQMNEPPGNRLRVALTGLTMAERFRDEGRDVLLFIDNIYRYTLAGTEVSALLGRMPSAVGYQPTLAEEMGVLQERITSTKSGSITSVQAVYVPADDLTDPSPATTFAHLDATVVLSRQIASLGLYPAIDPLDSTSRMLDPLVVGQEHYDIARGVQSLLQRYKELKDIIAILGMDELSEEDKQAVSRARKIERFLTQPYHVAEVFTGDPGIYVTLKDTLRSFKGLLAGEYDDIPEQAFMYCGAVEDVLENAKKL

SEQ ID NO: 43372 - DNA, 1377 bp, Oceanospirillum sp. MED92
  CDS (1)..(1377): transl_table=11
atgagtagcggaactattgttcagattatcggtgcggtagttgacgtggaatttccacgtgattctgtaccgaaggtttacgacgcgctgaccgtaactaaaaacggtttgacgctggaagttcagcagcagctgggcgacggtgttgttcgtgcgatcgcaatgggtcagactgaaggcgtaagccgtggtcaggacgttgcgaacactggtgcgccagtttctgtacctgttggtacagcaacactgggtcgtatcatggacgtactgggtaacccaattgatgaatgtggcgaaatcggtgaagaagagcgtatgcctatccaccgtaaagcgccatcttacgacgagcaggcagcatcaaacgaactgctggaaactggtatcaaggtaatcgacctggtatgcccgtttgctaaaggtggtaaagttggtctgttcggtggtgcgggtgtaggtaaaaccgtaaacatgatggagctgatccgtaacatcgcgatcgagcactcaggtttctccgtattcgccggcgtaggtgagcgtactcgtgagggtaacgacttctactacgagatgaaagaatccaacgtactggataaagtatctctggtttacggtcagatgaatgagcctccaggtaaccgtctgcgtgtagcgctgactggcctgacaatggctgaaaaattccgtgacgaaggtcgtgacgtactgttgttcgtagacaacatctaccgttacacactggcaggtactgaagtatcagcactgctgggtcgtatgccttctgcggtaggttaccagccaactctggcagaagagatgggcgttcttcaggagcgtatcacttctactaagactggttccatcacgtctatccaggcggtatacgtacctgccgatgacttgactgacccatctccagcaacaaccttctctcaccttgacgcaacagtagtactgtctcgtcagatcgcagagctgggtatctaccctgcggttgacccactggattcaacgtctcgtcagctagacccactggttatcggtactgagcactatgaaattgctcgtaacgtacagggtgtacttcagcgctataaagagctgaaagacatcatcgctatcctgggtatggacgaactgtctgaagaagataaatctctggtagcacgtgcacgtaagatccagcgattcctttctcagccattcttcgtagctgaagtattcaccggtgctcctggtaaatacgtgccactgaaagaaactatcagcggctttaaaggcatcctggaaggccagtacgacgatctgccagagcaggcgttctacatggttggcggtatcgacgaagcgatcgagaaagctaaaggcatgtaa

SEQ ID NO: 43373 - protein, 458 aa, Oceanospirillum sp. MED92
MSSGTIVQIIGAVVDVEFPRDSVPKVYDALTVTKNGLTLEVQQQLGDGVVRAIAMGQTEGVSRGQDVANTGAPVSVPVGTATLGRIMDVLGNPIDECGEIGEEERMPIHRKAPSYDEQAASNELLETGIKVIDLVCPFAKGGKVGLFGGAGVGKTVNMMELIRNIAIEHSGFSVFAGVGERTREGNDFYYEMKESNVLDKVSLVYGQMNEPPGNRLRVALTGLTMAEKFRDEGRDVLLFVDNIYRYTLAGTEVSALLGRMPSAVGYQPTLAEEMGVLQERITSTKTGSITSIQAVYVPADDLTDPSPATTFSHLDATVVLSRQIAELGIYPAVDPLDSTSRQLDPLVIGTEHYEIARNVQGVLQRYKELKDIIAILGMDELSEEDKSLVARARKIQRFLSQPFFVAEVFTGAPGKYVPLKETISGFKGILEGQYDDLPEQAFYMVGGIDEAIEKAKGM

SEQ ID NO: 43374 - DNA, 1437 bp, Xanthobacter autotrophicus Py2
  CDS (1)..(1437): transl_table=11
atggcgaacaaggtcggacgcatcacccaggtcatcggcgccgtcgtggacgtgcagttcgacggccatctgccggaaatcctcaacgcgctggagaccaccaaccagggcaaccggctggtgctcgaagtggcgcagcacctcggtgagagcaccgtgcgctgtatcgccatggacgctaccgaaggtctggtgcgtggcctcgaggtcaccgataccggcgcgccgatccaggtgccggtgggtgccggcaccctcggccgcatcatgaacgtcatcggcgagccggtggacgagcttggcccgatcgaggcggaagccacccgcggcatccaccagccggccccctcctatgcggagcaggccacggaagccgagatcctcgtcaccggcatcaaggtggtggacctcctcgccccctacgccaagggcggcaaggtgggcctgttcggcggcgcaggcgtgggcaagaccgtgctcatcatggagctgatcaacaacgtggcgaaggcgcacggcggctattccgtgttcgccggcgtgggtgagcgcacccgcgagggcaacgacctctaccacgagatgatcgagtccaacgtgaacaaggacccgcacgagaacggtggttccgccgccggttccaagtgcgccctggtgtacggccagatgaacgagcctccgggcgcccgcgcccgcgtggcgctgaccggcctcaccgtcgccgagcacttccgcgaccagggccaggacgtgctgttcttcgtggacaacatcttccgcttcacccaggccggctcggaagtgtcggctctgctcggccgcattccctcggcggtgggctaccagccgacgctggccaccgacatgggcgcgctccaggagcgcatcaccaccaccaccaagggctcgatcacctcggtgcaggccatctacgtgccggccgacgacctgaccgacccggcgcctgccgcctccttcgcccatctggacgccaccaccgtgctgtcgcgctccatcgcggaaaagggcatctacccggcggtggatccgctggactccacctcgcgcatgctctcccccgccatcctcggcgacgagcactacaacaccgcgcgtcaggtccagcagaccctgcagcgctacaaggctctccaggacatcatcgccatcctgggcatggacgagctcagcgaagaggacaagatcacggtcgcccgcgcccgcaagatcgagcgcttcctctcgcagcccttccacgtggcggaagtgttcaccggctccccgggcaagctcgtggacctgaaggacaccatcgccggcttcaagggcctggtggaaggcaagtacgactacctgcccgagcaggccttctacatggtcggctccatggaagaagccatcgagaagggcaagaagctcgcggccgaggcggcctga

SEQ ID NO: 43375 - protein, 478 aa, Xanthobacter autotrophicus Py2
MANKVGRITQVIGAVVDVQFDGHLPEILNALETTNQGNRLVLEVAQHLGESTVRCIAMDATEGLVRGLEVTDTGAPIQVPVGAGTLGRIMNVIGEPVDELGPIEAEATRGIHQPAPSYAEQATEAEILVTGIKVVDLLAPYAKGGKVGLFGGAGVGKTVLIMELINNVAKAHGGYSVFAGVGERTREGNDLYHEMIESNVNKDPHENGGSAAGSKCALVYGQMNEPPGARARVALTGLTVAEHFRDQGQDVLFFVDNIFRFTQAGSEVSALLGRIPSAVGYQPTLATDMGALQERITTTTKGSITSVQAIYVPADDLTDPAPAASFAHLDATTVLSRSIAEKGIYPAVDPLDSTSRMLSPAILGDEHYNTARQVQQTLQRYKALQDIIAILGMDELSEEDKITVARARKIERFLSQPFHVAEVFTGSPGKLVDLKDTIAGFKGLVEGKYDYLPEQAFYMVGSMEEAIEKGKKLAAEAA

SEQ ID NO: 43376 - DNA, 1512 bp, Flavobacteria bacterium BBFL7
  CDS (1)..(1512): transl_table=11
atgtctcaaattacaggtagcgtttcacaaatcatcggtccggtggttgacgtaacatttgatagtgcacaaggcgcacttcctaaaatttatgattctcttgaagtagaacttaatggtaatcttctcgttttagaagtacagtctcacattggtgagaacactgtaagaaccatttctatggattcaacagatggtctttctcgtggaaccgctgtaaaatcaacagggaaccctattaaaatgcctatcggagatgacgtatatggtcgtctttttaatgttatcggtgatgcgattgatggattaggtaaccttcctaaaacaggagataatggtttatctattcacagatctgcgccagcatttgaggatctttctacatctacagaagtgcttttcacaggtattaaagtaatcgatctaattgaaccttatgcaaaaggtggtaagattggacttttcggtggtgctggagtaggtaaaacagtattgattcaagaattgattaataacattgcaaaaggtcacggtggactttcagtatttgctggagttggtgagcgtacgcgtgaaggtaatgaccttttacgtgagatgttagaatcaggtattataaaatacggagatgcatttatgcactctatggaagaaggcggatgggatctacaaaaggtagataaggaaatcatgaaagattcaaaagcgactttcgtttttggtcagatgaatgagccaccaggagcacgtgcacgtgttgcactttctggacttactattgctgagtatttccgtgatggagctggagatggacaagggaaagacgtacttttcttcgttgataatattttccgttttactcaagcaggttctgaggtatctgcacttctaggtcgtatgccatctgcggtaggatatcagcctacactagcaactgagatgggagcgatgcaagaacgtattacttcaacaaagaaaggatctattacatctgtacaagcggtatacgtacctgcagatgaccttaccgatcctgcaccagcaacaacatttgctcacttagatgcaacgacggtactttcacgtaagattgcagagctaggtatctacccagcggtggatcctttagattctacttcacgtattctaaccgcagagatcttaggaaaagagcactatgagtgtgctcaaaacgtaaaagaattattacaacgttataaagagcttcaagatattattgccattctaggaatggaagaattatctgaagaagataaacttgcagtaagccgtgcacgtcgtgtacaacgtttcttatctcaaccattccacgtagcagagcagtttactggtcttaaaggtgtgttagttgacattaaagatactatcaaaggatttaatatgattatggacggtgagttagatcacttaccagaaagtgcatttaaccttaaaggtactattgaagaagcaattgaggcaggagaaaaaatgcttgctgaggtatcataa

SEQ ID NO: 43377 - protein, 503 aa, Flavobacteria bacterium BBFL7
MSQITGSVSQIIGPVVDVTFDSAQGALPKIYDSLEVELNGNLLVLEVQSHIGENTVRTISMDSTDGLSRGTAVKSTGNPIKMPIGDDVYGRLFNVIGDAIDGLGNLPKTGDNGLSIHRSAPAFEDLSTSTEVLFTGIKVIDLIEPYAKGGKIGLFGGAGVGKTVLIQELINNIAKGHGGLSVFAGVGERTREGNDLLREMLESGIIKYGDAFMHSMEEGGWDLQKVDKEIMKDSKATFVFGQMNEPPGARARVALSGLTIAEYFRDGAGDGQGKDVLFFVDNIFRFTQAGSEVSALLGRMPSAVGYQPTLATEMGAMQERITSTKKGSITSVQAVYVPADDLTDPAPATTFAHLDATTVLSRKIAELGIYPAVDPLDSTSRILTAEILGKEHYECAQNVKELLQRYKELQDIIAILGMEELSEEDKLAVSRARRVQRFLSQPFHVAEQFTGLKGVLVDIKDTIKGFNMIMDGELDHLPESAFNLKGTIEEAIEAGEKMLAEVS

SEQ ID NO: 43378 - DNA, 1398 bp, marine gamma proteobacterium HTCC2207
  CDS (1)..(1398): transl_table=11
atgagtagcggaagaatcgtacaaattattggtgctgtgatcgatgtggaatttgcacgtgatcaggtgcccagcgtatatgacgcactagtcgtcgacggcaagggtttgaccctcgaagttcagcagcagttgggtgacggtgttgtccgtactattgctatgggtgcatctgaaggcgttagccgtgggttgggcgtggttaataccaaagcgccaatttcagtaccagttggtgttgaaacgctcggacgcatcatggatgttctgggtaacccaatcgatgagaaaggccctatcggtgaaaaagagcgcatggcgattcaccgcaagccaccagcctatgacgagctggcggcttctgacgatttgctcgagactggtatcaaggtaatcgacttggtttgtcctttcgctaaaggcggtaaggttggattgttcggtggtgctggtgttggtaaaaccgtaaatatgatggagctaatcaacaacattgcaacagagcacagtggtctgtctgtatttgctggtgttggtgagcgtactcgtgaaggtaatgacttttactacgagatgcaggaatccggtgttgtaaacatcgagactccaagtgaatctaaagtagcgatggtctacggtcagatgaatgagcctccaggaaaccgtctgcgtgttgctctgactggtttgaccatggcagagaaattccgtgacgaaggtaaagacgtactgttgttcgttgataatatctaccgttacacattggcaggtactgaagtatcagcactgttgggccgtatgccttcagctgtaggctaccagcctactttggcagaagagatgggtgttcttcaggagcgtatcacctcgactaagaccggttctattacatcggttcaggcggtatacgtaccggcggatgatttgaccgatccctctcctgctactacatttgctcaccttgactccaccgttgtactgagccgtgatattgcttctaaaggtatttacccagcggtagatccactggattcaacctcacgtcagctcgatccattgattattggcaccgagcactatgcggttgctcgtggtgtacagtcagtgctgcagcgctacaaagagttgaaagatattattgcgatcctgggtatggacgagctgtctgaagaagacaaaatggccgtagcccgagcgcgtaagatcgagcgtttcttgtcacagccattccatgtagctgaaatctttaccggctctccaggtaagtacgtttctcttaaagacactattgctggcttccagggtattttggacggacagtatgatgatcttcctgagcaggcgttctatatggttggctctatcgatgaggcagtagaaaaagctaaaaagctataa

SEQ ID NO: 43379 - protein, 465 aa, marine gamma proteobacterium HTCC2207
MSSGRIVQIIGAVIDVEFARDQVPSVYDALVVDGKGLTLEVQQQLGDGVVRTIAMGASEGVSRGLGVVNTKAPISVPVGVETLGRIMDVLGNPIDEKGPIGEKERMAIHRKPPAYDELAASDDLLETGIKVIDLVCPFAKGGKVGLFGGAGVGKTVNMMELINNIATEHSGLSVFAGVGERTREGNDFYYEMQESGVVNIETPSESKVAMVYGQMNEPPGNRLRVALTGLTMAEKFRDEGKDVLLFVDNIYRYTLAGTEVSALLGRMPSAVGYQPTLAEEMGVLQERITSTKTGSITSVQAVYVPADDLTDPSPATTFAHLDSTVVLSRDIASKGIYPAVDPLDSTSRQLDPLIIGTEHYAVARGVQSVLQRYKELKDIIAILGMDELSEEDKMAVARARKIERFLSQPFHVAEIFTGSPGKYVSLKDTIAGFQGILDGQYDDLPEQAFYMVGSIDEAVEKAKKL

SEQ ID NO: 43380 - DNA, 1407 bp, Rickettsiella grylli
  CDS (1)..(1407): transl_table=11
atgaagagtaatcttatgatgaagtcaatcaaacccattgggtctatcgtcgaaattattggtgccgttatcgatgtcgaatttccaagaggcgagattcccaaagtttttgatgcgttaaccgttgatggccatgatttagtgttagaggtccaacaacagctaggtgacggtattgtacgaactatcgcgatgggtacgagcgatggtttaaagcgtggaacaaaagtcatgaataccaaagcaccgattagtgtgcctgtcgggaagcagactttaggtcgaatcatggatgtattaggtaagcctatcgacgaagcaggtcctatccatgaagaaattcgtttaccgattcatcgcaagccccccactttttctgaacaagccgtgaatgagcaattacttgaaacagggattaaagtcattgatttactttgtccctttgctaaaggtggaaaggttggtttgtttggcggcgcaggtgttggtaaaaccgttaacatgatggaattgatacgtaatattgcgattgaacatagtggatattctgtatttgcaggtgttggagaacgaacacgggaaggtaatgatttctaccatgagatgaaagaatccaacgtgttagataaagtatcattagtttatggtcaaatgaatgaaccgccaggtaatcgtttacgcgtcgcattaacaggtttgacagtagccgaatatttccgtgatgaaggtcgcgatatcttattatttatagataatatttatcgctataccttggctggcgtcgaagtctctgcattattaggacgtatgccttctgctgtggggtatcaaccaaccttagccgcagaaatgggtgctttacaagagcgtattacgtcaacaaaaacaggttctattacttctattcaagcggtttatgttccagcggacgatctgaccgatccttcacccgcaacgacttttgcacacctcgacgcaacggtcgtattatcacgccaaattgctgaactgggtatttatccagcaatagatccgttagattcgaatagccgtcaattggatccgttgattgttgggcaagaacattatgacgttgcgcgggcggtacaaaaaacattgcagcggtttaaagagttaaaggatattattgctattttaggtatggatgaattatcagagcacgataaattgacggttatgcgggctagaaagatacaacgttttttatctcagcctttttttgttgctgaaatattcaccggatctccaggaaaatatgtcagccttagagagacaattcgtggttttaaagcgattttaaatggtgagtttgatgattatcccgaactcgcgttttacatggttggaagtatcgatgaagtggaaattaaagcaaaagccttgtag

SEQ ID NO: 43381 - protein, 468 aa, Rickettsiella grylli
MKSNLMMKSIKPIGSIVEIIGAVIDVEFPRGEIPKVFDALTVDGHDLVLEVQQQLGDGIVRTIAMGTSDGLKRGTKVMNTKAPISVPVGKQTLGRIMDVLGKPIDEAGPIHEEIRLPIHRKPPTFSEQAVNEQLLETGIKVIDLLCPFAKGGKVGLFGGAGVGKTVNMMELIRNIAIEHSGYSVFAGVGERTREGNDFYHEMKESNVLDKVSLVYGQMNEPPGNRLRVALTGLTVAEYFRDEGRDILLFIDNIYRYTLAGVEVSALLGRMPSAVGYQPTLAAEMGALQERITSTKTGSITSIQAVYVPADDLTDPSPATTFAHLDATVVLSRQIAELGIYPAIDPLDSNSRQLDPLIVGQEHYDVARAVQKTLQRFKELKDIIAILGMDELSEHDKLTVMRARKIQRFLSQPFFVAEIFTGSPGKYVSLRETIRGFKAILNGEFDDYPELAFYMVGSIDEVEIKAKAL

SEQ ID NO: 43382 - DNA, 1377 bp, Oceanobacter sp. RED65
  CDS (1)..(1377): transl_table=11
atgagtagcggaaagatcgttcagatcatcggtgctgtaatcgacgtggaattcccacgtgattctgtaccaaaagtatatgacgcgcttaaagttgaaggcggaaagattacgctagaagttcaacaacaattaggcgacggtatggttcgtaccatcgctatgggttctactgaaggtcttaagcgcggcctagtagcagaaaacaccaatcaaccgatccaagtaccagtgggtaaagaaaccctaggtcgtatcatggacgtgttgggtgacccaatcgacgaaaaaggcccaatcggcgaacaagagcgtgcctctattcaccgtaaagccccatcttacgacgaacaagctggtggccaagagctactagaaaccggcgtaaaagtaatcgaccttgtttgcccattcgctaagggtggtaaagttggtctattcggtggtgcgggtgttggtaaaaccgtaaacatgatggagcttatccgtaacatcgcaatcgagcacagtggttactctgtattcgccggtgttggtgagcgtactcgtgaaggtaacgacttctaccacgagatgtctgagtctaacgtattggacaaagtatctctggtttacggtcagatgaatgagccaccaggtaaccgtctacgtgttgcactaactggcttgaccatggctgaaaaattccgtgacgaaggtcgtgacgtactattgttcgtcgacaacatctatcgttacacactagcgggtactgaggtatcagcactgctaggtcgtatgccatctgcggtaggttatcagcctactctagcagaagagatgggtgtacttcaggagcgtatcacgtcaactaagaaaggttcgatcacatctgtacaagcggtatacgtacctgcggatgacttgactgacccgtctcctgctacaacgttcgcccacttggacgcaaccgttgtattgagccgtgacatcgcttctaaaggtatctacccagcgatcgatccattggattcaacgtctcgtcagcttgacccactagtaattggtcaagagcactacgacatcgctcgtggcgtacagactgtacttcagcgcttcaaagagctgaaagacatcatcgccatcttaggtatggacgaactatctgaagaagacaagctaactgtagctcgtgctcgtaagatcgagcgtttcttgtctcagccgttcttcgttgcagaagtattcacaggcgcacctggtaagtacgtatctttgaaagaaaccattcgtggcttcaaaggtatcttagaaggtgagttcgatgatcttcctgagcaagctttctacatggttggtaccatggacgaagccatcgagaaggcgaaaaacctttaa

SEQ ID NO: 43383 - protein, 458 aa, Oceanobacter sp. RED65
MSSGKIVQIIGAVIDVEFPRDSVPKVYDALKVEGGKITLEVQQQLGDGMVRTIAMGSTEGLKRGLVAENTNQPIQVPVGKETLGRIMDVLGDPIDEKGPIGEQERASIHRKAPSYDEQAGGQELLETGVKVIDLVCPFAKGGKVGLFGGAGVGKTVNMMELIRNIAIEHSGYSVFAGVGERTREGNDFYHEMSESNVLDKVSLVYGQMNEPPGNRLRVALTGLTMAEKFRDEGRDVLLFVDNIYRYTLAGTEVSALLGRMPSAVGYQPTLAEEMGVLQERITSTKKGSITSVQAVYVPADDLTDPSPATTFAHLDATVVLSRDIASKGIYPAIDPLDSTSRQLDPLVIGQEHYDIARGVQTVLQRFKELKDIIAILGMDELSEEDKLTVARARKIERFLSQPFFVAEVFTGAPGKYVSLKETIRGFKGILEGEFDDLPEQAFYMVGTMDEAIEKAKNL

SEQ ID NO: 43384 - DNA, 1398 bp, Desulfitobacterium hafniense DCB-2
  CDS (1)..(1398): transl_table=11
gtgaatatcggcaaaattgtgcaaatcatgggagcggtagttgacgtagagtttgcttccgaggcactgccagagatttatagtgctgttaaagtcacggttcccgagaagaagatcgatctcacccttgaggtcgctcagcacttgggcaacaatacagtacgctgtgtggccatgtcttctaccgacggcctgcagcggggcatggcagctctcaataccggagctcccattaccgttcctgtaggaccggcgactttagggcgtatttttaatgttctgggaaaggccattgataatggggaagaagtccacacggacacctcttatcccatccatagacctgctccagcctttgtggatcaagatccatcaacggtcatgctggaaacagggattaaggttatcgacttattagccccctactccaaagggggtaagatcggactcttcggtggtgcgggtgtaggtaaaaccgtattgatccaggagctgatcaataacatcgccatggagcacggcggtctctctgttttcgccggcgtcggcgagcggacccgtgaaggaaacgacctttggaacgagatgagagagtccggggttatcgacaaaatggccatggtttttggtcagatgaatgaaccccccggcgcccgtttgcgggtaggactgaccggattgaccatggcggaatacttccgtgatgtgcagaaccaggacgtgctgctctttatcgataacatcttccgctttacccaagcgggttctgaggtttccgccctcttgggccgtatgccctcagcggtaggttaccaacctaccctggccaccgaaatgggtgccctccaggagcggattacatccacccggaacggctccatcacttccgtacaggctatctacgtgcctgcggatgacttgactgaccctgctccggctaccgccttcgctcacttggatgccaccacggttcttaaccgtgccatctctgagaaagggatttatcccgctgttgaccccttggattccaactcgcggattctttccccgcagattcttggtgaagagcattataaggtggcccgcgatgtccagcagattctgcaaaagtataaagaactccaggatattatcgccattctcggtatggatgagctttcggaagatgagaaactcgtcgtctcccgggcccgccggattgagcgcttcctgtctcagcccttccatgtggctgaagtcttcacaggctcacctggtaaatatgttccgatcaaggaaaccatccgcggctttaaagaaatcgtggaaggtaagcacgataacctgccggaagcggctttccacatggtgggaacgattgaagaagctattgaaaaagccaaagcattgggggcataa

SEQ ID NO: 43385 - protein, 465 aa, Desulfitobacterium hafniense DCB-2
MNIGKIVQIMGAVVDVEFASEALPEIYSAVKVTVPEKKIDLTLEVAQHLGNNTVRCVAMSSTDGLQRGMAALNTGAPITVPVGPATLGRIFNVLGKAIDNGEEVHTDTSYPIHRPAPAFVDQDPSTVMLETGIKVIDLLAPYSKGGKIGLFGGAGVGKTVLIQELINNIAMEHGGLSVFAGVGERTREGNDLWNEMRESGVIDKMAMVFGQMNEPPGARLRVGLTGLTMAEYFRDVQNQDVLLFIDNIFRFTQAGSEVSALLGRMPSAVGYQPTLATEMGALQERITSTRNGSITSVQAIYVPADDLTDPAPATAFAHLDATTVLNRAISEKGIYPAVDPLDSNSRILSPQILGEEHYKVARDVQQILQKYKELQDIIAILGMDELSEDEKLVVSRARRIERFLSQPFHVAEVFTGSPGKYVPIKETIRGFKEIVEGKHDNLPEAAFHMVGTIEEAIEKAKALGA

SEQ ID NO: 43386 - DNA, 1386 bp, Alteromonadales bacterium TW-7
  CDS (1)..(1386): transl_table=11
atgagtttaggtaaggtcgtccaaattatcggtgccgttgtggatattgaattttcacaagacaacgtgccagccgtatatgacgcgctaaaagtaacagatggcgatttagctggtttgactctagaagttcaacaacagctaggtggcggtgtggtacgtactatcgcactaggtactacagacggtttacgtcgtggtgcagcagtatcaaacacaggtgaagcgattcaagttccagttggtaaagcaacacttggtcgtatcatgaacgtacttggtgagccaatcgatgaagctggcccaatcggcgaagaagaccgtatgtctattcaccgtgcagcgccttcatacgaagagcaatcaagttcagtagagcttttagaaacaggtatcaaggtaatcgaccttgtatgtccgtttgcaaaaggtggtaaagttggtttattcggtggtgccggtgttggtaaaaccgtaaacatgatggaacttatccgtaacatcgcaatcgagcacagcggctactcagtattcgcaggtgttggtgagcgtactcgtgagggtaacgacttctaccatgaaatgaacgattcaaacgtacttgataaagtatcgcttgtatacggtcagatgaacgagcctccaggtaaccgtttacgcgtagcgttaacaggtcttactatggctgaaaagttccgtgacgaaggtcgcgatgtacttttcttcgtagataacatctaccgttacacacttgcgggtacagaagtatctgcactacttggtcgtatgccatcagcggtaggttaccagcctacactagctgaagaaatgggtgtacttcaagagcgtatcgcatctactaagacgggttcaatcacatcaatccaagcggtatacgtacctgcggatgatttaacggatccatctccagcaacaacgtttgctcacttagatgcaacagtagtactttcacgtgatatcgcatcacttggtatttacccagcggtagatccacttgattcatcttcacgtcagcttgacccattagtaattggtcaagagcactacgatacagcgcgtggcgttcaaacagttcttcagcgttacaaagaacttaaagacatcatcgcaatcctaggtatggacgagctttctgacgaagataagcaacttgtatctcgtgcacgtaaaatccaacgcttcctatctcagccgttcttcgtggcagaggtatttacaggtgcgtcaggtaaatacgtttcacttaaagacacaattgctggcttcaaaggcattttaaacggtgagtttgatgaccttccagagcaagcgttctacatggttggctctatcgaagaagctcaagaaaaagccaaaagcatgtaa

SEQ ID NO: 43387 - protein, 461 aa, Alteromonadales bacterium TW-7
MSLGKVVQIIGAVVDIEFSQDNVPAVYDALKVTDGDLAGLTLEVQQQLGGGVVRTIALGTTDGLRRGAAVSNTGEAIQVPVGKATLGRIMNVLGEPIDEAGPIGEEDRMSIHRAAPSYEEQSSSVELLETGIKVIDLVCPFAKGGKVGLFGGAGVGKTVNMMELIRNIAIEHSGYSVFAGVGERTREGNDFYHEMNDSNVLDKVSLVYGQMNEPPGNRLRVALTGLTMAEKFRDEGRDVLFFVDNIYRYTLAGTEVSALLGRMPSAVGYQPTLAEEMGVLQERIASTKTGSITSIQAVYVPADDLTDPSPATTFAHLDATVVLSRDIASLGIYPAVDPLDSSSRQLDPLVIGQEHYDTARGVQTVLQRYKELKDIIAILGMDELSDEDKQLVSRARKIQRFLSQPFFVAEVFTGASGKYVSLKDTIAGFKGILNGEFDDLPEQAFYMVGSIEEAQEKAKSM

SEQ ID NO: 43388 - DNA, 1398 bp, marine gamma proteobacterium HTCC2143
  CDS (1)..(1398): transl_table=11
atgagtagcggacaaatcgttcaaatcattggcgcggtaatcgatgtggaatttccacgggattcagtaccgcaggtttatgatgcactaacagtcactgaaaaagcactaaccctagaagtacagcaacaactgggtgatggcgtcgtgcgcacaattgctatgggttcttctgaaggcgttagccgcgggctggtcgtagagtccacaggcgcgcctatttcggtaccggttggtattgagacattaggacgcataatggatgttcttggaaatccaattgacgagtgcggtccaattggcgaaaaggaacgggcttctattcatcggaaggcacccgcatacgatgaactttcagcctctgaagacttgctggagacaggcatcaaagtaattgatttgatttgcccgtttgccaagggtggtaaagttggtctgttcggtggagctggtgttggtaaaaccgtaaacatgatggaactgatcaataacatagctctggagcactctggcttgtcagtttttgccggtgttggagaacgtacccgagaaggtaacgatttctactatgagatgcaggaatcaggcgttgtaaatattgaagagccaagtaaatcgaaagttgcgatggtttatggtcagatgaatgagccaccaggaaataggttgcgcgttgctttgaccggcttgacgatggcagaaaaatttcgtgacgaaggtaaagatgttctactatttgttgataacatttaccgctatacattggccggaacagaagtgtcggcgctgttaggccgcatgccttcagcggttggttaccagccaacactggcgcaggaaatgggcgaattgcaggagcggattacgtctactaaaactggttccatcacgtcgattcaagcggtttacgtaccagcggacgatttgactgacccatcacctgctactacgtttgctcaccttgattctacggttgtattgtcgcgtgatatcgctgctaaaggtatttaccctgcggttgatccgctagactctacgtcacgtcagttagatccgctaattatcggtactgagcattacgacacggctcgcggtgtacaatctgttttgcagcgttataaagagctgaaagacatcattgcaatattgggcatggacgagctgtctgaagaagataagcaaacggtaaaccgcgcgcggaagatcgaacggtttttgtcacagccatttcacgtcgctgaggtatttactgggtcacctggcaaatatgtatcgctgaaagataccattgccggctttaccgggattctggcgggcgaatatgatcacataccagagcaagcgtttctgatgtgcggtggtattgatgacgtgttggaaaacgcgaaaaaattataa

SEQ ID NO: 43389 - protein, 465 aa, marine gamma proteobacterium HTCC2143
MSSGQIVQIIGAVIDVEFPRDSVPQVYDALTVTEKALTLEVQQQLGDGVVRTIAMGSSEGVSRGLVVESTGAPISVPVGIETLGRIMDVLGNPIDECGPIGEKERASIHRKAPAYDELSASEDLLETGIKVIDLICPFAKGGKVGLFGGAGVGKTVNMMELINNIALEHSGLSVFAGVGERTREGNDFYYEMQESGVVNIEEPSKSKVAMVYGQMNEPPGNRLRVALTGLTMAEKFRDEGKDVLLFVDNIYRYTLAGTEVSALLGRMPSAVGYQPTLAQEMGELQERITSTKTGSITSIQAVYVPADDLTDPSPATTFAHLDSTVVLSRDIAAKGIYPAVDPLDSTSRQLDPLIIGTEHYDTARGVQSVLQRYKELKDIIAILGMDELSEEDKQTVNRARKIERFLSQPFHVAEVFTGSPGKYVSLKDTIAGFTGILAGEYDHIPEQAFLMCGGIDDVLENAKKL

SEQ ID NO: 43390 - DNA, 1398 bp, marine gamma proteobacterium HTCC2080
  CDS (1)..(1398): transl_table=11
atgagtagtggaaaagtcgtacaggtgattggcgcggttattgatgtagagtttccccgcgacaacgtaccccaggtttacgatgcgctgtctgtcagtgagaagggtttgacactcgaagtgcaacagcaactcggtgatggcgtcgttcgcgcaattgctatgggatcttccgaaggcattagccggggattgtcggttgagaatacgggagcaccgatttcagttcctgttggtattgaaaccttaggccgcattatggacgttcttgggaaccccatcgatgagaaggggcctattggtgagcagcagcgcagtgcgattcaccgagctgcgccggcatatgatgagctcgctgcttctgaagaggttttggaaaccggcattaaagtcatcgatttagtttgtccctttgctaaaggcggtaaggtcggtttgtttggtggtgctggtgttggcaagaccgtcaacatgatggaactgattaacaacattgctaccgagcactcggggttatccgtttttgctggtgttggtgagcgaacacgagaaggcaacgacttctattacgaaatgcaggaatcaggagttgttaacatcgagaacatggaccagtcgaaagtggcgatggtctacggccaaatgaatgagccgcctggaaaccgactgcgtgttgctttgacaggcttaacgatggcggagaaatttcgtgatgaaggtcgcgatgttctgttgttcgttgataatatttatcgttataccttggcgggaaccgaagtttcggcgttgttaggtcgtatgccgtctgcagtgggttatcagccgacactcgcggaggaaatgggcgttttgcaagagcgcattacctcaacaaaaacaggatcaatcacctcaattcaagcggtttacgttcccgccgatgacttgactgacccctcaccggcaacgacttttgcacacttggactctacagtggtgctaagtcgagatatcgcggccaagggcatttatccagcggttgatcccttagattcgacctctcgccaactggatccactggttattggaaccgagcattacgacgtggctcgaggcgtgcaatcggtcttacagcgttataaggaactgaaagatattattgctattctgggcatggacgagctatctgaagaagataagctcacagtgtcgcgagcgcgaaaaattgagcgatttttgtctcagcctttccacgtcgcagagattttcacaggatccccaggcatctacgtatcattaaaagatacgattgccgggttcaaaggcattttggcgggtgaatatgaccaccttccagagcaggccttctacatggtgggctctattgagcaagccgtagaacgagctgagaagctttaa

SEQ ID NO: 43391 - protein, 465 aa, marine gamma proteobacterium HTCC2080
MSSGKVVQVIGAVIDVEFPRDNVPQVYDALSVSEKGLTLEVQQQLGDGVVRAIAMGSSEGISRGLSVENTGAPISVPVGIETLGRIMDVLGNPIDEKGPIGEQQRSAIHRAAPAYDELAASEEVLETGIKVIDLVCPFAKGGKVGLFGGAGVGKTVNMMELINNIATEHSGLSVFAGVGERTREGNDFYYEMQESGVVNIENMDQSKVAMVYGQMNEPPGNRLRVALTGLTMAEKFRDEGRDVLLFVDNIYRYTLAGTEVSALLGRMPSAVGYQPTLAEEMGVLQERITSTKTGSITSIQAVYVPADDLTDPSPATTFAHLDSTVVLSRDIAAKGIYPAVDPLDSTSRQLDPLVIGTEHYDVARGVQSVLQRYKELKDIIAILGMDELSEEDKLTVSRARKIERFLSQPFHVAEIFTGSPGIYVSLKDTIAGFKGILAGEYDHLPEQAFYMVGSIEQAVERAEKL

SEQ ID NO: 43392 - DNA, 1401 bp, Herbaspirillum seropedicae
  CDS (1)..(1401): transl_table=11
atggctgatggcaaaatcgttcagtgtatcggcgctgtggtggacgtggagtttccgcgcgatgcgatgcccaaggtttacgatgccttgaaattggaaggttcggatctgaccctggaagtccagcagcagctgggcgacggcgtggtccgtaccattgcgctcggttcgtcggacggtctgcgccgcggcctgaccatctcgaacaccggcaagcccatcacggtgcctgtcggtaccgcgaccctgggtcgcatcatggacgtgctgggcaacccgatcgacgaatgcggtccggtctcgcacgagcaaaccgcgtcgatccaccgcaaggctcccgcctacgacgaactgtcgccctcgcaggagctgctggaaaccggcatcaaggtgattgacctggtctgcccgttcgccaagggtggtaaggtcggtctgttcggtggcgccggtgtgggcaagaccgtgaacatgatggagctgatcaacaacatcgccaaggcgcacagcggtctgtccgtgttcgccggtgtgggtgagcgtacccgtgaaggtaacgacttctaccacgaaatggcagaagccaaggtggtggacctggaaaacccgaccaattccaaggtcgccatggtctacggccagatgaacgaaccgccgggcaaccgtctgcgcgtggcgctgaccggcctgaccatcgcggaaggcttccgtgatgaaggcaaggacgtgctgttcttcgtcgacaacatctaccgttacaccctggccggtaccgaagtgtccgcgctgctgggtcgtatgccttcggccgtgggctaccagccgacgctggccgaagaaatgggccgcctgcaagagcgtatcacctcgaccaagactggctcgatcacctcgatccaggccgtgtacgtccctgcggatgacttgaccgacccgtcgccggcaaccaccttcgcccacttggactcgaccgtcgttctgtcgcgtgacatcgcctcgctgggtatctaccccgccgtcgatccgctggactcgacctcgcgccagctggacccgcaagtggtcggccaggaacactacgagaccgcacgcgctgtccagggcaccctgcagcgctacaaggaactgcgtgacatcatcgccattctgggcatggacgaactggctccggaagacaagctgatcgtcgcacgtgctcgtaagatgcagcgtttcctgtcgcagcccttccacgtcgccgaagtgttcaccggttccccgggcaagtacgtttcgctgaaggacacgatcaagggcttcaagatgatcgccagcggcgaactggaccacctgccggaacaagcgttctacatggtcggtaccatcgacgaagcaatcgaaaaggccaagaagatcaactaa

SEQ ID NO: 43393 - protein, 466 aa, Herbaspirillum seropedicae
MADGKIVQCIGAVVDVEFPRDAMPKVYDALKLEGSDLTLEVQQQLGDGVVRTIALGSSDGLRRGLTISNTGKPITVPVGTATLGRIMDVLGNPIDECGPVSHEQTASIHRKAPAYDELSPSQELLETGIKVIDLVCPFAKGGKVGLFGGAGVGKTVNMMELINNIAKAHSGLSVFAGVGERTREGNDFYHEMAEAKVVDLENPTNSKVAMVYGQMNEPPGNRLRVALTGLTIAEGFRDEGKDVLFFVDNIYRYTLAGTEVSALLGRMPSAVGYQPTLAEEMGRLQERITSTKTGSITSIQAVYVPADDLTDPSPATTFAHLDSTVVLSRDIASLGIYPAVDPLDSTSRQLDPQVVGQEHYETARAVQGTLQRYKELRDIIAILGMDELAPEDKLIVARARKMQRFLSQPFHVAEVFTGSPGKYVSLKDTIKGFKMIASGELDHLPEQAFYMVGTIDEAIEKAKKIN

SEQ ID NO: 43394 - DNA, 1440 bp, Ruminococcus albus
  CDS (1)..(1440): transl_table=11
atggaaagcactaacataggcaagttcgtgcagatagtcggagcggtcgttgacgttcgctttgacaaagaacatatgccgaaccttctaaatgcgcttgagatagacaataacggcaccaagctggtagtcgaggtcgcacagcatatcggtgatgatgtggtcagatgtatcgctatgtcatccacagacggcctcgtaagaggcgttgatgctgtggataccggcagggctatatccgtacccgtaggcagagagacactttcaagaatgttcaacctgctgggcgaccctgttgacaatctgcccgcacccgaaacagctgagcgctgggaaatacatcgtgagccgccctcttatgaggagcagactgccgctaacgagatactggaaacaggcatcaaggtaatagacctgatcgcaccttacctcaaaggcggtaagataggtctgttcggcggtgcaggtgtcggcaagacggttcttattcaggaacttataaacaacgtagccaatcagcacggcggtatatccgtatttacaggcgttggcgagcgtacccgtgagggcaacgacctttactgggaaatgaaagagtcgggagttatcgacaagaccgttctcgtgtacggtcagatgaacgaaccacccggagcaagaatgagagttggtctgtccggtctgactatggcagagtacttccgtgacgttgaaggtcaggacgtactgctgttcatcgataacatattcagattcacacaggcaggttccgaggtttcagcgctgctgggacgtatgccttcagccgttggttatcagcctaccctggcaacagagatgggcgctctgcaggaacgtataacttcgacaaataagggttctatcacttctgtacaggcagtatatgtacctgcggatgacctgacagaccctgcgcctgcaactacattcgcacaccttgacgctactaccgttctttcaagaagcatagcttcgctgggtatattccctgcagtagacccgctggaatccacctcacgtatactaacacccgagatagttggcaacgaacactatcaggtggcaagacaggtacagtccatcctccagagatacgtagagctccaggatatcatcgctatcatgggtatggatgagctttccgatgaggataaactgaccgtatcccgtgcaagaaagatacagcgtttcctttcacagcctttctttgttgctgaacagtttacaggctatcagggcaagtacgtgccgctgaaggaaactatccgcggattcaaggagataatcgaaggcaagcatgatgatctgcccgagagtgcgttcctgttgtcggtactatcgatgaggctgtggaaaaggcaaagaagtccgcagaagaagaataacgaaaggcggaaactatggcagttttcaaattaa

SEQ ID NO: 43395 - protein, 479 aa, Ruminococcus albus
MESTNIGKFVQIVGAVVDVRFDKEHMPNLLNALEIDNNGTKLVVEVAQHIGDDVVRCIAMSSTDGLVRGVDAVDTGRAISVPVGRETLSRMFNLLGDPVDNLPAPETAERWEIHREPPSYEEQTAANEILETGIKVIDLIAPYLKGGKIGLFGGAGVGKTVLIQELINNVANQHGGISVFTGVGERTREGNDLYWEMKESGVIDKTVLVYGQMNEPPGARMRVGLSGLTMAEYFRDVEGQDVLLFIDNIFRFTQAGSEVSALLGRMPSAVGYQPTLATEMGALQERITSTNKGSITSVQAVYVPADDLTDPAPATTFAHLDATTVLSRSIASLGIFPAVDPLESTSRILTPEIVGNEHYQVARQVQSILQRYVELQDIIAIMGMDELSDEDKLTVSRARKIQRFLSQPFFVAEQFTGYQGKYVPLKETIRGFKEIIEGKHDDLPESAFLLSVLSMRLWKRQRSPQKKNNERRKLWQFSN

SEQ ID NO: 43396 - DNA, 1497 bp, Forsythia europaea
  CDS (1)..(1497)
atgagaattaatcctactacttctggttctggggtttccacgcttgaaaaaaaaaacctggggcgtatcgtccaaatcatcggtccggtactagatgtagcctttccgccgggcaagatgcctaatatttataacgctttggtagttaaaggtcgagatactgttggtcaagcaattaatgtgacttgtgaggtacagcaattattaggaaataatcgagttagagctgtagctatgagtgctacagatggtctgatgagaggaatggaagtgattgacacaggagctcctctaagtgttccggtcggtggagcgactctgggacgaattttcaacgtgcttggagagcctgttgataatttaggtcctgtagatactcgtacaacatctcctattcatagatctgcgcctgcctttatacagttagatacaaaattatctatttttgaaacaggaattaaagtagtagatcttttagccccttatcgccgtgggggaaaaatcggactatttggaggagctggagttggtaaaacggtactcattatggaattgattaacaatattgccaaagcccatgggggcgtatccgtatttggcggagtgggtgaacgcactcgtgaaggaaatgatctttacatggaaatgaaagaatctggagtgattaatgaagaaaatattgcagaatccaaagtggctctagtttacggccagatgaatgaaccgcctggagctcgtatgagagttggtttgactgccctaactatggcggaatatttccgagatgttaatgaacaagacgtacttctatttatcgacaatatcttccgtttcgtccaagcaggatccgaagtatcggccttattgggtagaatgccttccgctgtcggttatcaacctaccctgagtaccgaaatgggtactttacaagaaagaattacttctaccaaagaagggtccataacttctattcaagcagtttatgtacctgcagacgatttgaccgaccctgctcctgctacgacatttgcacatttagatgctactaccgtactatcaagaggattagctgccaaagggatctatccagcagtagatcctttagattcaacgtcaaccatgcttcaacctcggatcgttggtgaggaacattatgaaattgcgcaaagagttaagcaaactttacaacgttacaaagagcttcaggacattatagctatccttgggttggacgaattatccgaagaggatcgtttaaccgtagcaagagcgcgaaaaattgagcgtttcttatcacaacctttttttgtagcagaagtatttaccggttctccagggaaatatgttggtctagcagaaaccattagagggtttcaattgatcctttccggagaattagatggtcttcctgaacaggccttttatttggtaggtaatatcgatgaagctaccgcgaaggctatgaacttagaaatggagagcaatttgaagaaatga

SEQ ID NO: 43397 - protein, 498 aa, Forsythia europaea
MRINPTTSGSGVSTLEKKNLGRIVQIIGPVLDVAFPPGKMPNIYNALVVKGRDTVGQAINVTCEVQQLLGNNRVRAVAMSATDGLMRGMEVIDTGAPLSVPVGGATLGRIFNVLGEPVDNLGPVDTRTTSPIHRSAPAFIQLDTKLSIFETGIKVVDLLAPYRRGGKIGLFGGAGVGKTVLIMELINNIAKAHGGVSVFGGVGERTREGNDLYMEMKESGVINEENIAESKVALVYGQMNEPPGARMRVGLTALTMAEYFRDVNEQDVLLFIDNIFRFVQAGSEVSALLGRMPSAVGYQPTLSTEMGTLQERITSTKEGSITSIQAVYVPADDLTDPAPATTFAHLDATTVLSRGLAAKGIYPAVDPLDSTSTMLQPRIVGEEHYEIAQRVKQTLQRYKELQDIIAILGLDELSEEDRLTVARARKIERFLSQPFFVAEVFTGSPGKYVGLAETIRGFQLILSGELDGLPEQAFYLVGNIDEATAKAMNLEMESNLKK

SEQ ID NO: 43398 - DNA, 1578 bp, Pacifastacus leniusculus
  CDS (1)..(1578)
atgttgggagccgctgcgcgcgcctgctcctctgtcctcaaggctgccaagcctgctgtcgcatccttatccctgcagaatggtggggcgaggaccgtgccggccgtgtacaccgcccatcgcaactatgctgccaaggctgaagccgccacccagactggagtggcaactggcaaggttgtggcagtaattggtgctgtggttgatgtccagtttgagggagagttaccacccattttgaattctctggaggtggagaacaggacacccaggctggttcttgaggtggcccagcatcttggagagaacacagtgcggactattgccatggatggaacagagggtctagttcgtggtaatgctgttagggacactggcagccccatttccattcctgttggtccaggaacgcttggccgtattattaatgtaattggcgagcctattgatgagcgtggtcccgttcctacagagttttactctgctattcatgctgaagctcccgatttcgttaatatgtctgttgaacaagagattcttgtaactggcattaaggtggtagacctgcttgccccttactccaagggtggaaagattggtctgtttggtggtgctggtgttggcaagactgtactcatcatggaactgattaacaatgttgccaaggctcatggtggttactctgtatttgctggtgtaggtgaacgcacccgtgaaggcaatgatctctatcatgagatgattgagtctggtgtgatttccttgaaagatgacacctctaaagtatcattggtgtatggtcagatgaatgagcccccaggggcccgtgcccgagttgctctgactggcctaactgtagcagaatacttccgtgatcaagagggacaggatgtgctgctcttcattgacaacattttccgtttcactcaggcaggttctgaagtgtctgctcttcttgggcgtatcccatctgccgtcggctaccagcccactctggccactgacatgggtactatgcaggaaagaattacaaccaccaagaaagggtccatcacatctgtacaagctatatatgtgcctgctgatgacttgactgatccggctcctgctactacttttgctcacttggatgctactaccgtgctgtctcgtggcattgccgagttgggtatctaccctgctgtggatcccctagattctatctcgcgtatcatggaccccaacatcattggtgcagaacactacaatgttgccagagctgtgcaaaagattcttcaggatcataaatcactacaggatattatcgctattttgggtatggatgagttgtcggaggaggataagcttactgttgcacgtgcccgcaagattcagaagttcctgtcccagcccttccaggtggcagaagtgttcactggttattctggaaagtttgtctcactggagaagactattgctagtttcaaggagattttggcgggaaaatatgaccatctgccaaagctgccttctacatgcaggggtgacattcaagatgttcttgagaaggctgagcagttggccactcagggaagctaa

SEQ ID NO: 43399 - protein, 525 aa, Pacifastacus leniusculus
MLGAAARACSSVLKAAKPAVASLSLQNGGARTVPAVYTAHRNYAAKAEAATQTGVATGKVVAVIGAVVDVQFEGELPPILNSLEVENRTPRLVLEVAQHLGENTVRTIAMDGTEGLVRGNAVRDTGSPISIPVGPGTLGRIINVIGEPIDERGPVPTEFYSAIHAEAPDFVNMSVEQEILVTGIKVVDLLAPYSKGGKIGLFGGAGVGKTVLIMELINNVAKAHGGYSVFAGVGERTREGNDLYHEMIESGVISLKDDTSKVSLVYGQMNEPPGARARVALTGLTVAEYFRDQEGQDVLLFIDNIFRFTQAGSEVSALLGRIPSAVGYQPTLATDMGTMQERITTTKKGSITSVQAIYVPADDLTDPAPATTFAHLDATTVLSRGIAELGIYPAVDPLDSISRIMDPNIIGAEHYNVARAVQKILQDHKSLQDIIAILGMDELSEEDKLTVARARKIQKFLSQPFQVAEVFTGYSGKFVSLEKTIASFKEILAGKYDHLPKLPSTCRGDIQDVLEKAEQLATQGS

SEQ ID NO: 43400 - DNA, 1398 bp, Clostridium paradoxum
  CDS (1)..(1398): transl_table=11
atgccagataaaaatgttggtaaagtggttcagataattgggccagtactagacattaaatttagttcagataatttacctaatctacttaatgcaatagagatatatcacgaaggaagaaaaatagttgcagaggtagctcagcatataggtgatgatacagtaagatgtatagctatgagttcaactgatggacttgtaagaggtatagatgctatagatacaggaaatgctatatctgttccagttggaagaaaaacacttggaagaatattcaatgtattaggagatcctgttgataacaagcctgaagttgaagatgctccgaaacttccaatacatagaccagcaccttcatttgaagaccaagaaacagctacagaaattcttgaaacaggaataaaggtagtagaccttatagctccttatgcaaagggaggaaagataggtctatttggaggagcaggtgttggaaaaacagttcttataatggagcttataaacaacatagctaaagagcatggaggtctttcagtattctcaggagttggagaaagaacaagagaaggaaatgacctttatcacgagatgatagattcgggagttatagacaaaacaactcttgtttatggacaaatgaatgagccaccaggagctagaatgagagttgcgttaactggtcttacaatggcagaatattttagagatcaagaagggcaagacgtattattattcatagataatatattcagatttactcaagcaggttctgaagtttcagcacttcttggacgtatgccatcagcggttggttatcagcctacattagctacagaaatgggtgctttacaagagagaattacatctactaaaaagggatctataacttcagttcaagcagtatacgttccagctgacgacttaactgacccagcgccagctacaactttcgctcaccttgatgcaacaacagttttatcaagacaaatagcagcgcttggtatatatccagcagttgatccgctagattctacatcaagaatactagatccaaatatagttggaagagaacattatgaagttgcccgtggagttcagtcggttcttcaaagatataaagaacttcaagatataatagctatacttggtatggatgaactttcagatgaagataaattaatagttgctagagctagaaaaatccaaagattcttatctcaaccatttagcgttgcagaacagtttacaggaatggcaggaaaatatgtaccattaaaagaaactataagaggatttagagaaattcttgaaggaaaacatgatgatttaccagagtctgcattcttatatgttggaactattgatgaggcagtagaaaaggcgaagaagggagagtag

SEQ ID NO: 43401 - protein, 465 aa, Clostridium paradoxum
MPDKNVGKVVQIIGPVLDIKFSSDNLPNLLNAIEIYHEGRKIVAEVAQHIGDDTVRCIAMSSTDGLVRGIDAIDTGNAISVPVGRKTLGRIFNVLGDPVDNKPEVEDAPKLPIHRPAPSFEDQETATEILETGIKVVDLIAPYAKGGKIGLFGGAGVGKTVLIMELINNIAKEHGGLSVFSGVGERTREGNDLYHEMIDSGVIDKTTLVYGQMNEPPGARMRVALTGLTMAEYFRDQEGQDVLLFIDNIFRFTQAGSEVSALLGRMPSAVGYQPTLATEMGALQERITSTKKGSITSVQAVYVPADDLTDPAPATTFAHLDATTVLSRQIAALGIYPAVDPLDSTSRILDPNIVGREHYEVARGVQSVLQRYKELQDIIAILGMDELSDEDKLIVARARKIQRFLSQPFSVAEQFTGMAGKYVPLKETIRGFREILEGKHDDLPESAFLYVGTIDEAVEKAKKGE

SEQ ID NO: 43402 - DNA, 1398 bp, Spiroplasma citri
  CDS (1)..(1398): transl_table=4
atggagaaaaatggaaaagtagtacaagtgttagggcctgttgttgatgtacggtttaccgaagagtatttgcctgaattatataatgctattacggttaataataatggaacaaagttagttttagaagttgttcaacatattggtgatgacaccgtacgggcaattgccctagggccaacagagggaatggttcgggggatggatgttattgatacgaaagctccaattacagtccctgttggtgaagaggttttaggacgaatgtttaatgttcttggagaagcaattgatgaaaaaccacaaccaaaaacaaagttaatgcgtccaattcaccgcgaagcaccatcatatgaagaacaacaaacaacagcggcgattttagaaacaggaattaaagttgttgatttattagttccctttgcaaaaggagggaaaattggtttgtttggtggtgctggagttggaaaaacagtactagtgcaagaactaattaataatgtggcaaaagcacacggaggaatttctgtttttgctggtgtcggtgaacgaacacgagaaggtaatgatttatattatgaaatgattgaagctggcgttattgataaaacagccttagtttttggccaaatgaatgaaacaccaggagctcgtatgcgagttgccttaactggattaacaattgctgaatatttccgtgatgataagaaccaagatgttttattgtttattgataacattttccgttttacccaagctggttctgaagtatcagccttattaggacgaatgccatcagcagttggttatcaaccaactttagcaactgaaatgggagctttgcaagaacgaattacatcaactaaaaaaggaagtattacttctatacaagcagtatatgtaccatcggatgatttaaccgacccagcgccagcaacaacatttgctcatttagatgctaaggttgttttagaccgggaaattgcagcattaggaatttatccggcggtagatccactaggaagttcatcacggttattagaccccttagtggttggtgaagaacattatgaagtagcgcgaggagtacaagaaattttacaaaaatttaaagaattgcaatcaattattgcaattttaggaatggatgaattatcagatgaagataaattagctgttgcaagagcacgaaaaattcgtaactttttatcacaatcattttttgtagctgaaaagttttctggaaaaacaggaaaatatgtccctgtggtagaaacaattcgtgcttttaaagaaatcttaacaggaaagtatgatgatttaccagaacaagcattcttatatgttggaacaattgatgaggttgttaaagtggctgaagctttaaaacataattaa

SEQ ID NO: 43403 - protein, 465 aa, Spiroplasma citri
MEKNGKVVQVLGPVVDVRFTEEYLPELYNAITVNNNGTKLVLEVVQHIGDDTVRAIALGPTEGMVRGMDVIDTKAPITVPVGEEVLGRMFNVLGEAIDEKPQPKTKLMRPIHREAPSYEEQQTTAAILETGIKVVDLLVPFAKGGKIGLFGGAGVGKTVLVQELINNVAKAHGGISVFAGVGERTREGNDLYYEMIEAGVIDKTALVFGQMNETPGARMRVALTGLTIAEYFRDDKNQDVLLFIDNIFRFTQAGSEVSALLGRMPSAVGYQPTLATEMGALQERITSTKKGSITSIQAVYVPSDDLTDPAPATTFAHLDAKVVLDREIAALGIYPAVDPLGSSSRLLDPLVVGEEHYEVARGVQEILQKFKELQSIIAILGMDELSDEDKLAVARARKIRNFLSQSFFVAEKFSGKTGKYVPVVETIRAFKEILTGKYDDLPEQAFLYVGTIDEVVKVAEALKHN

SEQ ID NO: 43404 - DNA, 1566 bp, Acyrthosiphon pisum
  CDS (1)..(1566)
atgttgaacgcgttgtccagggcggccattggggccctgaaggccggcaagagcaacctcacgccgaaaatcgtgcaaaatgagctaccaaaagccatggtcgccacctcttccaattccaacaacaaagctgctgccaagccaatggctggtacatcacaaggacgtattgttgctgttattggtgccgttgttgatgtgcaattcgacgaagaactaccccccatcctcaatgctcttgaagtacaaaacaggtctccacgtcttgtacttgaagttgcccagcatttgggtgaaaatactgtcagaactattgctatggatggtactgaaggtcttgtcagaggacaagaagtacttgactgtggatccccaatcagaattccagttggtgctgaaactttaggtcgcatcattaatgtcattggtgaaccaattgatgagagaggccccattgacactgataagactgcacccattcacgctgaagcacctccttttgttgaaatgagtgttgaacaagaaattttggtcactggaatcaaagttgtagatttattggccccttacgtaaagggaggaaaaattggtttgttcggaggtgccggagtaggaaaaactgtattgattatggaactgatcaacaacgttgctaaggctcatggtggttactcagtattcgctggtgtaggagaaagaacacgtgaaggtaatgacttgtaccatgaaatgattgaatctggtgtaatttccctcaaggacaaaacctcaaaggtagcgttggtatatggtcagatgaatgaacctcccggcgctcgtgcccgtgttgctcttactggtcttaccgttgctgaatacttcagagatcaagaaggacaagatgtattgcttttcattgacaatattttccgtttcacccaagctggttctgaagtatctgctttgttgggtcgtatcccatctgctgtaggttatcaaccaactttggccactgacatgggtactatgcaggagagaattaccacaaccagcaaaggatccattacctcagtacaggctatctacgtacctgctgacgatttaactgatcctgctccagctacaacttttgcccatttagatgccaccactgtattgtctcgtgctatcgctgagttgggtatctacccagctgtagatccattggattccacatcccgtattatggaccccaacgttattggggatgaacattacaacgttgctcgtggagtacagaaaatattacaagactacaaatcactacaagatatcattgctatcttgggtatggatgaactctcggaagaagacaaattgacagttgccagggctaggaaaatccagaggttcttgtcccaacctttccaagtagctgaggtctttactggacatcctggaaaattggttcctcttgaagaaacaatcgaaggattttcaaaaatcttagctggtgattacgatcatttgcccgaaattgcgttctacatggttggacccattgaagaagtagttgctaaagctgaaactttggccaaaaatacataa

SEQ ID NO: 43405 - protein, 521 aa, Acyrthosiphon pisum
MLNALSRAAIGALKAGKSNLTPKIVQNELPKAMVATSSNSNNKAAAKPMAGTSQGRIVAVIGAVVDVQFDEELPPILNALEVQNRSPRLVLEVAQHLGENTVRTIAMDGTEGLVRGQEVLDCGSPIRIPVGAETLGRIINVIGEPIDERGPIDTDKTAPIHAEAPPFVEMSVEQEILVTGIKVVDLLAPYVKGGKIGLFGGAGVGKTVLIMELINNVAKAHGGYSVFAGVGERTREGNDLYHEMIESGVISLKDKTSKVALVYGQMNEPPGARARVALTGLTVAEYFRDQEGQDVLLFIDNIFRFTQAGSEVSALLGRIPSAVGYQPTLATDMGTMQERITTTSKGSITSVQAIYVPADDLTDPAPATTFAHLDATTVLSRAIAELGIYPAVDPLDSTSRIMDPNVIGDEHYNVARGVQKILQDYKSLQDIIAILGMDELSEEDKLTVARARKIQRFLSQPFQVAEVFTGHPGKLVPLEETIEGFSKILAGDYDHLPEIAFYMVGPIEEVVAKAETLAKNT

SEQ ID NO: 43406 - DNA, 1572 bp, Pinctada fucata
  CDS (1)..(1572)
atgatgcatgcagtgagacgagcgtgtgccggggtctttaagacctcgaatagctttattggaacaacttcaaacacatgctcgcacgcaaaagtcataccttcatatttatctacccgaaggcactatgcagcggaacccaaggcagcggcagctaccacgcccggaaaagtggtctctgtcatcggagctgtcgtagacgtacaatttgaggacagtctacctcccattctcaatgccttagaagttaaaaatagaaagcccaggctcatcctggaagtagcgcagcatttaggtgagaacacagtaagaaccattgctatggacggtacagagggagtcgttcgtggtatggagtgtatagactctggtttccccatcaggatccctgtaggaccagctaccttaggaagaattataaatgtcattggtgaacccattgatgaaaggggcccagtacaaactgacaaattactgccaattcacgctgaagccccagaatttgtagaaatgagtgtagaacaagagatcttagaaaccggaatcaaagttgtagacttgcttgctccttatgccaagggaggtaaaattggtctgtttggaggagcaggagtgggtaagactgtattgattatggaactgattaacaatgtagccaaagctcacggaggttactctgtgtttgccggtgtcggagagagaacacgtgaaggaaacgatctctaccacgaaatgatcacgtctaaagtcatcagcttgacagatgatacctcaaaggtatcgctggtatacggacagatgaacgagcccccaggcgcccgtgctcgtgtcgctctcactggacttactgtagccgaatatttccgtgatcaagaaggacaggacgtgctgcttttcattgacaacattttccgtttcacccaggccggttcagaggtgtccgctttgttaggacgtatcccctctgccgtaggttaccaacccactctggccactgacatgggtaccatgcaggaaagaattaccacaaccaagaaaggatccatcacatctgtacaggctatctacgtgcccgctgacgatttgacagatcctgccccagccacaacattcgctcacttggacgccaccactgtattgtcccgtggtatctcagagttgggtatctacccagctgtcggtccccttgattctacatcacgtatcttagatcccaatgttgtaggacaggaacattacagagtagcccgtggtgtacagaaaatcttacaggacttcagatcacttcaggatatcattgctattttgggtatggatgaattgtccgaggaagacaaattaaccgtcaccagagccagaaaaattcagagattcttgtcacaacctttccaggtcgctgaagttttcacaggatcagcaggaaaatatgtgccactcaaggaaaccatcttagggttccaacagattcttcaaggtgactacgatcatttgcctgaggtagctttctacatggtgggtaacatcgaagaagtcgtacaaaaggcagaaagactggccgaggagcagtcataa

SEQ ID NO: 43407 - protein, 523 aa, Pinctada fucata
MMHAVRRACAGVFKTSNSFIGTTSNTCSHAKVIPSYLSTRRHYAAEPKAAAATTPGKVVSVIGAVVDVQFEDSLPPILNALEVKNRKPRLILEVAQHLGENTVRTIAMDGTEGVVRGMECIDSGFPIRIPVGPATLGRIINVIGEPIDERGPVQTDKLLPIHAEAPEFVEMSVEQEILETGIKVVDLLAPYAKGGKIGLFGGAGVGKTVLIMELINNVAKAHGGYSVFAGVGERTREGNDLYHEMITSKVISLTDDTSKVSLVYGQMNEPPGARARVALTGLTVAEYFRDQEGQDVLLFIDNIFRFTQAGSEVSALLGRIPSAVGYQPTLATDMGTMQERITTTKKGSITSVQAIYVPADDLTDPAPATTFAHLDATTVLSRGISELGIYPAVGPLDSTSRILDPNVVGQEHYRVARGVQKILQDFRSLQDIIAILGMDELSEEDKLTVTRARKIQRFLSQPFQVAEVFTGSAGKYVPLKETILGFQQILQGDYDHLPEVAFYMVGNIEEVVQKAERLAEEQS

SEQ ID NO: 43408 - DNA, 1554 bp, Aspergillus oryzae
  CDS (1)..(1554)
atgttcaagagcggtcttgcccggaccttcgggagggctgcttttgcccggcctaccccggtcgcccgtcgcgttccctccaagatcaatgccttcccttcccttgccaggttggccagcactgaggccggcgctaccggcaaggttcaccaggtcattggtgccgtcgttgacgtgaagttcgagggtgagaagctccctgccattctcaacgccattgagaccgagaacaatggccagaagctcgtccttgaggtttctcaacacttgggtgagaacgtcgtccgtactattgctatggagggtaccgagggtttgactcgtggtgccgctgctcgcgacactggtgctcccatcaccatccctgtcggtcctggcacccttggccgtatcctcaacgtcactggtgaccccgtcgacgagcgtggtcccgtcaaggccaccaagtacgcccctatccacgccgaggctcccgagttcgttgagcagtccactgagggtgagattcttgtcactggtatcaaggtcgtcgacctgcttgccccctacgcccgtggtggtaagattggtctcttcggtggtgccggtgtcggtaagaccgtgttcattcaggagttgattaacaacattgccaaggctcacggtggttactctgtcttcactggtgtcggtgagcgtacccgtgagggtaacgatctgtaccacgaaatgcaggagactggtgtcattcagctcgagggtgaatctaaggtcgcccttgtcttcggtcagatgaacgagcccccaggtgcccgtgcacgtgtcgcccttaccggtctgaccatcgccgagtacttccgtgacgaggaaggtcaggatgtgctgctcttcattgacaacattttccgtttcacccaggccggttctgaggtgtctgcccttcttggtcgtatcccctccgctgtcggttaccagcccactctggccgtcgacatgggtggtatgcaggagcgtattaccaccaccaccaagggttccattacctccgtccaggccgtctacgtccctgctgacgatttgactgaccctgcccccgccaccaccttcgctcacttggacgccaccactgtcttgtcccgtggtatctccgagttgggtatctatcctgctgtcgaccctcttgactccaagtctcgtatgctcgacccccgtattgtcggtcaggaccactacgacaccgccacccgtgtccagcagatgctccaggagtacaagtccctccaggatatcattgccattctgggtatggacgaactttctgaggctgataagctcactgtcgagcgtgcccgtaagcttcagcgtttcctgagccagcctttcaccgtcgcccaggtcttcactggtatcgagggtaagctggtcgacctcaaggacaccatccgctccttcaaggccatcatcaacggagaggctgatgaccttcccgaggctgctttctacatggttggtgacctcgagtccgcccgtgccaagggtgagaagctcctggccgagctcgagaacaaggcctaa

SEQ ID NO: 43409 - protein, 517 aa, Aspergillus oryzae
MFKSGLARTFGRAAFARPTPVARRVPSKINAFPSLARLASTEAGATGKVHQVIGAVVDVKFEGEKLPAILNAIETENNGQKLVLEVSQHLGENVVRTIAMEGTEGLTRGAAARDTGAPITIPVGPGTLGRILNVTGDPVDERGPVKATKYAPIHAEAPEFVEQSTEGEILVTGIKVVDLLAPYARGGKIGLFGGAGVGKTVFIQELINNIAKAHGGYSVFTGVGERTREGNDLYHEMQETGVIQLEGESKVALVFGQMNEPPGARARVALTGLTIAEYFRDEEGQDVLLFIDNIFRFTQAGSEVSALLGRIPSAVGYQPTLAVDMGGMQERITTTTKGSITSVQAVYVPADDLTDPAPATTFAHLDATTVLSRGISELGIYPAVDPLDSKSRMLDPRIVGQDHYDTATRVQQMLQEYKSLQDIIAILGMDELSEADKLTVERARKLQRFLSQPFTVAQVFTGIEGKLVDLKDTIRSFKAIINGEADDLPEAAFYMVGDLESARAKGEKLLAELENKA

SEQ ID NO: 43410 - DNA, 1455 bp, Tetraselmis suecica
  CDS (1)..(1455)
atgagcgttgctacagaaacaaaaaatattggccgaattagccagattatcggcccagttgttgatgttacgttcccagctgggaatatgccaaatatttataattccttaactattgttggaaaaaatcaatcaggcgaagaaatttctgttacttgtgaagtacaacaattattaggcgatcattgtgttcgtgccgtatctatgagtgctaccgatggtttaatgcgtgggatggacgttattgataatggggcgccattaactgttccggttggcaaacccacattagggcgtatctttaatgttcttggtcaaccggttgataacttaggcccagtagattcaacagatggattaacaatccaccgaacggctcctgcatttgttgacttagatacaaaattagcgatttttgaaacaggcattaaagttgtcgatttattagctccttaccgccgtggcggtaaaattggtttatttgggggtgctggagttggcaaaaccgttttaattatggaacttattaacaatattgctaaagctcatggcggggtttctgtatttggtggtgttggagagcgtactcgtgaaggaaatgacctttatatggaaatgaaagagtcgggcgtaattaaagaatccaatttaaccgaatctaaagttgctttagtatacggccaaatgaatgagccaccaggagcccgtatgcgtgttggtctaacagcattaacaatggcagaatattttcgagatattaataaacaagatgttttattatttattgataatattttccgttttgtacaagcaggggctgaagtatcagcgttattaggccgtatgccatcagctgtaggatatcagccaacactagcgactgaaatgggtggtttacaagaacgtattacttccacaaaagatggttcaattacctcaatccaagctgtatatgtaccagcagatgatttaacagacccagccccagctacaacattcgctcacttagatgctacaactgtattatcacgagggttagcatcaaaaggaatttacccagctgtagatccgttagattcaacatcaacaatgctacaaccatggattttaggtgaagaacattactcatgtgcacaaaatgtaaaacaaacacttcaacgatataaagaacttcaagatattattgctattttaggtttagatgagttatctgaagaagaccgccaaattgtagctcgtgctcgaaaaattgaaagatttttatcacaaccattctttgtagccgaagtttttacaggctcacctggcaaatatgtaagtttagcagaaacaattcaaggctttactttaattttaacaggtgaattagatgatttgccagaacaggcattttacctagtaggaaatattgaggaagctattgaaaaagctgaaactctaaaatcaaaaagttaa

SEQ ID NO: 43411 - protein, 484 aa, Tetraselmis suecica
MSVATETKNIGRISQIIGPVVDVTFPAGNMPNIYNSLTIVGKNQSGEEISVTCEVQQLLGDHCVRAVSMSATDGLMRGMDVIDNGAPLTVPVGKPTLGRIFNVLGQPVDNLGPVDSTDGLTIHRTAPAFVDLDTKLAIFETGIKVVDLLAPYRRGGKIGLFGGAGVGKTVLIMELINNIAKAHGGVSVFGGVGERTREGNDLYMEMKESGVIKESNLTESKVALVYGQMNEPPGARMRVGLTALTMAEYFRDINKQDVLLFIDNIFRFVQAGAEVSALLGRMPSAVGYQPTLATEMGGLQERITSTKDGSITSIQAVYVPADDLTDPAPATTFAHLDATTVLSRGLASKGIYPAVDPLDSTSTMLQPWILGEEHYSCAQNVKQTLQRYKELQDIIAILGLDELSEEDRQIVARARKIERFLSQPFFVAEVFTGSPGKYVSLAETIQGFTLILTGELDDLPEQAFYLVGNIEEAIEKAETLKSKS

SEQ ID NO: 43412 - DNA, 1407 bp, Thiobacillus ferrooxidans
  CDS (1)..(1407): transl_table=11
atgagcgaacggtgcaaagaaaacgccgtcggccatatcgtccaggtgatcgggccggggatcgatatcgccttttctcgcgggcaggtccccgagattatggaagctattgtggtcgacgcaaacaatctgaccatcgaggtgcaggcccagttgggtgacggcgtggcgcgcggtatcgccatggggctcagcgaaggcctcaaacgcgggctggccgtcactcgtaccggtgcgccgatcagtgtgccggtagggcatgctaccctgggccggatcatgaacgtcctgggtgaaccggtagatggcaaaggacccgtgcagacgcaagatcgccaggccatccatcgcccggcgccggcctttgatgaacttgcggcaagcaccgaggtgctggagaccggcatcaaggtcatcgatctggtctgtcctttcgccaaaggcggtaaggtcggtctcttcggcggcgccggcgtgggcaagacggtgttcatgatggagatgatccgcaacatcgctatcgagcataccggatattcggtgtgtgcaggcgtcggcgagcggactcgtgaagggaacgacttttaccatgaaatgaccgactccggcgttttggacaaggtcgccctggtaaacgggcagatgaacgagccgccccgcaaccgtttgcgcgccgggttgaccggcctgaccatggcggcgagcttccgtgatgaaggtcgcgacattttgatgttcatcgataacattttccgctatacgctggcaggcaccgaagtctcggcgctgctggggcgtatgccttctgcggtgggctatcagccaacgctggctgaagaaatgggccagttgcaggagcgtatcacttccaccaaggtgggttccatcacctcggtgcaggctgtttacgtgcccgcggattatctcaccgatccttctccggcgacgacctttgcccacttggacgccacggtagtgttgtcgcggcagattgcggaactgggcatctaccccgcgctcgatccgctcgattctttcagccgtcagctcgatccgcagatcgttggccaagagcactatgatgtggctcgttcctgccagaagacgttgcagccgtacaaggaattgcaggatatcattgccattctgggcatggatgaattgtctgaggacgacaaactgctggtgtcgcgggcacgcaagattcagcgctatctgtcccagcctttctttgtcgctgaagtgttcaccggcagccccggtacctatgtctccctgaaggaaacgatccgtgcattcaaggcgatcgtggcaggagagtatgaccacctgcccgagcaggccttctacatggtcggcaccatagatgaagcccttgccaaggcccaaaagctgcagcaaggctaa

SEQ ID NO: 43413 - protein, 468 aa, Thiobacillus ferrooxidans
MSERCKENAVGHIVQVIGPGIDIAFSRGQVPEIMEAIVVDANNLTIEVQAQLGDGVARGIAMGLSEGLKRGLAVTRTGAPISVPVGHATLGRIMNVLGEPVDGKGPVQTQDRQAIHRPAPAFDELAASTEVLETGIKVIDLVCPFAKGGKVGLFGGAGVGKTVFMMEMIRNIAIEHTGYSVCAGVGERTREGNDFYHEMTDSGVLDKVALVNGQMNEPPRNRLRAGLTGLTMAASFRDEGRDILMFIDNIFRYTLAGTEVSALLGRMPSAVGYQPTLAEEMGQLQERITSTKVGSITSVQAVYVPADYLTDPSPATTFAHLDATVVLSRQIAELGIYPALDPLDSFSRQLDPQIVGQEHYDVARSCQKTLQPYKELQDIIAILGMDELSEDDKLLVSRARKIQRYLSQPFFVAEVFTGSPGTYVSLKETIRAFKAIVAGEYDHLPEQAFYMVGTIDEALAKAQKLQQG

SEQ ID NO: 43414 - DNA, 1950 bp, Zygosaccharomyces rouxii
  CDS (342)..(1862)
gcacgtgactcacgatacccctttttcgctagccgccgaggtagttaccctccttcgtatccgccaatcagatctcacaaactagaaatgcccaacaccacagccaatagcagcagagaaaaacctttttctatattttttttcagaaaaggcaccaaccgccgcgttctgagctcgacggtgtatggcatagggaaagtcttacacttacttataacatattacaatctcctttaacacaagtaactttaaaaacacaattctcgattgctgttagttgagttttggaaaactagagagttgcattaaattcctctagatcataagattctcagtaaaagatggtcttacccaagcttttccccgcttcctctcgtgcagcattgcaagctgcccgtcgttcggttccattcaccggtttcagaggtttagcctctgctgctgctgcttctaccggtaaggtcagagctgttattggtgccgtcgtggatgttcaattcgaccaagaaaacttgccagaaattttgaatgccctagagattgagagacctcaaggaaaattggttttggaagttgctcaacatttgggtgaaaacactgttagagcaattgccatggatggtaccagtggtctagtccgtggtgctgctgttaccgataccggtgccccaatttctgtcccagtcgataaggagactctgggtagaattatcaacgttatcggtgagccaatcgatgaagctggtccaattaacactaaggaaagaagaccaattcacgctgagccaccttccttcgttgaccaatccactaactccgaagttttggaaaccggtatcaaggtcgtcgacttgttggctccttacgctagaggtggtaagattggtcttttcggtggtgctggtgtcggtaaaaccgtgttcatccaagaattgattaacaacattgccaaggcacacggtggtttctcagttttcaccggtgtcggtgaaagaaccagagaaggtaacgatttgtaccgtgaaatgatggaaactggtgtcattgacttgaagggtgactccaaggtggccttggttttcggtcaaatgaacgaaccaccaggagccagagctagagttgctctaactggtttgaccgttgccgaatatttcagagatgaagaaggtcaagatgtcttgcttttcatcgataacattttcagatttactcaagctggttccgaagtgtctgcccttttgggtcgtattccatctgctgtcgcttaccaaccaactttgtccactgatatgggtgccttgcaagaaagaattgcaaccactcaaaagggttccgttacctctgtgcaagccgtttacgtgccagcagatgatttgactgatcctgcccctgctaccacttttgcccacttggacgccaccaccgtgttgtccagaggtatctctgaattgggtatctacccagccgtggatccattggattccaaatcccgtttgttggatgcctccatcgtcggtgaagaacactacaacattgcatctgacgttcaaatgactctacaagcctacaaatctttgcaagatatcattgccattttgggtatggacgaattgtctgaacaagacaagctaactgtggaaagagccagaaagattcaaagattcttgtctcaaccatttgctactgctcaagttttcaccggtatcgaaggtaagttggttagattgaaggacactattagatctttcaaggaagttttggacggtaaatacgaccacttgccagaaaatgccttctacatggttggtggtatcgaagatgttatcgcaaaggctgaaaaattggctgccggtggtaactaaagttaagattcattgaacaacaaacgatctggtggtctttaatgtgacttgttaaaagatacgtactttttatattcgattacagggc

SEQ ID NO: 43415 - protein, 506 aa, Zygosaccharomyces rouxii
MVLPKLFPASSRAALQAARRSVPFTGFRGLASAAAASTGKVRAVIGAVVDVQFDQENLPEILNALEIERPQGKLVLEVAQHLGENTVRAIAMDGTSGLVRGAAVTDTGAPISVPVDKETLGRIINVIGEPIDEAGPINTKERRPIHAEPPSFVDQSTNSEVLETGIKVVDLLAPYARGGKIGLFGGAGVGKTVFIQELINNIAKAHGGFSVFTGVGERTREGNDLYREMMETGVIDLKGDSKVALVFGQMNEPPGARARVALTGLTVAEYFRDEEGQDVLLFIDNIFRFTQAGSEVSALLGRIPSAVAYQPTLSTDMGALQERIATTQKGSVTSVQAVYVPADDLTDPAPATTFAHLDATTVLSRGISELGIYPAVDPLDSKSRLLDASIVGEEHYNIASDVQMTLQAYKSLQDIIAILGMDELSEQDKLTVERARKIQRFLSQPFATAQVFTGIEGKLVRLKDTIRSFKEVLDGKYDHLPENAFYMVGGIEDVIAKAEKLAAGGN

SEQ ID NO: 43416 - DNA, 1413 bp, Pediococcus parvulus
  CDS (1)..(1413): transl_table=11
atgagtactggtaaagttgtccaagttatcggacctgttgttgatgttgaatttcctctggatggtaatttacctgatattaataatgctttaaacgtcaagaaaccagacggcagtattttggttgctgaagtcgctcttgaacttggagacggcgttgtgcgaacaattgctatggatggtactgatggtttacaacgtggattggaagttgaagatactggttcttcaatcacagttccagttggtgataaaacattaggtcgggttttcaacgtccttggagaaacaattgataatggtgaaaaatttggacccgaagtaaaacgtaatcctattcatcgggatccacctaagtatgatgacctaaaccctagtatggaaattttggaaacaggaatcaaagttattgatttgctggctccgtatatccgtggtggtaaggttggactattcggtggtgccggtgttggtaaaactgttttaattcaggaattaattcataatattgcacaagaacacaatggtatttctgtatttacgggtgttggtgaacgaactcgtgaaggaaatgacttgtattttgaaatgaaggcatcgggtgttcttgaaaagaccgccatggtgtatggtcagatgaacgagccgcctggtgcgcgtatgcgggttgctttgactggtttaacattggcggaatatttccgtgatgttgaaggacaagatgtgttattatttatcgataacattttccggttcacacaagccggttctgaagtatccgcattgcttggtcgtattccttctgccgttggttatcaaccaacactggctactgaaatgggtcagttgcaggaacgaattacttcaaccaagaagggatcaattacttcgattcaggccgtttatgtgcctgccgatgattatactgatcccgcccctgccacaaccttcgcccatttggatgccacaactaacttggaacgtagcttaacgcaacaaggaatttatcccgctgttgatccgttggcttctacttcaagtgcgttggatccatctgtcgttggtgaggaacattacaaagtggcaacagatgttcagcatgtgttgcaacgctatcgtgagttgcaagatatcatttctattttaggaatggatgaattatctgacgaagaaaaaacgattgtcgctcgtgctcgtcgaatccaattcttcctatcacaaaacttctcagttgcggaacagtttactggtcaaccaggttcttatgttcctgttgaagaaacagtaaaaggtttcaaagaaattcttgaaggtaagtacgatgatttacctgaggatgctttccgtcaggtcggaaatattgatgaagttgttgaaaaggcgaagaagttaactagtgctgcaagtaaataa

SEQ ID NO: 43417 - protein, 470 aa, Pediococcus parvulus
MSTGKVVQVIGPVVDVEFPLDGNLPDINNALNVKKPDGSILVAEVALELGDGVVRTIAMDGTDGLQRGLEVEDTGSSITVPVGDKTLGRVFNVLGETIDNGEKFGPEVKRNPIHRDPPKYDDLNPSMEILETGIKVIDLLAPYIRGGKVGLFGGAGVGKTVLIQELIHNIAQEHNGISVFTGVGERTREGNDLYFEMKASGVLEKTAMVYGQMNEPPGARMRVALTGLTLAEYFRDVEGQDVLLFIDNIFRFTQAGSEVSALLGRIPSAVGYQPTLATEMGQLQERITSTKKGSITSIQAVYVPADDYTDPAPATTFAHLDATTNLERSLTQQGIYPAVDPLASTSSALDPSVVGEEHYKVATDVQHVLQRYRELQDIISILGMDELSDEEKTIVARARRIQFFLSQNFSVAEQFTGQPGSYVPVEETVKGFKEILEGKYDDLPEDAFRQVGNIDEVVEKAKKLTSAASK

SEQ ID NO: 43418 - DNA, 1446 bp, Lactobacillus hilgardii
  CDS (1)..(1446): transl_table=11
atgagtactggtaaagttttacaagttatcggaccagttgttgacgttgaattctccttgaacgacaaattaccagaaattaacactgccttaaatgttcatgtaagtgacgataaaacacttgttgttgaagttgcacttgatttaggtgatggtgttgtgcgaacgatcgcgatggatggaaccgatggtcttcgtcgtggaatggaagttgaaaatactgaatcctccattagtgttcctgttggtaatgacacacttggtcgtgtgtttaatgttcttggagaaccaattgatggcggtccagaatttggcccagacgcagaacgttggccgattcaccgtgaggccccgaagtatgatgaattaaacccatcaactgaaattttggaaaccggaattaaggttatcgatttattggaaccatacattcgtggtggtaaagttggattgttcggtggtgccggtgttggtaaaaccgttttaattcaggaattgattcataacatcgcacaaggacacaatggtatttcagtgtttaccggtgttggtgaacgaacccgtgaaggtaatgatatgtattacgaaatgaaaggatcaggagttcttgccaagactgccatggtttatggtcaaatgaacgagcctcctggtgcgcgtatgcgtgttgccttaacaggattaacgattgcagagtacttccgtgatgaagctggacaagatgttctgctatttattgataacattttccgatttactcaagctggttcagaagtttcagctttgctgggacgtattccatcagctgttggttatcaaccgacgctggctactgaaatgggtcaattgcaagagcgaattacttctactaagaagggtgcgattacatctattcaagccgtttatgtgcctgccgatgattataccgaccctgcaccagcaacgacgtttgcccatttggatgccacaactaacttggaacgttcattaacacaacaaggtatttatccagctgttgatccgttggcttcaacatcgtcagccttggatccacaaattgttggccaagaacattatgatgtggctactgaagtccaacacgttttacaacgttaccgtgaattgcaagatatcatttcaattcttggtatggatgaattgtccgacgaagaaaaaacaattgttaaccgtgcccgaagaattcaatttttcctttcacaaagcttctcagttgctgaacaatttacgggtcttcctggtaaatatgtatcagttactgatacagttaagggatttaaagacattcttgacggtaaatacgatgacattccagaagatgcgttccgtaattgtggaccaatcgaagatgttattgctaatgctaagaggttacaaggtaactcaactgcagacacaagtgatgaaaagcaaagtgcagcaaactaa

SEQ ID NO: 43419 - protein, 481 aa, Lactobacillus hilgardii
MSTGKVLQVIGPVVDVEFSLNDKLPEINTALNVHVSDDKTLVVEVALDLGDGVVRTIAMDGTDGLRRGMEVENTESSISVPVGNDTLGRVFNVLGEPIDGGPEFGPDAERWPIHREAPKYDELNPSTEILETGIKVIDLLEPYIRGGKVGLFGGAGVGKTVLIQELIHNIAQGHNGISVFTGVGERTREGNDMYYEMKGSGVLAKTAMVYGQMNEPPGARMRVALTGLTIAEYFRDEAGQDVLLFIDNIFRFTQAGSEVSALLGRIPSAVGYQPTLATEMGQLQERITSTKKGAITSIQAVYVPADDYTDPAPATTFAHLDATTNLERSLTQQGIYPAVDPLASTSSALDPQIVGQEHYDVATEVQHVLQRYRELQDIISILGMDELSDEEKTIVNRARRIQFFLSQSFSVAEQFTGLPGKYVSVTDTVKGFKDILDGKYDDIPEDAFRNCGPIEDVIANAKRLQGNSTADTSDEKQSAAN

SEQ ID NO: 43420 - DNA, 1407 bp, Thermotoga neapolitana
  CDS (1)..(1407): transl_table=11
atggcaaagggttcaaaaggatacatagtgggagtgatggggcccgtcgtggatgtgaagttccccgaagaagaacttccagacatattcaacgcccttgaggtcgtgaatcctcaaacggggcagaagattgttcttgaagtagaacaactcataggagacggtgtcgtgagaacggtggcgatggactccaccgatgggctcatgaagggtctggaagtggttgatacgggtgaaccaattaccgctcccgtgggaaaagaagtactcggaagaatactgaacgttataggagagcccgtggacgaagccggcgagataaagtcgaaggaaaggtggccgatccacaggcctgctcctgaacttatagaacagtccaccgagatcgaaatcctcgagacggggataaaagttatcgatctgcttgcaccgtttccaaagggtggaaaaataggtttcttcggtggtgcaggtgttggtaaaaccgtgctcgttatggaattgatcagaaacatcgctatagagcataagggattttccgtgttcgcgggtgttggtgagaggacaagagagggaaacgaactctggcttgaaatgcaggaaagcggcgttcttggtaacactatcctcgtcttcggacagatgaacgaaccaccgggggcaaggttcagggttgccttgaccgcgctcacaatagccgaatacttcagggacgttgaaggaagagacgttcttctcttcatagacaacatattcaggttcgttcaggcgggaagtgaggtttctgctttgcttggaagaatgccgtccgcagttggttatcagcccacccttgcaaccgacatgggagagctccaggagagaatcacctcgaccaggagaggatccatcacttccgttcaggccatttacgtacccgcagacgacataactgatcctgcccccgcaaccaccttcgctcacctggatgcgaccgtcgttctgtcaagaagaatagcagagctcgggctttaccctgctgttgacccgctcgattcttcttcgaagatactcgatcccgctgtcgttggaagagaacactacgaagtggcaagaggtgttcaggaagtactccagaggtacaaggacctgcaggatatcatagccatcctcggtgtaaaggagttgtctccggaggacaaactcgttgttcaccgcgcaaggagaattcagaggttcttgagtcagcctttccacgttgctgaaaggttcacaggaagacccggtaaatacgttcctcttgaggagacgatcagaggtttcaaagagatcctcgatggaaagcttgacgatgtccctgaacaggcgtttctcatggccggaaccatcgacgaagtcaaagagcgcgctaaagagatgaggagttga

SEQ ID NO: 43421 - protein, 468 aa, Thermotoga neapolitana
MAKGSKGYIVGVMGPVVDVKFPEEELPDIFNALEVVNPQTGQKIVLEVEQLIGDGVVRTVAMDSTDGLMKGLEVVDTGEPITAPVGKEVLGRILNVIGEPVDEAGEIKSKERWPIHRPAPELIEQSTEIEILETGIKVIDLLAPFPKGGKIGFFGGAGVGKTVLVMELIRNIAIEHKGFSVFAGVGERTREGNELWLEMQESGVLGNTILVFGQMNEPPGARFRVALTALTIAEYFRDVEGRDVLLFIDNIFRFVQAGSEVSALLGRMPSAVGYQPTLATDMGELQERITSTRRGSITSVQAIYVPADDITDPAPATTFAHLDATVVLSRRIAELGLYPAVDPLDSSSKILDPAVVGREHYEVARGVQEVLQRYKDLQDIIAILGVKELSPEDKLVVHRARRIQRFLSQPFHVAERFTGRPGKYVPLEETIRGFKEILDGKLDDVPEQAFLMAGTIDEVKERAKEMRS

SEQ ID NO: 43422 - DNA, 1473 bp, Evolvulus glomeratus
  CDS (1)..(1473)
atgcgcatcaaccctactacttctagttctcaggtttccacgattgaaaaaaaaaacctagggcgtatcgtccaaatcattggtccggtactagatgtagcttttcctcccggtaagatgcctaatatttataatgctctggtagttcaagggcgagacaatgaacaaatgaacgtcgcttgcgaggtacagcaattattgggaaataatcgagtgagagctgtagctatgagtgatacagatggtctaatgagaggcatggaagtgattgacacgggaactcctataagtgttcccgttggtggagcgactctgggacgaattttcaatgtgcttggaaaacctgttgataatttgggtcctgtagatactaaaacaacgtctcctattcatagatctgcgcccgcctttatacagttagatacaaaattatctatttttgaaaccggaattaaagtagtagatcttttagccccttatcgccgtggaggaaaaatcggactattcgggggagctggagtcgggaaaacagtactcattatggaattgattaacaatatagccaaagctcacgggggagtatccgtatttggcggagtgggtgaacgtactcgtgaaggaaatgatctttacatggaaatgaaagaatccggagtgattaatgaagaaaatattgcagaatcaaaagtggctctagtttacggtcagatgaatgaaccaccgggagctcgtatgagagttggtttgactgccctaactatggcagaatatttccgagatgttaatgagcaagacgtacttttatttatcgacaatatctttcgttttgtccaagcgggatcagaagtatcggccttactgggtagaatgccttccgctgtgggttatcaaccgaccctgagtaccgaaatgggttctttacaagaaagaattacttccaccaaagagggttctataacctcgattcaagcagtttatgtacctgcagatgatttgaccgatcctgctcctgctacgacatttgcgcatttagatgcgactaccgtattatcaagaggtttagctgccaaaggtatctatccagcagtagatcctttagattcaacgtcaacgatgcttcaacctaggatagttggtgaggaacattatgaaaccgcgcaaagagttaagcaaactttacaacgttacaaagaacttcaggacattatagctatcctcgggttggacgaattatccgaagaggatcgtttaaccgtagcaagagcacgaaaaattgagcgtttcttatcacaaccttttttcgtagcagaagtatttactggttctccaggaaaatatgttggtctagcagaaacaattagaggatttcaactgatcctttccggcgaattagatggtcttcctgaacaggctttttatttggtaggtaatatcgatgaagctaccgcgaaggcgatgaacttaaaaacttag

SEQ ID NO: 43423 - protein, 490 aa, Evolvulus glomeratus
MRINPTTSSSQVSTIEKKNLGRIVQIIGPVLDVAFPPGKMPNIYNALVVQGRDNEQMNVACEVQQLLGNNRVRAVAMSDTDGLMRGMEVIDTGTPISVPVGGATLGRIFNVLGKPVDNLGPVDTKTTSPIHRSAPAFIQLDTKLSIFETGIKVVDLLAPYRRGGKIGLFGGAGVGKTVLIMELINNIAKAHGGVSVFGGVGERTREGNDLYMEMKESGVINEENIAESKVALVYGQMNEPPGARMRVGLTALTMAEYFRDVNEQDVLLFIDNIFRFVQAGSEVSALLGRMPSAVGYQPTLSTEMGSLQERITSTKEGSITSIQAVYVPADDLTDPAPATTFAHLDATTVLSRGLAAKGIYPAVDPLDSTSTMLQPRIVGEEHYETAQRVKQTLQRYKELQDIIAILGLDELSEEDRLTVARARKIERFLSQPFFVAEVFTGSPGKYVGLAETIRGFQLILSGELDGLPEQAFYLVGNIDEATAKAMNLKT

SEQ ID NO: 43424 - DNA, 1473 bp, Hewittia scandens
  CDS (1)..(1473)
atgagaatcaatcctactacttctggttctgaagtttccgtggttgaaaaaaaaaacctggggcgtatcgtcaaaatcattggtccggtattagatgtagcttttccccccggcaagatgcctaatatttataatgctctggtagttcaagggcgagacaatgaacaaacgaacgtgacttgcgaggtacagcaattattgggaaataatctagttagagctgtagctatgagtgatacagatggtctaatgagagggatggaagtgattgacacgagagctcctataagtgttcccgtcggtggatcgactctgggacgaattttcaacgtgctcggacaacctgttgataatttaggtcctgtagatactaatacaacgtctcctattcatagatctgcgcccgcctttatacagttagatacaaaattatctatttttgaaacaggaattaaagtagtagatcttttagccccctatcgccgtggaggaaaaatcggactatttgggggagctggagtggggaaaacagtactcattatggaattgattaacaatattgccaaagctcacgggggagtatccgtatttggcggagtgggtgaacgcactcgtgaaggaaatgatctttacttggaaatgaaagaatccggagtgattaatgaagaaaatattgcagaatcaaaagtggccctagtttacggtcagatgaatgaaccgccgggagctcgtatgagagttggtttgactgccctaactatggcagaatatttccgagatgttaatgagcaagacgtacttctatttatcgacaatatctttcgtttcgtccaagcgggatcggaagtatcggccttactgggtagaatgccttctgctgtgggttatcaaccgacgctgagtaccgaaatgggttctttacaagaaagaattacttccaccaaagaaggttccataacctcgattcaagcagtttatgtacctgcagatgatttgaccgatcctgctcctgctacgacatttgcacatttagatgcgactaccgtactatcaagaggtttagctgccaaaggtatctatccagcagtagatcctttagattcaacgtcaacgatgcttcaacctcggatcgttggtgaggaacattatgaaactgcgcaaagagttaagcaaactttacaacgttacaaagaacttcaggacattatagctatccttgggttggacgaattatccgaagaggatcgtttaaccgtagcaagagcgcgaaaaattgagcgtttcttatcacaaccctttttcgtagcagaagtatttactggttctccaggaaaatatgttggtctagcagaaacaattagaggatttcaattgatcctttccggcgaattagatggtcttcctgaacaggccttttatttggtaggtactatcgatgaagctaccgcgaaggcgatgaacttaaaaacttag

SEQ ID NO: 43425 - protein, 490 aa, Hewittia scandens
MRINPTTSGSEVSVVEKKNLGRIVKIIGPVLDVAFPPGKMPNIYNALVVQGRDNEQTNVTCEVQQLLGNNLVRAVAMSDTDGLMRGMEVIDTRAPISVPVGGSTLGRIFNVLGQPVDNLGPVDTNTTSPIHRSAPAFIQLDTKLSIFETGIKVVDLLAPYRRGGKIGLFGGAGVGKTVLIMELINNIAKAHGGVSVFGGVGERTREGNDLYLEMKESGVINEENIAESKVALVYGQMNEPPGARMRVGLTALTMAEYFRDVNEQDVLLFIDNIFRFVQAGSEVSALLGRMPSAVGYQPTLSTEMGSLQERITSTKEGSITSIQAVYVPADDLTDPAPATTFAHLDATTVLSRGLAAKGIYPAVDPLDSTSTMLQPRIVGEEHYETAQRVKQTLQRYKELQDIIAILGLDELSEEDRLTVARARKIERFLSQPFFVAEVFTGSPGKYVGLAETIRGFQLILSGELDGLPEQAFYLVGTIDEATAKAMNLKT

SEQ ID NO: 43426 - DNA, 1497 bp, Schizanthus pinnatus
  CDS (1)..(1497)
atgggaatcaatcctactacttctggttctggggtttccacgcttgaaaaaaaaaacctggggcgtgtcgtacaaatcatcggtccggtactagatgtagcctttcctccgggcaagatgccgaatatttataacgctctggtagttcaaggtcgagatagtgttggtcaaccaattaatgtgacttgtgaggtacagcaattattaggaaataatcgagttagggctgtagctatgagtgctacagacggtctaatgagaggaatggaagtgattgacacaggagcttctataagtgttccggtaggtggagcgactctgggacgaatttttaacgtgctcggagagcctgttgataatttagggcctgtagatactcgtacaacgtctcctattcatagatctgcgcccgcctttatccagttggatacaaaattatctatttttgaaacaggaattaaagtagtagatcttttagccccttatcgccgtggaggaaaaatcggactattcggtggagctggagtgggtaaaacagtactcattatggaattgattaacaatatagctaaagctcacgggggcgtatccgtatttggcggagtgggtgaacgtactcgggaaggaaatgatctttacatggaaatgaaagaatctggagtgattaatgaagaaaatattgcagaatctaaagtggccctagtttacggtcagatgaatgaaccgccgggagctcgtatgagagttggtttgactgccctaactatggcggaatatttccgagatgttaatgaacaagacgtacttctatttattgacaatatcttccgtttcgtccaagcaggatccgaagtatcggccttattgggtagaatgccttccgctgtgggttatcaaccgaccctgagtaccgaaatgggttctttacaagaaagaattacttctaccaaagaagggtccataacctctattcaagcagtttatgtacccgcagacgatttgaccgaccctgctccggctacgacatttgcacatttagatgctactaccgtactatcaagaggattagctgccaaaggtatttatccagcagtagatcctttagattcaacgtcaaccatgcttcaacctcggatcgttggtgaggaacattatgaaactgcccaaagagttaagcaaactttacaacgttacaaagaacttcaggacattatagctatccttgggttggacgaattatccgaagaggatcgtttaatcgtagcaagagcgcgaaaaattgagcgtttcttatcacaaccctttttcgtagcagaagtatttaccggttctccagggaaatatgttggtctagcagaaacaattagaggatttcaattgatcctttccggagaattagatggtcttcctgaacaggccttttatttggtaggtaatatcgatgaagctaccgcgaaggctatgaacttagaaatggagagcaatttgaagaaatga

SEQ ID NO: 43427 - protein, 498 aa, Schizanthus pinnatus
MGINPTTSGSGVSTLEKKNLGRVVQIIGPVLDVAFPPGKMPNIYNALVVQGRDSVGQPINVTCEVQQLLGNNRVRAVAMSATDGLMRGMEVIDTGASISVPVGGATLGRIFNVLGEPVDNLGPVDTRTTSPIHRSAPAFIQLDTKLSIFETGIKVVDLLAPYRRGGKIGLFGGAGVGKTVLIMELINNIAKAHGGVSVFGGVGERTREGNDLYMEMKESGVINEENIAESKVALVYGQMNEPPGARMRVGLTALTMAEYFRDVNEQDVLLFIDNIFRFVQAGSEVSALLGRMPSAVGYQPTLSTEMGSLQERITSTKEGSITSIQAVYVPADDLTDPAPATTFAHLDATTVLSRGLAAKGIYPAVDPLDSTSTMLQPRIVGEEHYETAQRVKQTLQRYKELQDIIAILGLDELSEEDRLIVARARKIERFLSQPFFVAEVFTGSPGKYVGLAETIRGFQLILSGELDGLPEQAFYLVGNIDEATAKAMNLEMESNLKK

SEQ ID NO: 43428 - DNA, 1473 bp, Erycibe glomerata
  CDS (1)..(1473)
atgagaatcaatcctagtagttctggctctgaggtttccgtggttgaaaaaaaaaacctagggcgtatcgtccaaatcattggtccggtactagatgtagcttttccccccggcaagatgcctaatatttataatgctctggtagttcaagggcgagacaatgaaaaagcgaacgtgacttgcgaggtacagcaattattgggaaataatcgagtgagagctgtagctatgagtgatacagatggtctaatgagagggatggaagtgattgacacgggagctcctataagtgttcccgtcggtggatccactctgggacgaattttcaacgtgctcggaaaacctgttgataatttaggtcctgtagatactaatacaacgtctcctattcatagacctgcgcccgcctttatacagttagatacaaaattatctatttttgaaacaggaattaaagtagtagatcttttagccccttatcgccgtggaggaaaaatcggactattcgggggagctggagtggggaaaacagtactcattatggaattgattaacaatattgccaaagcccacgggggagtatccgtatttggcggagtgggtgaacgtactcgtgaaggaaatgatctttacatggaaatgaaagaatccggagtgattaatgaagaaaatattgcagaatcaaaagtggccctagtttacggtcagatgaatgaaccgccgggagctcgtatgagagttggtttgactgccctaactatggcagaatatttccgagatgttaatgagcaagacgtacttctatttatcgacaatatctttcgtttcgtccaagcgggatcggaagtatcggccttactgggtagaatgccttctgctgtgggttatcaaccgaccctgagtaccgaaatgggttctttacaagaaagaattacttccaccaaagaaggttccataacctcgattcaagcagtttatgtacctgcagatgatttgaccgatcctgctcctgctacgacatttgcacatttagatgcaactaccgtactatcaagaggtttagctgccaaaggtatctatccagcagtagatcctttagattcaacgtcaacgatgcttcaacctcggatcgttggtgaggaacattatgaaactgcgcaaagagttaagcaaactttacaacgttacaaagaacttcaggacattatagctatccttgggttggacgaattatccgaagaggatcgtttaaccgtagcaagagcgcgaaaaattgagcgtttcttatcacaaccttttttcgtagcagaagtttttactggttctccagggaaatatgttggtctaacagaaacaattagaggatttcaattgatcctttccggcgaattagatggtcttcctgaacaggccttttatttggtaggtaatatcgatgaagctaccgcgaaggcgatgaacttaaaaacttag

SEQ ID NO: 43429 - protein, 490 aa, Erycibe glomerata
MRINPSSSGSEVSVVEKKNLGRIVQIIGPVLDVAFPPGKMPNIYNALVVQGRDNEKANVTCEVQQLLGNNRVRAVAMSDTDGLMRGMEVIDTGAPISVPVGGSTLGRIFNVLGKPVDNLGPVDTNTTSPIHRPAPAFIQLDTKLSIFETGIKVVDLLAPYRRGGKIGLFGGAGVGKTVLIMELINNIAKAHGGVSVFGGVGERTREGNDLYMEMKESGVINEENIAESKVALVYGQMNEPPGARMRVGLTALTMAEYFRDVNEQDVLLFIDNIFRFVQAGSEVSALLGRMPSAVGYQPTLSTEMGSLQERITSTKEGSITSIQAVYVPADDLTDPAPATTFAHLDATTVLSRGLAAKGIYPAVDPLDSTSTMLQPRIVGEEHYETAQRVKQTLQRYKELQDIIAILGLDELSEEDRLTVARARKIERFLSQPFFVAEVFTGSPGKYVGLTETIRGFQLILSGELDGLPEQAFYLVGNIDEATAKAMNLKT

SEQ ID NO: 43430 - DNA, 1464 bp, Maripa glabra
  CDS (1)..(1464)
atgagaatcaatcctactacttctggttctgaggttttcgcggttgaaaaaaaaaacctaggacgtatcgtccagatcattggtccggtactagatgtaacttttccccccggcaagatgcctaatatttataatgctctggtagttcaagggcgagacaataacgtgacttgcgaggtacagcaattattgggaaataatcgagttagagctgtagctatgagtgatacagatggtctaatgagagggatggaagtgattgacacgggagctcctataagtgttcccgtcggtggagcgactctgggacgaattttcaacgtgctcggagaacctgttgataatttaggtcctgtagatactaatacaacgtctcctattcatagatctgcacccgcctttatacagttagatacaaaattatctatttttgaaacaggaattaaagtagtagatcttttagccccttatcgccgtggaggaaaaatcggactattcgggggagctggagtggggaaaacagtactcattatggaattgattaacaatattgccaaagctcacgggggagtatccgtatttggcggagtgggtgaacgtactcgtgaaggaaatgatctttacatggaaatgaaagaatccagagtgattaatgaagaaaatattgcagaatcaaaagtggccctagtttacggtcagatgaatgaaccgccgggagctcgtatgagagttggtttgactgccctaactatggcagaatatttccgagatgttaatgagcaagacgtacttctatttatcgacaatatctttcgtttcgtccaagcgggatcggaagtatcggccttactgggtagaatgccttctgctgtgggttatcaaccgaccctgagtaccgaaatgggttctttacaagaaagaattacttccaccaaagaaggttctataacctcgattcaagcagtttatgtacctgcagatgatttgaccgatcctgctcctgctacgacatttgcacatttagatgcgactaccgtactatcaagaggtttagctgccaaaggtatctacccagcagtagatcctttagattcaacgtcaacgatgcttcaacctcggatcgttggtgaggaacattatgaaactgcccaaagagttaagcaaactttacaacgttacaaagaacttcaggacattatagctatccttgggttggacgaattatccgaagaggatcgtttaaccgtagcaagagcgcgaaaaattgagcgtttcttatcacaaccttttttcgtagcagaagtatttactggttctccaggaaaatatgttggtctagcagaaacaattagaggatttcaattgatcctttccggtgaattagacggtcttcctgaacaggccttttatttggtaggtaatatcgatgaagctaccgcgaaggcgatgaacttaaaaacttag

SEQ ID NO: 43431 - protein, 487 aa, Maripa glabra
MRINPTTSGSEVFAVEKKNLGRIVQIIGPVLDVTFPPGKMPNIYNALVVQGRDNNVTCEVQQLLGNNRVRAVAMSDTDGLMRGMEVIDTGAPISVPVGGATLGRIFNVLGEPVDNLGPVDTNTTSPIHRSAPAFIQLDTKLSIFETGIKVVDLLAPYRRGGKIGLFGGAGVGKTVLIMELINNIAKAHGGVSVFGGVGERTREGNDLYMEMKESRVINEENIAESKVALVYGQMNEPPGARMRVGLTALTMAEYFRDVNEQDVLLFIDNIFRFVQAGSEVSALLGRMPSAVGYQPTLSTEMGSLQERITSTKEGSITSIQAVYVPADDLTDPAPATTFAHLDATTVLSRGLAAKGIYPAVDPLDSTSTMLQPRIVGEEHYETAQRVKQTLQRYKELQDIIAILGLDELSEEDRLTVARARKIERFLSQPFFVAEVFTGSPGKYVGLAETIRGFQLILSGELDGLPEQAFYLVGNIDEATAKAMNLKT

SEQ ID NO: 43432 - DNA, 1464 bp, Dicranostyles villosus
  CDS (1)..(1464)
  misc_feature (18)..(18): n is a, g, c or t
atgagaatcaatcctacnacttctggttctgaggtttccgcggttgaaaaaaaaaacctagggcgtatcgtccaaatcattggtccggtactagatgtagcttttccccccggcaagatgcctaatatttataatgctctggtagttcaagggcgagacaataacgtgacttgcgaggtacagcaattattgggaaataatcgagttagagctgtagctatgagtgatacagatggtctaatgagagggatggaagtgattgacacgggagctcctataagtgttgccgtcggtggagcgactctgggacgaattttcaacgtgctcggagaacctgttgataatttaggtcctgtagatactaatacaacgtctcctattcatagatctgcacccgcctttatacagttagatacaaaattatctatttttgaaacaggaattaaagtagtagatcttttagccccttatcgccgtggaggaaaaatcggactattcgggggagctggagtggggaaaactgtactcattatggaattgattaacaatattgccaaagctcacgggggagtatccgtatttggcggagtgggtgaacgtactcgtgaaggaaatgatctttacttggaaatgaaagaatccagaatgattaatgaagaaaatattgcagaatcaaaagtggccctagtttacggtcagatgaatgaaccgccgggagctcgtatgagagttggtttgactgccctaactatggcagaatatttccgagatgttaatgagcaagacgtacttctatttatcgacaatatctttcgtttcgtccaagcgggatcggaagtatcggccttactgggtagaatgccttctgctgtgggttatcaaccgaccctgagtaccgaaatgggttctttacaagaaagaattacttccaccaaagaaggttctataacctcgattcaagcagtttatgtacctgcagatgatttgaccgatcctgctcctgctacgacatttgcacatttagatgcgactaccgtactatcaagaggtttagctgccaaaggtatctacccagcagtagatcctttagattcaacgtcaacgatgcttcaacctcggatcgttggtgaggaacattatgaaactgcccaaagagttaagcaaactttacaacgttacaaagaacttcaggacattatagctatccttgggttggacgaattatccgaagaggatcgtttaaccgtagcaagagcgcgaaaaattgagcgtttcttatcacaaccttttttcgtagcagaagtatttactggttctccaggaaaatatgttggtctagcagaaacaattagaggatttcaattgatcctttccggtgaattagatggtcttcctgaacaggccttttatttggtaggtaatatcgatgaagctaccgcgaaggcgatgaacttaaaaacttag

SEQ ID NO: 43433 - protein, 487 aa, Dicranostyles villosus
MRINPTTSGSEVSAVEKKNLGRIVQIIGPVLDVAFPPGKMPNIYNALVVQGRDNNVTCEVQQLLGNNRVRAVAMSDTDGLMRGMEVIDTGAPISVAVGGATLGRIFNVLGEPVDNLGPVDTNTTSPIHRSAPAFIQLDTKLSIFETGIKVVDLLAPYRRGGKIGLFGGAGVGKTVLIMELINNIAKAHGGVSVFGGVGERTREGNDLYLEMKESRMINEENIAESKVALVYGQMNEPPGARMRVGLTALTMAEYFRDVNEQDVLLFIDNIFRFVQAGSEVSALLGRMPSAVGYQPTLSTEMGSLQERITSTKEGSITSIQAVYVPADDLTDPAPATTFAHLDATTVLSRGLAAKGIYPAVDPLDSTSTMLQPRIVGEEHYETAQRVKQTLQRYKELQDIIAILGLDELSEEDRLTVARARKIERFLSQPFFVAEVFTGSPGKYVGLAETIRGFQLILSGELDGLPEQAFYLVGNIDEATAKAMNLKT

SEQ ID NO: 43434 - DNA, 1473 bp, Jacquemontia tamnifolia
  CDS (1)..(1473)
atgagaatcaatcctactaattctagttctgatgtttccgcggttgaaaaaaaaaacctagggcgtatcgtccaaatcattggtccggtactagatgtagcttttccccctggcaagatgcctaatatttataatgctctggtcgttcaagggcgagacaatgaacaaacgaacgtgacttgcgaggtacagcaattgttgggaaataatcgagttagaactgtagctatgagtgatacagatggtttaatgagagggatggacgtgattgacatgggagctcctataagtgttcccgtcggtggatcgactctgggacgaattttcaacgtgctcggagaacctgttgataatttaggtcctgtagatactaaaataacgtctcctattcatagatctgcacccgcctttacacagttagatacaaaattatctatttttgaaacaggaattaaagtagtagatcttttagctccttatcgccgtggaggaaaaatcggactattcgggggagctggagtggggaaaacagtactcattatggaattgattaacaacattgccaaagctcacgggggagtatccgtatttggcggagtgggtgaacgtactcgtgaaggaaatgatctttacatggaaatgaaagaatccggagttattaatgaagaaaaaattgcagaatcaaaagtagccctagtttacggtcagatgaatgaaccgccgggagctcgtatgagagttggtttgactgccctaactatggcagaatatttccgagatgttaatgagcaagacgtacttctatttatcgacaatatctttcgtttcgtccaagcgggatcggaagtatcggccttactgggtagaatgccttcggctgtgggttatcaaccgaccctgagtaccgaaatgggtactttacaagaaagaattacttccaccaaagaaggttctataacctcgattcaagcagtttatgtacctgcagatgatttgaccgatcctgctcctgctaccacatttgcacatttagatgcgactaccgtactctcacgaggtttagctgccaaggggatctacccagcagtagatcctttagattcaacgtcaacgatgcttcaacctcggatcgttgggaaggaacattatgaaactgcgcaaagagttaagcaaactttacaacgttacaaagaacttcaggacattatagctatccttgggttggacgaattatccgaagaggatcgtttaaccgtagcaagagcgcgaaaaattgagcgtttcttatcacaacctttttttgtagcagaagtatttaccggttctccaggaaaatatgttggtctagtagaaacaattagaggatttcaattgatcctttccggcgaattcgatagtcttcctgagcaggccttttatttggtaggtaatatcgatgaagctaccgcgaaggccatgaacttaaaaacttag

SEQ ID NO: 43435 - protein, 490 aa, Jacquemontia tamnifolia
MRINPTNSSSDVSAVEKKNLGRIVQIIGPVLDVAFPPGKMPNIYNALVVQGRDNEQTNVTCEVQQLLGNNRVRTVAMSDTDGLMRGMDVIDMGAPISVPVGGSTLGRIFNVLGEPVDNLGPVDTKITSPIHRSAPAFTQLDTKLSIFETGIKVVDLLAPYRRGGKIGLFGGAGVGKTVLIMELINNIAKAHGGVSVFGGVGERTREGNDLYMEMKESGVINEEKIAESKVALVYGQMNEPPGARMRVGLTALTMAEYFRDVNEQDVLLFIDNIFRFVQAGSEVSALLGRMPSAVGYQPTLSTEMGTLQERITSTKEGSITSIQAVYVPADDLTDPAPATTFAHLDATTVLSRGLAAKGIYPAVDPLDSTSTMLQPRIVGKEHYETAQRVKQTLQRYKELQDIIAILGLDELSEEDRLTVARARKIERFLSQPFFVAEVFTGSPGKYVGLVETIRGFQLILSGEFDSLPEQAFYLVGNIDEATAKAMNLKT

SEQ ID NO: 43436 - DNA, 1473 bp, Dipteropeltis poranoides
  CDS (1)..(1473)
  misc_feature (29)..(29): n is a, g, c or t
atgagaatcaatcctactacttctagctntgaggtttttgcggttgaaaaaaaaaacataggtcgtatcgtccaaatcatcggtccggtactagatgtagcttttcctcccggcaagatgcctaatatttataatgctctggtagttcaagggcgagacaatgaacaaacgaacgtgacttgcgaggtacagcaattattgggaaataatcgagtgagagctgtagctatgagtgatacagatggtctaatgagagggatggaagtgattgacacgggagctcctataagtgttccagtcggtggagcgactctgggacgaattttcaacgtgctcggagaacctgttgataatttaggtcctgtagatactaaaacaacatctcctattcatagatctgcgcccgcctttatacagttagatacaaaattatctatttttgaaacaggaattaaagtagtagatcttttagccccatatcgccgtggaggaaaaatcggactattcgggggagctggagtggggaaaacagtactcattatggaattgattaacaatattgccaaagctcacgggggagtatccgtatttggcggagtgggtgaacgtactcgtgaaggaaatgatctttacatggaaatgaaagaatccggagtgattgatgaagaaaatattgcagaatcaaaagtggccctagtttacggtcagatgaatgaaccgccgggagctcgtatgagagttggtttgactgccctaactatggcagaatatttccgagatgttaatgagcaagacgtacttctatttatcgacaatatctttcgtttcgtccaagcgggatcggaagtatcggccttactgggtagaatgccttctgctgtgggttatcaaccgaccctgagtaccgaaatgggttctttacaagaaagaattacttccaccaaagaaggttctataacctcgattcaagcagtttatgtacctgcagatgatttgaccgatcctgctcctgctacgacatttgcacatttagatgcgactaccgtactatcaagaggtttagctgccaaaggtatctatccagcagtagatcctttagattcaacgtcaacgatgcttcaacctcggatcgttggtgaggaacattatgaaactgcacaaagagttaagcaaactttacaacgttacaaagaacttcaagacattatagccatccttgggttggacgaattatccgaagaggatcgtttaaccgtagcaagagcgcgaaaaattgagcgtttcttatcacaaccttttttcgtagcagaagtatttacaggttctccaggaaaatatgttggtctagcagaaacaattagaggatttcaattgatcctttccggcgaattagatggtcttcctgaacaggccttttatttggtaggtaatatcgatgaagctactgcgaaggcgatgaacttaaaaacttag

SEQ ID NO: 43437 - protein, 490 aa, Dipteropeltis poranoides
  misc_feature (10)..(10): The Xaa at location 10 stands for Cys, Phe, Ser, or Tyr.
MRINPTTSSXEVFAVEKKNIGRIVQIIGPVLDVAFPPGKMPNIYNALVVQGRDNEQTNVTCEVQQLLGNNRVRAVAMSDTDGLMRGMEVIDTGAPISVPVGGATLGRIFNVLGEPVDNLGPVDTKTTSPIHRSAPAFIQLDTKLSIFETGIKVVDLLAPYRRGGKIGLFGGAGVGKTVLIMELINNIAKAHGGVSVFGGVGERTREGNDLYMEMKESGVIDEENIAESKVALVYGQMNEPPGARMRVGLTALTMAEYFRDVNEQDVLLFIDNIFRFVQAGSEVSALLGRMPSAVGYQPTLSTEMGSLQERITSTKEGSITSIQAVYVPADDLTDPAPATTFAHLDATTVLSRGLAAKGIYPAVDPLDSTSTMLQPRIVGEEHYETAQRVKQTLQRYKELQDIIAILGLDELSEEDRLTVARARKIERFLSQPFFVAEVFTGSPGKYVGLAETIRGFQLILSGELDGLPEQAFYLVGNIDEATAKAMNLKT

SEQ ID NO: 43438 - DNA, 1473 bp, Calycobolus glaber
  CDS (1)..(1473)
  misc_feature (382)..(382): n is a, g, c or t
  misc_feature (383)..(383): n is a, g, c or t
  misc_feature (384)..(384): n is a, g, c or t
  misc_feature (385)..(385): n is a, g, c or t
atgagaatcaatcctactacttctgactctgaggtttccgcggttgaaaaaaaaaacctagggcgtatcgtccaaatcataggtccggtactagatgtagcttttccccccggcaagatgcctaagatttataatgctctggtagttcaagggcgagacaaggaacaaacggacgtgacttgcgaggtacagcaattattgggaaataatcgagttagagctgtagctatgagtgatacagatggtctaaaaagagggatgcaagtgattgacacgggagctcctataagtgttcccgtcggtggatcgactctgggacgaattttcaacgtgctcggagaacctgttgataatttaggtcctgtagatactaatacaacgnnnnctattcatatatctgctcccgcctttatacagttagatacaaaattatctatttttgaaacaggaattaaagtagtagatcttttagccccctatcgccatggaggaaaaatcggactattcgggggagctggattggggaaaacagtactcattatggaattgattaacaatattgccaaagctcacgggggagtatccgtatttggcggagtgggtgaacgtactcgtgaaggaaatgatctttacatggaaatgaaagaatccggagtgattaatgaagaaaatattgcagaatcaaaagtggccctagtttacggtcagatgaatgaaccgccgggagctcgtatgagagttggtttgactgccctaactatggcagaatatttccgagatgttaatgagcaagacgtacttctatttatcgacaatatctttcgtttcgtccaagcgggatcggaagtatcggccttactgggtagaatgccttctgctgtgggttatcaacccaccctgagtaccgaaatgggttctttacaagaaagaattacttccaccaaagaaggttctataacctcgattcaagcagtttatgtacctgcagatgatttgaccgatcctgccccggctacgacatttgcacatttagatgcgactaccgtactatcaagaggtttagctgccaaaggtatctatccagcagtagatcctttagattcaacgtcaacgatgcttcaacctcggatcgttggtgaagaacattatgaaactgcgcaaagagtgaagcaaactttacaacgttacaaagaacttcaggacattatagccatccttgggttggacgaattatccgaagaggatcgtttaaccgtagcaagagcccgaaaaattgagcgtttcttatcacaaccttttttcgtagcagaagtatttactggttctccaggaaaatatgttggtctagcagaaacaattagaggatttcaattgatcctttccggcgaattagatggtcttccggaacaggctttttatttggtaggtaatattgatgaagctaccgcaaaggcgatgaacttaaaaacttag

SEQ ID NO: 43439 - protein, 490 aa, Calycobolus glaber
  misc_feature (128)..(128): The Xaa at location 128 stands for Stop, Ala, Arg, Asn, Asp, Cys, Gln, Glu, Gly, His, Ile, Leu, Lys, Met, Phe, Pro, Ser, Thr, Trp, Tyr, or Val.
  misc_feature (129)..(129): The Xaa at location 129 stands for Ala, Pro, Ser, or Thr.
MRINPTTSDSEVSAVEKKNLGRIVQIIGPVLDVAFPPGKMPKIYNALVVQGRDKEQTDVTCEVQQLLGNNRVRAVAMSDTDGLKRGMQVIDTGAPISVPVGGSTLGRIFNVLGEPVDNLGPVDTNTTXXIHISAPAFIQLDTKLSIFETGIKVVDLLAPYRHGGKIGLFGGAGLGKTVLIMELINNIAKAHGGVSVFGGVGERTREGNDLYMEMKESGVINEENIAESKVALVYGQMNEPPGARMRVGLTALTMAEYFRDVNEQDVLLFIDNIFRFVQAGSEVSALLGRMPSAVGYQPTLSTEMGSLQERITSTKEGSITSIQAVYVPADDLTDPAPATTFAHLDATTVLSRGLAAKGIYPAVDPLDSTSTMLQPRIVGEEHYETAQRVKQTLQRYKELQDIIAILGLDELSEEDRLTVARARKIERFLSQPFFVAEVFTGSPGKYVGLAETIRGFQLILSGELDGLPEQAFYLVGNIDEATAKAMNLKT

SEQ ID NO: 43440 - DNA, 1473 bp, Itzaea sericea
  CDS (1)..(1473)
  misc_feature (4)..(4): n is a, g, c or t
  misc_feature (7)..(7): n is a, g, c or t
atgngantcaatcctacgacttctgactctgaggtttccgcggttgaaaaaaaaaacctagggcgtatcgtccaaatcataggtccggtactagatgtagcttttccccccggcaagatgcctaagatttataatgctctggtagttcaagggcgagacaaggaacaaacggacgtgacttgcgaggtacagcaattattgggaaataatcgagttagagctgtagctatgagtgatacagatggtctaaaaagagggatgcaagtgattgacacgggagctcctataagtgttcccgtcggtggatcgactctgggacgaattttcaacgtgctcggagaacctgttgataatttaggtcctgtagatactaatacaacgtctcctattcatagatctgcgcccgcctttatacagttagatacaaaattatctatttttgaaacaggaattaaagtagtagatcttttagccccctatcgccgtggaggaaaaatcggactattcgggggagctggagtggggaaaacagtactcattatggaattgattaacaatattgccaaagctcacgggggagtatccgtatttggcggagtgggtgaacgtactcgtgaaggaaatgatctttacatggaaatgaaagaatccggagtgattaatgaagaaaatattgcagaatcaaaagtggccctagtttacggtcagatgaatgaaccgccgggagctcgtatgagagttggtttgactgccctaactatggcagaatatttccgagatgttaatgagcaagacgtacttctatttatcgacaatatctttcgtttcgtccaagcgggatcggaagtatcggccttactgggtagaatgccttctgctgtgggttatcaacccaccctgagtaccgaaatgggttctttacaagaaagaattacttccaccaaagaaggttctataacctcgattcaagcagtttatgtacctgcagatgatttgaccgatcctgcccctgctacgacatttgcacatttagatgcgactaccgtactatcaagaggtttagctgccaagggtatctatccagcagtagatcctttagattcaacgtcaacgatgcttcaacctcggatcgttggtgaggaacattatgaaactgcgcaaagagtgaagcaaactttacaacgttacaaagaacttcaggacattatagccatccttgggttggacgaattatccgaagaggatcgtttaaccgtagcaagagcccgaaaaattgagcgtttcttatcacaaccttttttcgtagcagaagtatttactggttctccaggaaaatatgttggtctagcagaaacaattagaggatttcaattgatcctttccggcgaattagatggtcttccggaacaggctttttatttggtaggtaatatcgatgaagctaccgcaaaggcgatgaacttaaaaacttag

SEQ ID NO: 43441 - protein, 490 aa, Itzaea sericea
  misc_feature (2)..(2): The Xaa at location 2 stands for Stop, Arg, or Gly.
  misc_feature (3)..(3): The Xaa at location 3 stands for Ile, Leu, Phe, or Val.
MXXNPTTSDSEVSAVEKKNLGRIVQIIGPVLDVAFPPGKMPKIYNALVVQGRDKEQTDVTCEVQQLLGNNRVRAVAMSDTDGLKRGMQVIDTGAPISVPVGGSTLGRIFNVLGEPVDNLGPVDTNTTSPIHRSAPAFIQLDTKLSIFETGIKVVDLLAPYRRGGKIGLFGGAGVGKTVLIMELINNIAKAHGGVSVFGGVGERTREGNDLYMEMKESGVINEENIAESKVALVYGQMNEPPGARMRVGLTALTMAEYFRDVNEQDVLLFIDNIFRFVQAGSEVSALLGRMPSAVGYQPTLSTEMGSLQERITSTKEGSITSIQAVYVPADDLTDPAPATTFAHLDATTVLSRGLAAKGIYPAVDPLDSTSTMLQPRIVGEEHYETAQRVKQTLQRYKELQDIIAILGLDELSEEDRLTVARARKIERFLSQPFFVAEVFTGSPGKYVGLAETIRGFQLILSGELDGLPEQAFYLVGNIDEATAKAMNLKT

SEQ ID NO: 43442 - DNA, 1473 bp, Wilsonia humilis
  CDS (1)..(1473)
atgagaatcaatcctactacttctggttctgaggtttccgcggttgaaaaaaaaaacctaggacgtatcgtccaaatcattggtccggtactagatgtagcttttcctgccggcaagatgcctaatatttataatgctctggtagttcaagggcgagacaatgaacaaacgaacgtgacttgcgaggtacagcaattagtgggaaataatcgagttagaactgtagctatgagtgatacagatggtctaatgagagggatggaagtgattgacacgggagctcctataagtgttcccgtcggtgggtcgactctggggcgaattttcaacgtgctcggagaacctgttgataatttaggtcctgtagatactaaaacaacgtctcctattcatagatctgcgcccgcctttgtacagttagatacaaaattatccatttttgaaacaggaattaaagtagtagatcttttagccccttatcgccgtggaggaaaaatcggactattcgggggagctggagtggggaaaactgtactcattatggaattgattaacaatattgccaaagctcacgggggagtatccgtatttggcggagtgggtgaacgtactcgtgaaggaaatgatctttacatggaaatgaaagaatccggagtgattaatgaagaagatattgccgaatcaaaagtggccctagtttatggtcagatgaatgaaccgccgggagctcgtatgagagttggtttgactgccctaactatggcagaatatttccgagatgttaatgagcaagacgtacttctatttatcgacaatatctttcgttttgtccaagcgggatcggaagtatcggccttactgggtagaatgccttctgctgtgggttatcaaccgaccctgagtaccgaaatgggttctttacaagaacgaattacttccaccaaagaaggttctataacctcgattcaagcagtttatgtacctgcggatgatttgaccgatcccgctcctgctacgacatttgcacatttagatgcgactaccgtactatcaaggggtttagctgccaaaggtatctatccagcagtagatcctttagattcaacgtcaacgatgcttcaacctcggatcgttggtgaggaacattatgaaactgcgcaaagagttaagcaaactttacaacgttacaaagaacttcaggacattatagctatccttgggttggacgaattatcggaagaggatcgtttaaccgtagcaagagcgcgaaaaattgagcgtttcttatcacaaccttttttcgtagcagaaatatttaccggttctccaggaaaatatgttggtctagcagaaacaattagaggatttcaattgatcctttccggcgaattagatggtcttcctgaacaggccttttatttggtaggtaatatcgatgaagctaccgcgaaggcgatgaacttaaaaacttag

SEQ ID NO: 43443 - protein, 490 aa, Wilsonia humilis
MRINPTTSGSEVSAVEKKNLGRIVQIIGPVLDVAFPAGKMPNIYNALVVQGRDNEQTNVTCEVQQLVGNNRVRTVAMSDTDGLMRGMEVIDTGAPISVPVGGSTLGRIFNVLGEPVDNLGPVDTKTTSPIHRSAPAFVQLDTKLSIFETGIKVVDLLAPYRRGGKIGLFGGAGVGKTVLIMELINNIAKAHGGVSVFGGVGERTREGNDLYMEMKESGVINEEDIAESKVALVYGQMNEPPGARMRVGLTALTMAEYFRDVNEQDVLLFIDNIFRFVQAGSEVSALLGRMPSAVGYQPTLSTEMGSLQERITSTKEGSITSIQAVYVPADDLTDPAPATTFAHLDATTVLSRGLAAKGIYPAVDPLDSTSTMLQPRIVGEEHYETAQRVKQTLQRYKELQDIIAILGLDELSEEDRLTVARARKIERFLSQPFFVAEIFTGSPGKYVGLAETIRGFQLILSGELDGLPEQAFYLVGNIDEATAKAMNLKT

SEQ ID NO: 43444 - DNA, 1473 bp, Stylisma patens
  CDS (1)..(1473)
  misc_feature (17)..(17): n is a, g, c or t
atgggaatcaatcctantacttctggttctgaggtttccgcggttgaaaaaaaaaacctagggcgtatcgtccaaatcattggtccggtactagatgtagcttttcctcccggcaagatgcctaatatttatagtgctctggtaattcaagggcgagacaatgaacaaatgaacgtgacttgcgaggtacagcaattattgggaaataatcgagttagagctgtagctatgagtgctacagatggtctaatgagagggatggaagtgattgacacgggagctcctataagtgttcccgtcggtggagcgactctgggacgaattttcaacgtgctgggggcccctgttgataatttaggtgctgtagatactaaaacaacgtctcctattcataggtctgcgcccgcctttatacagttagatacaaaattatctatttttgaaacaggaattaaagtagtagatcttttagccccttatcgccggggaggaaaaatcggactattcgggggagctggagtggggaaaacagtactcattatggaattgattaacaatattgccaaagctcacgggggggtatccgtatttggcggagtgggtgaacgtactcgtgaaggaaatgatctttacatggaaatgaaagaatccagagtgattaatgaagaaaatattgcagaatcaaaagtggccctagtttacggtcagatgaatgaaccaccgggagctcgtatgagagttggtttgactgccctaactatggcggaatatttccgagatgttaatgagcaagacgtacttctatttatcgacaatatctttcgttttgtccaagcgggatcggaagtatcggccttactgggtagaatgccttccgctgtgggttatcaaccgaccctgagtaccgaaatgggttctttacaagaaagaattacttccaccaaagaaggttctataacctcgattcaagcagtttatgtacctgcagatgatttgaccgatcctgctcctgctacaacatttgcgcatttagatgcgactaccgtactatcaagaggtttagctgccaaaggtatctatccagcagtagatcctttagattcaacgtcaacgatgcttcaacctcggatcgttggtgaggagcattatgaaactgcccaaagagttaagcaaactttacaacgttacaaagaacttcaggacattatagctatcctcgggttggacgaattatccgaagaggatcgtttaaccgtagcaagagcgcgaaaaattgagcgtttcttatcacaaccttttttcgtagcagaagtatttactggttctccaggaaaatatgttggtctagcagaaacaattagaggatttgaattgatcctttccggcgaattagatgttcttcctgaacaggccttttatttggtaggtaatatcgatgaagctaccgtgaaggcgatgaacttaaaaacttag

SEQ ID NO: 43445 - protein, 490 aa, Stylisma patens
  misc_feature (6)..(6): The Xaa at location 6 stands for Asn, Ile, Ser, or Thr.
MGINPXTSGSEVSAVEKKNLGRIVQIIGPVLDVAFPPGKMPNIYSALVIQGRDNEQMNVTCEVQQLLGNNRVRAVAMSATDGLMRGMEVIDTGAPISVPVGGATLGRIFNVLGAPVDNLGAVDTKTTSPIHRSAPAFIQLDTKLSIFETGIKVVDLLAPYRRGGKIGLFGGAGVGKTVLIMELINNIAKAHGGVSVFGGVGERTREGNDLYMEMKESRVINEENIAESKVALVYGQMNEPPGARMRVGLTALTMAEYFRDVNEQDVLLFIDNIFRFVQAGSEVSALLGRMPSAVGYQPTLSTEMGSLQERITSTKEGSITSIQAVYVPADDLTDPAPATTFAHLDATTVLSRGLAAKGIYPAVDPLDSTSTMLQPRIVGEEHYETAQRVKQTLQRYKELQDIIAILGLDELSEEDRLTVARARKIERFLSQPFFVAEVFTGSPGKYVGLAETIRGFELILSGELDVLPEQAFYLVGNIDEATVKAMNLKT

SEQ ID NO: 43446 - DNA, 1473 bp, Bonamia spectabilis
  CDS (1)..(1473)
  misc_feature (29)..(29): n is a, g, c or t
atgagaatcaatcctactacttctggttntgaggtttccgcggttgaaaaaaaaaacctagggcgtatcgtccaaatcattggtccggtactagatgtagcttttcctcccggcaagatgcctaatatttatagtgctctggtaattcaagggcgagacaatgaacaaatgaacgtgacttgcgaggtacagcaattattgggaaataatcgagttagagctgtagctatgagtgctacagatggtctaatgagagggatggaagtgattgacacgggagctcctataagtgttcccgtcggtggagcgactctgggacgaattttcaacgtgctgggggcccctgttgataatttaggtgctgtagatactaaaacaacgtctcctattcataggtctgcgcccgcctttatacagttagatacaaaattatctatttttgaaacaggaattaaagtagtagatcttttagccccttatcgccggggaggaaaaatcggactattcgggggagctggagtggggaaaacagtactcattatggaattgattaacaatattgccaaagctcacgggggggtatccgtatttggcggagtgggtgaacgtactcgtgaaggaaatgatctttacatggaaatgaaagaatccagagtgattaatgaagaaaatattgcagaatcaaaagtggccctagtttacggtcagatgaatgaaccaccgggagctcgtatgagagttggtttgactgccctaactatggcggaatatttccgagatgttaatgaacaagacgtacttctatttatcgacaatatctttcgttttgtccaagcgggatcggaagtatcggccttactgggtagaatgccttccgctgtgggttatcaaccgaccctgagtaccgaaatgggttctttacaagaaagaattacttccaccaaagaaggttctataacctcgattcaagcagtttatgtacctgcagatgatttgaccgatcctgctcctgctacaacatttgcgcatttagatgcgactaccgtactatcaagaggtttagctgccaaaggtatctatccagcagtagatcctttagattcaacgtcaacgatgcttcaacctcggatcgttggtgaggagcattatgaaactgcccaaagagttaagcaaactttacaacgttacaaagaacttcaggacattatagctatcctcgggttggacgaattatccgaagaggatcgtttaaccgtagcaagagcgcgaaaaattgagcgtttcttatcacaaccttttttcgtagcagaagtatttactggttctccaggaaaatatgttggtctagcagaaacaattagaggatttgaattgatcctttccggcgaattagatgttcttcctgaacaggccttttatttggtaggtaatatcgatgaagctaccgtgaaggcgatgaacttaaaaacttag

SEQ ID NO: 43447 - protein, 490 aa, Bonamia spectabilis
  misc_feature (10)..(10): The Xaa at location 10 stands for Cys, Phe, Ser, or Tyr.
MRINPTTSGXEVSAVEKKNLGRIVQIIGPVLDVAFPPGKMPNIYSALVIQGRDNEQMNVTCEVQQLLGNNRVRAVAMSATDGLMRGMEVIDTGAPISVPVGGATLGRIFNVLGAPVDNLGAVDTKTTSPIHRSAPAFIQLDTKLSIFETGIKVVDLLAPYRRGGKIGLFGGAGVGKTVLIMELINNIAKAHGGVSVFGGVGERTREGNDLYMEMKESRVINEENIAESKVALVYGQMNEPPGARMRVGLTALTMAEYFRDVNEQDVLLFIDNIFRFVQAGSEVSALLGRMPSAVGYQPTLSTEMGSLQERITSTKEGSITSIQAVYVPADDLTDPAPATTFAHLDATTVLSRGLAAKGIYPAVDPLDSTSTMLQPRIVGEEHYETAQRVKQTLQRYKELQDIIAILGLDELSEEDRLTVARARKIERFLSQPFFVAEVFTGSPGKYVGLAETIRGFELILSGELDVLPEQAFYLVGNIDEATVKAMNLKT

SEQ ID NO: 43448 - DNA, 1473 bp, Cladostigma hildebrandtioides
  CDS (1)..(1473)
atgagaatcaatcctactacttctggttctgaggtttccgcggttgaaaaaaaaaacctagggcgtatcgtccaaatcattggtccggtactagatgtagcttttcctcccggcaagatgcctaatatttataatgctctggtagttcaagggcgagacaatgaacaaatgaacgtggcttgcgaggtacagcaattattgggaaataatcgagtgagagctgtagctatgagtgatacagatggtctaatgagagggatggaagtgattgacacgggagctcctataagtgttcccgtcggtggagcgactctgggacgaattttcaacgtgctcggagaacctgttgataatttaggtcctgtagatactaaaacaacgtctcctattcatagatctgcgcccgcctttatacagttagatacaaaattatctatttttgaaacaggaattaaagtagtagatcttttagccccttatcgccgtggaggaaaaatcggactattcgggggagctggagtggggaaaacagtactcattatggaattgattaacaatattgccaaagctcacgggggagtatccgtatttggcggagtgggtgaacgtactcgtgaaggaaatgatctttacatggaaatgaaagaatccggagtgattaatgaagaaaatattgcagaatcaaaagtggctctagtttacggtcagatgaatgaaccaccgggagctcgtatgagagttggtttgactgccctaactatggcagaatatttccgagatgttaatgagcaagacgtacttctatttatcgacaatatctttcgttttgtacaagcgggatcggaagtatcggccttactgggtagaatgccttctgctgtgggttatcaaccgaccctgagtaccgaaatgggttctttacaagaaagaattacttccaccaaagagggttctataacctcgattcaagcagtttatgtacctgcagatgatttgaccgatcctgctcctgctacgacatttgcgcatttagatgcgactaccgtactatcaagaggtttagctgccaaaggtatctatccagcagtagatcctttagattcaacgtcaacgatgcttcaacctcggatcgttggtgaggaacattatgaaactgcgcaaagagtgaagcaaactttacaacgttacaaagaacttcaggacattatagctatcctcgggttggacgaattatccgaagaggatcgtttaaccgtagcaagagcgcgaaaaattgagcgtttcttatcacaaccttttttcgtagcagaagtatttactggttctccaggaaaatatgttggtctagcagaaacaattagaggatttcaactgatcctttccggggaattagatggtcttcctgaacaggccttttatttggtaggtaatatcgatgaagctaccgcgaaggcgatgaacttaaaaacttag

SEQ ID NO: 43449 - protein, 490 aa, Cladostigma hildebrandtioides
MRINPTTSGSEVSAVEKKNLGRIVQIIGPVLDVAFPPGKMPNIYNALVVQGRDNEQMNVACEVQQLLGNNRVRAVAMSDTDGLMRGMEVIDTGAPISVPVGGATLGRIFNVLGEPVDNLGPVDTKTTSPIHRSAPAFIQLDTKLSIFETGIKVVDLLAPYRRGGKIGLFGGAGVGKTVLIMELINNIAKAHGGVSVFGGVGERTREGNDLYMEMKESGVINEENIAESKVALVYGQMNEPPGARMRVGLTALTMAEYFRDVNEQDVLLFIDNIFRFVQAGSEVSALLGRMPSAVGYQPTLSTEMGSLQERITSTKEGSITSIQAVYVPADDLTDPAPATTFAHLDATTVLSRGLAAKGIYPAVDPLDSTSTMLQPRIVGEEHYETAQRVKQTLQRYKELQDIIAILGLDELSEEDRLTVARARKIERFLSQPFFVAEVFTGSPGKYVGLAETIRGFQLILSGELDGLPEQAFYLVGNIDEATAKAMNLKT

SEQ ID NO: 43450 - DNA, 1473 bp, Hildebrandtia africana
  CDS (1)..(1473)
  misc_feature (386)..(386): n is a, g, c or t
  misc_feature (485)..(485): n is a, g, c or t
atgagaatcaatcctactacttctggttctgaggtttccgcggttgaaaaaaaaaacctagggcgtatcgtccaaatcattggtccggtactagatgtagcttttcctcccggcaagatgcctaatatttataatgctctggtagttcaagggcgagacaatgaacaaatgaacgtggcttgcgaggtacagcaattattgggaaataatcgagtgagagctgtagctatgagtgatacagatggtctaatgagagggatggaagtgattgacacgggagctcctataagtgttcccgtcggtggagcgactctgggacgaattttcaacgtgctcggagaacctgttgataatttaggtcctgtagatactaaaacaacgtctcntattcatagatctgcgcccgcctttatacagttagatacaaaattatctatttttgaaacaggaattaaagtagtagatcttttagccccttatcgccntggaggaaaaatcggactattcgggggagctggagtggggaaaacagtactcattatggaattgattaacaatattgccaaagctcacgggggagtatccgtatttggcggagtgggtgaacgtactcgtgaaggaaatgatctttacatggaaatgaaagaatccggagtgattaatgaagaaaatattgcagaatcaaaagtggctctagtttacggtcagatgaatgaaccaccgggagctcgtatgagagttggtttgactgccctaactatggcagaatatttccgagatgttaatgagcaagacgtacttctatttatcgacaatatctttcgttttgtccaagcgggatcggaagtatcggccttactgggtagaatgccttctgctgtgggttatcaaccgaccctgagtaccgaaatgggttctttacaagaaagaattacttccaccaaagagggttctataacctcgattcaagcagtttatgtacctgcagatgatttgaccgatcctgctcctgctacgacatttgcgcatttagatgcgactaccgtactatcaagaggtttagctgccaaaggtatctatccagcagtagatcctttagattcaacgtcaacgatgcttcaacctcggatcgttggtgaggaacattatgaaactgcgcaaagagtgaagcaaactttacaacgttacaaagaacttcaggacattatagctatcctcgggttggacgaattatccgaagaggatcgtttaaccgtagcaagagcgcgaaaaattgagcgtttcttatcacaaccttttttcgtagcagaagtatttactggttctccaggaaaatatgttggtctagcagaaacaattagaggatttcaactgatcctttccggggaattagatggtcttcctgaacaggccttttatttggtaggtaatatcgatgaagctaccgcgaaggcgatgaacttaaaaacttag

SEQ ID NO: 43451 - protein, 490 aa, Hildebrandtia africana
  misc_feature (129)..(129): The Xaa at location 129 stands for Arg, His, Leu, or Pro.
  misc_feature (162)..(162): The Xaa at location 162 stands for Arg, His, Leu, or Pro.
MRINPTTSGSEVSAVEKKNLGRIVQIIGPVLDVAFPPGKMPNIYNALVVQGRDNEQMNVACEVQQLLGNNRVRAVAMSDTDGLMRGMEVIDTGAPISVPVGGATLGRIFNVLGEPVDNLGPVDTKTTSXIHRSAPAFIQLDTKLSIFETGIKVVDLLAPYRXGGKIGLFGGAGVGKTVLIMELINNIAKAHGGVSVFGGVGERTREGNDLYMEMKESGVINEENIAESKVALVYGQMNEPPGARMRVGLTALTMAEYFRDVNEQDVLLFIDNIFRFVQAGSEVSALLGRMPSAVGYQPTLSTEMGSLQERITSTKEGSITSIQAVYVPADDLTDPAPATTFAHLDATTVLSRGLAAKGIYPAVDPLDSTSTMLQPRIVGEEHYETAQRVKQTLQRYKELQDIIAILGLDELSEEDRLTVARARKIERFLSQPFFVAEVFTGSPGKYVGLAETIRGFQLILSGELDGLPEQAFYLVGNIDEATAKAMNLKT

SEQ ID NO: 43452 - DNA, 1473 bp, Odonellia hirtiflora
  CDS (1)..(1473)
atgagaatcaatcctaatacttctagttctgaggtttccgcggttgaaaaaaaaaacctggggcgtatcgtcaaaatcattggtccggtattagatgtagcttttccctccggcaagatgccttatatttataatgctctggtagttcaagggcgaaacaatgaacaaacgaacgtgacttgcgaggtacagcaattgttgggaaataatcgagttagagctgtagctatgagtgatacagatggtctaatgagagggatggaagtgattgacacgggagctcctataagtgttccggtcggtggatcgactctgggacgaattttcaacgtgctcggagaacctgttgataatttaggtcctgtagatactaatacaacgtctcctattcatagatctgcgcccgcttttatacagttagatacaaaattagctatttttgaaacaggaattaaagtagtagatcttttagccccctatcgccgtggcggaaaaatcggattattcgggggagctggagtggggaaaacagtactcattatggaattgattaacaatattgccaaagctcacgggggagtatccgtttttggcggagtgggtgaacgtactcgtgaaggaaatgatctttacttggaaatgaaagaatccggagtgattaatgaagaaaatattgcagaatcaaaagtggccctagtttacggtcagatgaacgaaccgccgggagctcgtatgagagttggtttgactgccctaactatggcagaatatttccgagatgttaatgagcaagacgtacttctatttatcgacaatatctttcgtttcgtccaagcgggatcggaagtatctgccttactgggtagaatgccttctgctgtgggttatcaaccgacgctgagtaccgaaatgggttctttacaagaaagaattacttccaccaaagagggttccataacctcgattcaagcagtttatgtacctgcagatgatttgaccgatcctgctcctgctacgacatttgcacatttagatgcgactaccgtactatcaagaggtttagctgccaaaggtatctatccagcagtagatcctttagattcaacgtcaacgatgcttcaacctcggatcgttggtgaggaacattatgaaactgcgcaaagagtgaagcaaactttacaacgttacaaagaacttcaggacattatacctatccttgggttggacgaattatccgaagaggatcgtttaaccgtagcaagagcgcgaaaaattgagcgtttcttatcacaaccttttttcgtagcagaagtctttactggttctccaggaaaatatgttggtctagcagaaacaattagaggttttcaattgatcctttccggcgaattagatggtcttcctgaacaggccttttatttggtaggtaatatcgatgaagctaccgcgaaggcgatgaacttaaaaacttag

SEQ ID NO: 43453 - protein, 490 aa, Odonellia hirtiflora
MRINPNTSSSEVSAVEKKNLGRIVKIIGPVLDVAFPSGKMPYIYNALVVQGRNNEQTNVTCEVQQLLGNNRVRAVAMSDTDGLMRGMEVIDTGAPISVPVGGSTLGRIFNVLGEPVDNLGPVDTNTTSPIHRSAPAFIQLDTKLAIFETGIKVVDLLAPYRRGGKIGLFGGAGVGKTVLIMELINNIAKAHGGVSVFGGVGERTREGNDLYLEMKESGVINEENIAESKVALVYGQMNEPPGARMRVGLTALTMAEYFRDVNEQDVLLFIDNIFRFVQAGSEVSALLGRMPSAVGYQPTLSTEMGSLQERITSTKEGSITSIQAVYVPADDLTDPAPATTFAHLDATTVLSRGLAAKGIYPAVDPLDSTSTMLQPRIVGEEHYETAQRVKQTLQRYKELQDIIPILGLDELSEEDRLTVARARKIERFLSQPFFVAEVFTGSPGKYVGLAETIRGFQLILSGELDGLPEQAFYLVGNIDEATAKAMNLKT

SEQ ID NO: 43454 - DNA, 1473 bp, Iseia luxurians
  CDS (1)..(1473)
atgagaatcaatcctactacttctagttctgaggtttccgcggttgaaaaaaaaaacctggggcgtatcgtcaaaatcattggtccggtattagatgtagcttttccctccggcaagatgccttatatttataatgctctggtagttcaagggcgagacaatgaacaaacgaacgtgacttgcgaggtacagcaattgttgggaaataatcgagttagagctgtagctatgagtgatacagatggtctaatgagagggatggaagtgattgacacgggagctcctataagtgttcccgtcggtggatcgactctgggacgaattttcaacgtgcttggagaacccgttgataatttaggtcctgtagatactaatacaacgtctcctattcatagatctgcgcccgcttttatacagttagatacaaaattagctatttttgaaacaggaattaaagtagtagatcttttagccccctatcgccgtggcggaaaaatcggattattcgggggagctggagtggggaaaacagtactcattatggaattgattaacaatattgccaaagctcacgggggagtatccgtttttggcggagtgggtgaacgtactcgtgaaggaaatgatctttacttggaaatgaaagaatccggagtgattaatgaagaaaatattgcagaatcaaaagtggccctagtttacggtcagatgaacgaaccgccgggagctcgtatgagagttggtttgactgccctaactatggcagaatatttccgagatgttaatgagcaagacgtacttctatttatcgacaatatctttcgtttcgtccaagcgggatcggaagtatctgccttactgggtagaatgccttctgctgtgggttatcaaccgacgctgagtaccgaaatgggttctttacaagaaagaattacttccaccaaagagggttccataacctcgattcaagcagtttacgtacctgcagatgatttgaccgatcctgctcctgctacgacatttgcacatttagatgcgactaccgtactatcaagaggtttagctgccaaaggtatctatccagcagtagatcctttagattcaacgtcaacgatgcttcaacctcggatcgttggtgaggaacattatgaaactgcgcaaagagtgaagcaaactttacaacgttacaaagaacttcaggacattatagctatccttgggttggacgaattatccgaagaggatcgtttaaccgtagcaagagcgcgaaaaattgagcgtttcttatcacaaccttttttcgtagcagaagtctttactggttctcccggaaaatatgttggtctagcagaaacaattagaggatttcaattgatcctttccggcgaattagatggtcttcctgaacaggccttttatttggtaggtaatatcgatgaagctaccgcgaaggcgatgaacttaaaaacttag

SEQ ID NO: 43455 - protein, 490 aa, Iseia luxurians
MRINPTTSSSEVSAVEKKNLGRIVKIIGPVLDVAFPSGKMPYIYNALVVQGRDNEQTNVTCEVQQLLGNNRVRAVAMSDTDGLMRGMEVIDTGAPISVPVGGSTLGRIFNVLGEPVDNLGPVDTNTTSPIHRSAPAFIQLDTKLAIFETGIKVVDLLAPYRRGGKIGLFGGAGVGKTVLIMELINNIAKAHGGVSVFGGVGERTREGNDLYLEMKESGVINEENIAESKVALVYGQMNEPPGARMRVGLTALTMAEYFRDVNEQDVLLFIDNIFRFVQAGSEVSALLGRMPSAVGYQPTLSTEMGSLQERITSTKEGSITSIQAVYVPADDLTDPAPATTFAHLDATTVLSRGLAAKGIYPAVDPLDSTSTMLQPRIVGEEHYETAQRVKQTLQRYKELQDIIAILGLDELSEEDRLTVARARKIERFLSQPFFVAEVFTGSPGKYVGLAETIRGFQLILSGELDGLPEQAFYLVGNIDEATAKAMNLKT

SEQ ID NO: 43456 - DNA, 1473 bp, Aniseia martinicensis
  CDS (1)..(1473)
  misc_feature (587)..(587): n is a, g, c or t
atgagaatcaatcctactacttctagttctgaggtttccgcggttgaaaaaaaaaacctggggcgtatcgtcaaaatcattggtccggtattagatgtagcttttccctccggcaagatgccttatatttataatgctctggtagttcaagggcgagacaatgaacaaacgaacgtgacttgcgaggtacagcaattgttgggaaataatcgagttagagctgtagctatgagtgatacagatggtctaatgagagggatggaagtgattgacacgggagctcctataagtgttcccgtcggtggatcgactctgggacgaattttcaacgtgcttggagaacccgttgataatttaggtcctgtagatactaatacaacgtctcctattcatagatctgcgcccgcttttatacagttagatacaaaattagctatttttgaaacaggaattaaagtagtagatcttttagccccctatcgccgtggcggaaaaatcggattattcgggggagctggagtggggaaaacagtactcattatggaattgattaacaatattgccaaagctcacgggggagtatccgnttttggcggagtgggtgaacgtactcgtgaaggaaatgatctttacttggaaatgaaagaatccggagtgattaatgaagaaaatattgcagaatcaaaagtggccctagtttacggtcagatgaacgaaccgccgggagctcgtatgagagttggtttgactgccctaactatggcagaatatttccgagatgttaatgagcaagacgtacttctatttatcgacaatatctttcgtttcgtccaagcgggatcggaagtatctgccttactgggtagaatgccttctgctgtgggttatcaaccgacgctgagtaccgaaatgggttctttacaagaaagaattacttccaccaaagagggttccataacctcgattcaagcagtttatgtacctgcagatgatttgaccgatcctgctcctgctacgacatttgcacatttagatgcgactaccgtactatcaagaggtttagctgccaaaggtatctatccagcagtagatcctttagattcaacgtcaacgatgcttcaacctcggatcgttggtgaggaacattatgaaactgcgcaaagagtgaagcaaactttacaacgttacaaagaacttcaggacattatagctatccttgggttggacgaattatccgaagaggatcgtttaaccgtagcaagagcacgaaaaattgagcgtttcttatcacaaccttttttcgtagcagaagtctttactggttctcccggaaaatatgttggtctagcagaaacaattagaggatttcaattgatcctttccggcgaattagatggtcttcctgaacaggccttttatttggtaggtaatatcgatgaagctaccgcgaaggcgatgaacttaaaaacttag

SEQ ID NO: 43457 - protein, 490 aa, Aniseia martinicensis
  misc_feature (196)..(196): The Xaa at location 196 stands for Ala, Asp, Gly, or Val.
MRINPTTSSSEVSAVEKKNLGRIVKIIGPVLDVAFPSGKMPYIYNALVVQGRDNEQTNVTCEVQQLLGNNRVRAVAMSDTDGLMRGMEVIDTGAPISVPVGGSTLGRIFNVLGEPVDNLGPVDTNTTSPIHRSAPAFIQLDTKLAIFETGIKVVDLLAPYRRGGKIGLFGGAGVGKTVLIMELINNIAKAHGGVSXFGGVGERTREGNDLYLEMKESGVINEENIAESKVALVYGQMNEPPGARMRVGLTALTMAEYFRDVNEQDVLLFIDNIFRFVQAGSEVSALLGRMPSAVGYQPTLSTEMGSLQERITSTKEGSITSIQAVYVPADDLTDPAPATTFAHLDATTVLSRGLAAKGIYPAVDPLDSTSTMLQPRIVGEEHYETAQRVKQTLQRYKELQDIIAILGLDELSEEDRLTVARARKIERFLSQPFFVAEVFTGSPGKYVGLAETIRGFQLILSGELDGLPEQAFYLVGNIDEATAKAMNLKT

SEQ ID NO: 43458 - DNA, 1473 bp, Convolvulus sagittatus
  CDS (1)..(1473)
atgagaatcaatcctactacttctggctctgaagtttccgcggttgaaaaaaaaaacctggggcgtatcgtaaaaatcatcggtccggtattagatgtagcttttccccccggcaagatgcctaatatttataatgctctggtagttcaagggcgagacaatgaacaaacgaacgtgacttgcgaggtacagcaattattgggaaataatcgagttagagctgtagctatgagtgatacagatggtctaatgagagggatggaagtgattaacacgggagctcctataagtgttcccgtcggtggatcaactctgggacgaattttcaacgtgctcggacaacctgttgataatttaggtcctgtagatactaatacaacgtctcctattcatagatctgcgcccgcctttatacagttagatacaaaattatctatttttgaaaccggaattaaagtagtagatcttttagccccctatcgccgtggaggaaaaatcggactatttgggggagctggggtggggaaaacagtactcattatggaattgattaacaatattgctaaagctcacgggggagtatccgtatttggcggagtgggtgaacgtactcgtgaaggaaatgatctttacatggaaatgaaagaatccggagtgattaatgaagaaaatattgcagaatccaaagtggccctagtttacggtcagatgaatgaaccgccgggagctcgtatgagagttggtttgactgccctaactatggcagaatatttccgagatgttaatgagcaagacgtacttctctttatcgacaatatctttcgtttcgtccaagcgggatcggaagtatcggccttactgggtagaatgccttctgctgtgggttatcaaccgacgctgagtaccgaaatgggtactttacaagaaagaattacttccaccaaagaaggttccataacctcgattcaagcagtttatgtacctgcagatgatttgaccgatcctgctcctgctacgacatttgcacatttagatgcgactaccgtactatcaagaggtttagctgccaaaggtatctatccagcagtagatcctttagattcaacgtcaatgatgcttcaacctcgaatcgttggtgaggaacattatgaaactgcgcaaagagttaagcaaactttacaacgttacaaagaacttcaggacattatagctatccttgggttggacgaattatccgaagaggatcgtttaaccgtagcaagagcgcgaaaaattgagcgtttcttatcacaaccctttttcgtagcagaagtatttacaggttctccaggaaaatatgttggtctagcagaaacaattagaggatttcaattgatcctttccggcgaattagatggtcttcctgaacaggccttttatttggtaggtaatatcgatgaagctaccgcgaaggcgatgaacttaaaaacttag

SEQ ID NO: 43459 - protein, 490 aa, Convolvulus sagittatus
MRINPTTSGSEVSAVEKKNLGRIVKIIGPVLDVAFPPGKMPNIYNALVVQGRDNEQTNVTCEVQQLLGNNRVRAVAMSDTDGLMRGMEVINTGAPISVPVGGSTLGRIFNVLGQPVDNLGPVDTNTTSPIHRSAPAFIQLDTKLSIFETGIKVVDLLAPYRRGGKIGLFGGAGVGKTVLIMELINNIAKAHGGVSVFGGVGERTREGNDLYMEMKESGVINEENIAESKVALVYGQMNEPPGARMRVGLTALTMAEYFRDVNEQDVLLFIDNIFRFVQAGSEVSALLGRMPSAVGYQPTLSTEMGTLQERITSTKEGSITSIQAVYVPADDLTDPAPATTFAHLDATTVLSRGLAAKGIYPAVDPLDSTSMMLQPRIVGEEHYETAQRVKQTLQRYKELQDIIAILGLDELSEEDRLTVARARKIERFLSQPFFVAEVFTGSPGKYVGLAETIRGFQLILSGELDGLPEQAFYLVGNIDEATAKAMNLKT

SEQ ID NO: 43460 - DNA, 1473 bp, Merremia peltata
  CDS (1)..(1473)
atgagaatcaatcctactacttctggttctgaagtttccgcggctgaaaaaaaaaacctggggcgtatcgtcaaaatcattggtccggtattagatgtagcttttcccccccgcaagatgcctaatatttataatgctctggtagttcaagggcgagacaatgaacaaacgaacgtgacttgcgaggtacagcaattattgggaaataatcgagttagagctgtagctatgagtgatacagatggtctaatgagagggatggaagtgattgacacgggagctcctataagtgttcccgtcggtggatcgactctgggacgaattttcaacgtgctcggacaacctgttgataatttaggtcctgtagatactaatacaacgtctcctattcatagatctgcgcccgcctttatacagttagatacaaaattatctatttttgaaacaggaattaaagtagtagatcttttagccccctatcgccgtggaggaaaaatcggactatttgggggagctggagtggggaaaacagtactcattatggaattgattaacaatattgccaaagctcacgggggagtatccgtatttggcggagtgggcgaacgtactcgtgaaggaaatgatctttacttggaaatgaaagaatccggagtgattaatgaagaaaatattgcagaatcaaaagtggccctagtttacggtcagatgaatgaaccgccgggagctcgtatgagagttggtttgactgccctaactatggcagaatatttccgagatgttaatgagcaagacgtacttctatttatcgacaatatctttcgtttcgtccaagcgggatcggaagtatcggccttactgggtagaatgccttctgctgtgggttatcaaccgacgctgagtaccgaaatgggttctttacaagaaagaattacttccaccaaagaaggttccataacctcgattcaagcagtttatgtacctgcagatgatttgaccgatcctgctcctgctacgacatttgcacatttagatgcgactaccgtactatcaagaggtttagctgccaaaggtatctatccagcagtagatcctttagattcaacgtcaacgatgcttcaacctcggatcgttggtgaggaacattatgaaactgcgcaaagagttaagcaaactttacaacgttacaaagaacttcaggacattatagctatccttgggttggacgaattatccgaagaggatcgtttaaccgtagcaagagcgcgaaaaattgagcgtttcttatcacaaccttttttcgtagcagaagtatttactggttctccaggaaaatatgttggtctagcagaaacaattagaggatttcaattgatcctttccggcgaattagatggtcttcctgaacaggccttttatttggtaggtaatatcgatgaagctaccgcgaaggcgatgaacttaaaaacttag

SEQ ID NO: 43461 - protein, 490 aa, Merremia peltata
MRINPTTSGSEVSAAEKKNLGRIVKIIGPVLDVAFPPRKMPNIYNALVVQGRDNEQTNVTCEVQQLLGNNRVRAVAMSDTDGLMRGMEVIDTGAPISVPVGGSTLGRIFNVLGQPVDNLGPVDTNTTSPIHRSAPAFIQLDTKLSIFETGIKVVDLLAPYRRGGKIGLFGGAGVGKTVLIMELINNIAKAHGGVSVFGGVGERTREGNDLYLEMKESGVINEENIAESKVALVYGQMNEPPGARMRVGLTALTMAEYFRDVNEQDVLLFIDNIFRFVQAGSEVSALLGRMPSAVGYQPTLSTEMGSLQERITSTKEGSITSIQAVYVPADDLTDPAPATTFAHLDATTVLSRGLAAKGIYPAVDPLDSTSTMLQPRIVGEEHYETAQRVKQTLQRYKELQDIIAILGLDELSEEDRLTVARARKIERFLSQPFFVAEVFTGSPGKYVGLAETIRGFQLILSGELDGLPEQAFYLVGNIDEATAKAMNLKT

SEQ ID NO: 43462 - DNA, 1473 bp, Operculina pteripes
  CDS (1)..(1473)
atgagaatcaatcctactacttctggttctgaagtttccgcggttgaaaaaaaaaacctggggcgtatcgtcaaaatcattggtccggtattagatgtagcttttcccccccgcaagatgcctaatatttataatgctctggtagttcaagggcgagacaatgaacaaacgaacgtgacttgcgaggtacagcaattattgggaaataatcgagtaagagctgtagctatgagtgatacagatggtctaatgagagggatgggagtgattgacacgggagctcctataagtgttcccgtcggtggatcgactctgggacgaattttcaacgtgctcggacaacctgttgataatttaggtcctgtagatactaatacaacgtctcctattcatagatctgcgcccgcctttatacagttagatacaaaattatctatttttgaaacaggaattaaagtagtagatcttttagccccctatcgccgtggaggaaaaatcggactatttgggggagctggagtggggaaaacagtactcattatggaattgattaacaatattgccaaagctcacgggggagtatccgtatttggcggagtgggtgaacgtactcgtgaaggaaatgatctttacttggaaatgaaagaatccggagttattaatgaagaaaatattgcagaatcaaaagtggccctagtttacggtcagatgaatgaaccgccgggagctcgtatgagagttggtttgactgccctaactatggcagaatatttccgagatgttaatgagcaagacgtacttctatttatcgacaatatctttcgtttcgtccaagcgggatcggaagtatcggccttactgggtagaatgccttctgctgtgggttatcaaccgacgctgagtaccgaaatgggttctttacaagaaagaattacttccaccaaagaaggttccataacctcgattcaagcagtttatgtacctgcagatgatttgaccgatcctgctcctgctacgacatttgcacatttagatgcgactaccgtactatcaagaggtttagctgccaaaggtatctatccagcagtagatcctttagattcaacgtcaacgatgcttcaacctcggatcgttggtgaggaacattatgaaactgcgcaaagagttaagcaaactttacaacgttacaaagaacttcaggacattatagctatccttgggttggacgaattatccgaagaggatcgtttaaccgtagcaagagcgcgaaaaattgagcgtttcttatcacaaccctttttcgtagcagaagtatttactggttctccaggaaaatatgttggtctagcagaaacaattagaggatttcaattgatcctttccggcgaattagatggtcttcctgaacaggccttttatttggtaggtaatatcgatgaagctaccgcgaaggcgatgaccttaaaaacttag

SEQ ID NO: 43463 - protein, 490 aa, Operculina pteripes
MRINPTTSGSEVSAVEKKNLGRIVKIIGPVLDVAFPPRKMPNIYNALVVQGRDNEQTNVTCEVQQLLGNNRVRAVAMSDTDGLMRGMGVIDTGAPISVPVGGSTLGRIFNVLGQPVDNLGPVDTNTTSPIHRSAPAFIQLDTKLSIFETGIKVVDLLAPYRRGGKIGLFGGAGVGKTVLIMELINNIAKAHGGVSVFGGVGERTREGNDLYLEMKESGVINEENIAESKVALVYGQMNEPPGARMRVGLTALTMAEYFRDVNEQDVLLFIDNIFRFVQAGSEVSALLGRMPSAVGYQPTLSTEMGSLQERITSTKEGSITSIQAVYVPADDLTDPAPATTFAHLDATTVLSRGLAAKGIYPAVDPLDSTSTMLQPRIVGEEHYETAQRVKQTLQRYKELQDIIAILGLDELSEEDRLTVARARKIERFLSQPFFVAEVFTGSPGKYVGLAETIRGFQLILSGELDGLPEQAFYLVGNIDEATAKAMTLKT

SEQ ID NO: 43464 - DNA, 1473 bp, Xenostegia tridentata
  CDS (1)..(1473)
atgagaatcaatcctactacttctggttctgaagtttccgcggttgaaaaaaaaaacctggggcgtatcgtcaaaatcattggtccggtattagatgtagcttttcccccggggaagatgcctaatatttataatgctctggtagttcaagggcgagacaatgaacaaacgaacgtgacttgcgaggtacagcaattattgggaaataatctagttagagctgtagctatgagtgatacagatggtctaaagagagggatggaagtgattgacacgggagctcctataagtgttcccgtcggtggatcgactctgggacgaattttcaacgtgctcggacaacctgttgataatttaggtcctgtagatactaatacaacgtctcctattcatagatctgcgcccgcctttatacagttagatacaaaattatctatttttgaaacaggaattaaagtagtagatcttttagccccctatcgccgtggaggaaaaatcggactatttgggggagctggagtggggaaaacagtactcattatggaattgattaacaatattgccaaagctcacgggggagtatccgtatttggcggagtgggtgaacgtactcgtgaaggaaatgatctttacttggaaatgaaagaatccggagtgattaatgaagaaaatattgcagaatctaaagtggccctagtttacggtcagatgaatgaaccgccgggagctcgtatgagagttggtttgactgccctaactatggcagaatatttccgagatgttaatgagcaagacgtacttctatttatcgacaatatctttcgtttcgtccaagcgggatcggaagtatcggccttactgggtagaatgccttccgctgtgggttatcaaccgacgctgagtaccgaaatgggttctttacaagaaagaattacttccaccaaagaaggttccataacctcgattcaagcagtttatgtacctgcagatgatttgaccgatcctgctcctgctaccacatttgcacatttagatgcgactaccgtactatcaagaggtttagctgccaaaggtatctatccagcagtagatcctttagattcaacgtcaatgatgcttcaacctcggatcgttggtgaggaacattatgaaactgcgcaaagagttaagcaaactttacaacgttacaaagaacttcaggacattatagctatccttgggttggacgaattatccgaagaggatcgtttaaccgtagcaagagcgcgaaaaattgagcgtttcttatcacaaccctttttcgtagcagaagtatttactggttctccaggaaaatatgttggtctagtagaaacaattagaggatttcaattgatcctttccggcgaattagatggtcttcctgaacaggccttttatttggtaggtaatatcgatgaagctaccgcgaaggcgatgaacttaaaaacttag

SEQ ID NO: 43465 - protein, 490 aa, Xenostegia tridentata
MRINPTTSGSEVSAVEKKNLGRIVKIIGPVLDVAFPPGKMPNIYNALVVQGRDNEQTNVTCEVQQLLGNNLVRAVAMSDTDGLKRGMEVIDTGAPISVPVGGSTLGRIFNVLGQPVDNLGPVDTNTTSPIHRSAPAFIQLDTKLSIFETGIKVVDLLAPYRRGGKIGLFGGAGVGKTVLIMELINNIAKAHGGVSVFGGVGERTREGNDLYLEMKESGVINEENIAESKVALVYGQMNEPPGARMRVGLTALTMAEYFRDVNEQDVLLFIDNIFRFVQAGSEVSALLGRMPSAVGYQPTLSTEMGSLQERITSTKEGSITSIQAVYVPADDLTDPAPATTFAHLDATTVLSRGLAAKGIYPAVDPLDSTSMMLQPRIVGEEHYETAQRVKQTLQRYKELQDIIAILGLDELSEEDRLTVARARKIERFLSQPFFVAEVFTGSPGKYVGLVETIRGFQLILSGELDGLPEQAFYLVGNIDEATAKAMNLKT

SEQ ID NO: 43466 - DNA, 1473 bp, Stictocardia tiliifolia
  CDS (1)..(1473)
atgagaatcaatcctactacttctggttctgaagtttccgcggttgaaaaaaaaaacctggggcgtatcgtcaaaatcattggtccggtattagatgtagcttttccccccggcaagatgcctaatatttataatgctctggtagttcaagggcgagacaatgaacaaacgaacgtgacttgcgaggtacagcaattattgggaaataatcgagttagagctgtagctatgagtgataccgatggtctaatgagagggatggaagtgattgacatgcgagctcctataagtgttccggtcggtggatcgactctgggacgaattttcaacgtgctcggacaacctgttgataatttaggtcctgtagatactaatacaacgtctcctattcatagatctgcgcccgcctttatacagttagatacaaaattatctatttttgaaacaggaattaaagtagtagatcttttagccccctatcgccgtggaggaaaaatcggactatttgggggagctggagtggggaaaacagtactcattatggaattgattaacaatattgccaaagctcacgggggagtatccgtatttggcggagtgggtgaacgtactcgtgaaggaaatgatctttacttggaaatgaaagaatccggagtgattaatgaagaaaatattgcagaatcaaaagtggccctagtttacggtcagatgaatgaaccgccgggagctcgtatgagagttggtttgactgccctaactatggcagaatatttccgagatgttaatgagcaagacgtacttctatttatcgacaatatctttcgtttcgtccaagcgggatcggaagtatcggccttactaggtagaatgccttctgctgtgggttatcaaccgaccctgagtaccgaaatgggttctttacaagaaagaattacttccaccaaagaaggttccataacctcgattcaagcagtttatgtacctgcagatgatttgaccgatcctgctcctgctacgacatttgcacatttagatgcgactaccgtactatcaagaggtttagctgccaaaggtatctatccagcagtagatcctttagattcaacgtcaacgatgcttcaacctcggatcgttggtgaggaacattatgaaactgcgcaaagagttaagcaaactttacaacgttacaaagaacttcaggacattatagctatccttgggttggacgaattatccgaagaggatcgtttaaccgtagcaagagcgcgaaaaattgagcgtttcttatcacaaccctttttcgtagcagaagtatttactggttctccaggaaaatatgttggtctagcagaaacaattagaggatttcaattgatcctttccggcgaattagatggtcttcctgaacaggccttttatttggtaggtaatatcgatgaagctaccgcgaaggcgatgaacttaaaaacttag

SEQ ID NO: 43467 - protein, 490 aa, Stictocardia tiliifolia
MRINPTTSGSEVSAVEKKNLGRIVKIIGPVLDVAFPPGKMPNIYNALVVQGRDNEQTNVTCEVQQLLGNNRVRAVAMSDTDGLMRGMEVIDMRAPISVPVGGSTLGRIFNVLGQPVDNLGPVDTNTTSPIHRSAPAFIQLDTKLSIFETGIKVVDLLAPYRRGGKIGLFGGAGVGKTVLIMELINNIAKAHGGVSVFGGVGERTREGNDLYLEMKESGVINEENIAESKVALVYGQMNEPPGARMRVGLTALTMAEYFRDVNEQDVLLFIDNIFRFVQAGSEVSALLGRMPSAVGYQPTLSTEMGSLQERITSTKEGSITSIQAVYVPADDLTDPAPATTFAHLDATTVLSRGLAAKGIYPAVDPLDSTSTMLQPRIVGEEHYETAQRVKQTLQRYKELQDIIAILGLDELSEEDRLTVARARKIERFLSQPFFVAEVFTGSPGKYVGLAETIRGFQLILSGELDGLPEQAFYLVGNIDEATAKAMNLKT

SEQ ID NO: 43468 - DNA, 1473 bp, Lepistemon owariensis
  CDS (1)..(1473)
atgagaatcaatcctactacttctggttctgaagtttccgcggttgaaaaaaaaaacctggggcgtatcgtcaaaatcattggtccggtattagatgtagcttttccccccggcaagatgcctaatatttataatgctctggtagttcaagggcgagacaatgaacaaacgaacgtgacttgcgaggtacagcaattattgggaaataatcgagttagagctgtagctatgagtgatacagatggtctaatgagagggatggacgtgattgacacgcgagctcctataagtgttccggtcggtggatcgactctgggacgaattttcaacgtgctcggacaacctgttgataatttaggtcctgtagatactaatacaacgtctcctattcatagatctgcgcccgcctttatacagttagatacaaaattatctatttttgaaacaggaattaaagtagtagatcttttagccccctatcgccgtggaggaaaaatcggactatttgggggagctggagtggggaaaacagtactcattatggaattgattaacaatattgccaaagctcacgggggagtatccgtatttggcggagtgggtgaacgtactcgtgaaggaaatgatctttacttggaaatgaaagaatccggagtcattaatgaagaaaatattgcagaatcaaaagtggccctagtttacggtcagatgaatgaaccgccgggagctcgtatgagagttggtttgactgccctaactatggcagaatatttccgagatgttaatgagcaagacgtacttctatttatcgacaatatctttcgtttcgtccaagcgggatcggaagtatcggccttactaggtagaatgccgtctgctgtgggttatcaaccgaccctgagtaccgaaatgggttctttacaagaaagaattacttccaccaaagaaggttccataacctcgattcaagcagtttatgtacctgcagatgatttgaccgatcctgctcctgctacgacatttgcacatttagatgcgactaccgtactatcaagaggtttagctgccaaaggtatctatccagcagtagatcctttagattcaacgtcaacgatgcttcaacctcggatcgttggtgaggaacattatgaaactgcgcaaagagttaagcaaactttacaacgttacaaagaacttcaggacattatagctatccttgggttggacgaattatccgaagaggatcgtttaaccgtagcaagagcgcgaaaaattgagcgtttcttatcacaaccctttttcgtagcagaagtatttactggttctccaggaaaatatgttggtctagcagaaacaattagaggatttcaattgatcctttccggcgaattagatggtcttcctgaacaggccttttatttggtaggtaatatcgatgaagctaccgcgaaggcgatgaacttaaaaacttaa

SEQ ID NO: 43469 - protein, 490 aa, Lepistemon owariensis
MRINPTTSGSEVSAVEKKNLGRIVKIIGPVLDVAFPPGKMPNIYNALVVQGRDNEQTNVTCEVQQLLGNNRVRAVAMSDTDGLMRGMDVIDTRAPISVPVGGSTLGRIFNVLGQPVDNLGPVDTNTTSPIHRSAPAFIQLDTKLSIFETGIKVVDLLAPYRRGGKIGLFGGAGVGKTVLIMELINNIAKAHGGVSVFGGVGERTREGNDLYLEMKESGVINEENIAESKVALVYGQMNEPPGARMRVGLTALTMAEYFRDVNEQDVLLFIDNIFRFVQAGSEVSALLGRMPSAVGYQPTLSTEMGSLQERITSTKEGSITSIQAVYVPADDLTDPAPATTFAHLDATTVLSRGLAAKGIYPAVDPLDSTSTMLQPRIVGEEHYETAQRVKQTLQRYKELQDIIAILGLDELSEEDRLTVARARKIERFLSQPFFVAEVFTGSPGKYVGLAETIRGFQLILSGELDGLPEQAFYLVGNIDEATAKAMNLKT

SEQ ID NO: 43470 - DNA, 1473 bp, Turbina corymbosa
  CDS (1)..(1473)
  misc_feature (1351)..(1351): n is a, g, c or t
atgagaatcaatcctactacttctggctctgaagtttccgcggttgaaaaaaaaaacctggggcgtatcgtcaaaatcattggtccggtattagatgtagcttttccccccgggaagatgcctaatatttataatgctctggtagttcaagggcgagacaatgaacaaacgaacgtgacttgcgaggtacagcaattattgggaaataatcgagttagagctgtagctatgagtgatacagatggtctaatgagagggatggaagtgattgacacgcgagctcctataagtgttccggtcggtggatcgactctgggacgaattttcaacgtgctcggacaacctgttgataatttaggtcctgtagatactaatacaacgtctcctattcatagatctgcgcccgcctttatacagttagatacaaaattatctatttttgaaacaggaattaaagtagtagatcttttagccccctatcgccgtggaggaaaaatcggactatttgggggagctggagtggggaaaacagtactcattatggaattgattaacaatattgccaaagctcacgggggagtatccgtatttggcggagtgggtgaacgtactcgtgaaggaaatgatctttacttggaaatgaaagaatccggagtgattaatgaagaaaatattgcagaatcaaaagtggccctagtttacggtcagatgaatgaaccgccgggagctcgtatgagagttggtttgactgccctaactatggcagaatatttccgagatgttaatgagcaagatgtacttctatttatcgacaatatctttcgtttcgtccaagcgggatcggaagtatcggccttactaggtagaatgccttctgctgtgggttatcaaccgaccctgagtaccgaaatgggttctttacaagaaagaattacttccaccaaagaaggttccataacctcgattcaagcagtttatgtacctgcggatgatttgaccgatcctgctcctgctacgacatttgcacatttagatgcaactaccgtactatcaagaggtttagctgccaaaggtatctatccagcagtagatcctttagattcaacgtcaacgatgcttcaacctcggatcgttggtgaggaacattatgaaactgcgcaaagagttaagcaaactttacaacgttacaaagaacttcaggacattatagctatccttgggttggacgaattatccgaagaggatcgtttaaccgtagcaagagcgcgaaaaattgagcgtttcttatcacaaccctttttcgtagcagaagtatttactggttctccaggaaaatatgttggtctagcanaaacaattagaggatttcaattgatcctttccggcgaattagatggtcttcctgaacaggccttttatttggtaggtaatatcgatgaagctaccgcgaaggcgatgaacttaaaaacttag

SEQ ID NO: 43471 - protein, 490 aa, Turbina corymbosa
  misc_feature (451)..(451): The Xaa at location 451 stands for Stop, Gln, Glu, or Lys.
MRINPTTSGSEVSAVEKKNLGRIVKIIGPVLDVAFPPGKMPNIYNALVVQGRDNEQTNVTCEVQQLLGNNRVRAVAMSDTDGLMRGMEVIDTRAPISVPVGGSTLGRIFNVLGQPVDNLGPVDTNTTSPIHRSAPAFIQLDTKLSIFETGIKVVDLLAPYRRGGKIGLFGGAGVGKTVLIMELINNIAKAHGGVSVFGGVGERTREGNDLYLEMKESGVINEENIAESKVALVYGQMNEPPGARMRVGLTALTMAEYFRDVNEQDVLLFIDNIFRFVQAGSEVSALLGRMPSAVGYQPTLSTEMGSLQERITSTKEGSITSIQAVYVPADDLTDPAPATTFAHLDATTVLSRGLAAKGIYPAVDPLDSTSTMLQPRIVGEEHYETAQRVKQTLQRYKELQDIIAILGLDELSEEDRLTVARARKIERFLSQPFFVAEVFTGSPGKYVGLAXTIRGFQLILSGELDGLPEQAFYLVGNIDEATAKAMNLKT

SEQ ID NO: 43472 - DNA, 1473 bp, Astripomoea grantii
  CDS (1)..(1473)
atgagaatcaatcctactacttctggttctgaagtttccacggttgaaaaaaaaaacctggggcgtatcgtcaaaatcattggtccggtattagatgtagctttcccccccgggaagatgcctaatatttataatgctctggtagttcaagggcgagacaatgaacaaacgaacgtgacttgcgaggtacagcaattattgggaaataatcgagttagagctgtagctatgagtgatacagatggtctaatgagagggatgggagtgattgacacgagagctcctataagtgttccggtcggtggatcgactctgggacgaattttcaacgtgctcggacaacctgttgataatttaggtcctgtagatactaatacaacgtctcctattcatagatctgcgcccgcctttatacagttagatacaaaattatctatttttgaaacaggaattaaagtagtagatcttttagccccctatcgccgtgggggaaaaatcggactatttgggggagctggagtggggaaaacagtactcattatggaattgattaacaatattgccaaagctcacgggggagtatccgtatttggcggagtgggtgaacgtactcgtgaaggaaatgatctttacttggaaatgaaagaatccggagtgattaatgaagaaaatattgcagaatcaaaagtggccctagtttacggtcagatgaatgaaccgccgggagctcgtatgagagttggtttgactgccctaactatggcagaatatttccgagatgttaatgagcaagacgtacttctatttatcgacaatatctttcgtttcgtccaagcgggatcggaagtatcggccttactgggtagaatgccttctgctgtgggttatcaaccgaccctgagtaccgaaatgggttctttacaagaaagaattacttccaccaaagaaggttccataacctcgattcaagcagtttatgtacctgcagatgatttgaccgatcctgctcctgctacgacatttgcacatttagatgcgactaccgtactatcaagaggtttagctgccaaaggtatctatccagcagtagatcctttagattcaacgtcaacgatgcttcaacctcggatcgttggtgaggaacattatgaaactgcgcaaagagttaagcaaactttacaacgttacaaagaacttcaggacattatagctatccttgggttggacgaattatccgaagaggatcgtttaaccgtagcaagagcgcgaaaaattgagcgtttcttatcacaaccctttttcgtagcagaagtatttactggttctccaggaaaatatgttggtctagcagaaacaattagaggatttcaattgatcctttccggcgaattagatggtcttcctgaacaggccttttatttggtaggtaatatcgatgaagctaccgcgaaggcgatgaacttaaaaacttag

SEQ ID NO: 43473 - protein, 490 aa, Astripomoea grantii
MRINPTTSGSEVSTVEKKNLGRIVKIIGPVLDVAFPPGKMPNIYNALVVQGRDNEQTNVTCEVQQLLGNNRVRAVAMSDTDGLMRGMGVIDTRAPISVPVGGSTLGRIFNVLGQPVDNLGPVDTNTTSPIHRSAPAFIQLDTKLSIFETGIKVVDLLAPYRRGGKIGLFGGAGVGKTVLIMELINNIAKAHGGVSVFGGVGERTREGNDLYLEMKESGVINEENIAESKVALVYGQMNEPPGARMRVGLTALTMAEYFRDVNEQDVLLFIDNIFRFVQAGSEVSALLGRMPSAVGYQPTLSTEMGSLQERITSTKEGSITSIQAVYVPADDLTDPAPATTFAHLDATTVLSRGLAAKGIYPAVDPLDSTSTMLQPRIVGEEHYETAQRVKQTLQRYKELQDIIAILGLDELSEEDRLTVARARKIERFLSQPFFVAEVFTGSPGKYVGLAETIRGFQLILSGELDGLPEQAFYLVGNIDEATAKAMNLKT

SEQ ID NO: 43474 - DNA, 1386 bp, Colwellia maris
  CDS (1)..(1386): transl_table=11
atgagtacaggtaaagtcgtccaaataattggcgcagttgtggatgttgaatttccacaagatgccgtacctcaggtatatgacgcagtaaaaataaccgaaggtgaccttgaaggtttagtacttgaagttcaacagcagcttggtggcggcgttgtacgtactatcgcaatgggttcttcagacggtttgcgtcgtggactgaatgtagaaaatacaggccaaggtattcaagtacctgttggtgttgagaccttaggtcgaatcatgaacgttcttggtgagccaattgatgaagctggtcctatcggcgaaaaagaccgttggtctattcaccgtgaagcgcctgcttatgctgaacagtcaatgtctaacgaattgttagaaactggtatcaaagtaatcgatttagtttgtccattcgctaagggtggtaaagtaggtcttttcggtggtgctggtgttggtaaaacagtaaacatgatggaacttatccgtaacatcgctatcgagcacagcggctactcagtatttgccggtgttggtgagcgtacacgtgaaggtaacgatttctatcacgaaatgaacgattctaacgtacttgataaagtatcgttagtttacggtcaaatgaacgagcctccaggaaaccgtttacgtgttgcctttactggtttaactatggctgaaaaattccgtgacgaaggtcgtgacgtattattcttcgtagataacatttaccgttatacccttgcgggtactgaagtatcagcactacttggtcgtatgccatcagcggttggttatcaaccaacacttgctgaagagatgggtatattacaagagcgtattacttcaacaaacaaaggctcaatcacttcaatccaagcggtatacgtacctgcggatgatttaactgaccctagccctgcaactacttttgctcacttagatgcaactgttgtattaagtcgtgatattgcttcgcaaggtatttaccctgcgattgacccattagattcatcttcacgtcagttagacccgttagtggttggtgctgaacattatgaaactgctcgtggcgttcaaacagtattacaacgttacaaagaacttaaagatatcatcgccatcttaggtatggatgagttatctgaagatgataagcaaactgtattccgtgcacgtaaaatacaacgtttcttatctcagccgttcttcgttgctgaagtatttactggttctccaggtaaatatgtttcattaaaagacaccattgccggctttaaaggcattttagctggtgattttgatgatatgcctgagcaagcattctatatggttggttctattgaagaagccgtagagaaagcaagtaagatgtaa

SEQ ID NO: 43475 - protein, 461 aa, Colwellia maris
MSTGKVVQIIGAVVDVEFPQDAVPQVYDAVKITEGDLEGLVLEVQQQLGGGVVRTIAMGSSDGLRRGLNVENTGQGIQVPVGVETLGRIMNVLGEPIDEAGPIGEKDRWSIHREAPAYAEQSMSNELLETGIKVIDLVCPFAKGGKVGLFGGAGVGKTVNMMELIRNIAIEHSGYSVFAGVGERTREGNDFYHEMNDSNVLDKVSLVYGQMNEPPGNRLRVAFTGLTMAEKFRDEGRDVLFFVDNIYRYTLAGTEVSALLGRMPSAVGYQPTLAEEMGILQERITSTNKGSITSIQAVYVPADDLTDPSPATTFAHLDATVVLSRDIASQGIYPAIDPLDSSSRQLDPLVVGAEHYETARGVQTVLQRYKELKDIIAILGMDELSEDDKQTVFRARKIQRFLSQPFFVAEVFTGSPGKYVSLKDTIAGFKGILAGDFDDMPEQAFYMVGSIEEAVEKASKM

SEQ ID NO: 43476 - DNA, 1497 bp, Lanaria lanata
  CDS (1)..(1497)
atgagaatcaatcctactacttctgaccctgcggtttccacacttggaaaaaaaaacctagggcgtatcgtccaaattattggcccagtactggatgtcgtttttcccccgggcaagatgcctaatatttataacgctctggtagttaagggtcgagatattgtcggtcagcaaattaatgtgacttgtgaggtacagcaattattaggaaataatcgagttagagctgtagctatgagtgctacagatggtctgacgagaggaatggaagtgcttgacacgggagctcctctaagtgttccagtcggcggagctactctcggacgaattttcaacgttcttggagagcccgttgataatttaggtcctgtagatactcgcacaacatctcctattcatagatccgcgcctgcctttatacagttagatacgaaattatcaatctttgaaacagggattaaagtggtggatcttttagctccttatcgccgtggaggaaaaatcggactatttgggggagctggagtgggtaaaacagtacttatcatggaattgatcaacaacattgccaaagctcatggaggcgtatccgtatttggcggagtaggcgaacgtactcgtgaaggaaatgatctctacatggaaatgaaagaatccggggtaattaatgaaaaaaatattgcagaatcaaaagtggctctagtctatggtcaaatgaatgaaccgccgggagctcgtatgagagttggtttgactgccctaaccatggcggaatacttccgggatgttaatgaacaagacgtgcttctattcatcgacaatatctttcgttttgtccaagcagggtcagaagtatccgccttattagggagaatgccttctgcagtgggttatcaacctacccttagtacagaaatgggtactttgcaagaaagaattacttctaccaaagagggatctataacttcgatccaagcagtttatgtacctgcggacgatttgaccgaccctgctcctgccacgacatttgcgcatttagatgctactaccgtactatcaagaggattagctgccaaaggtatttatccggcagtggatcctttagattcaacgtcaactatgttacaacctcggatcgttggcgaggaacattatgaaactgcgcaaagagttaagcaaacttcacaacgttacaaagaacttcaggacattatagctatccttgggttggacgaattatccgaagaggatcgtttaactgtagcaagagcacgaaaaattgagcgtttcttatcacaaccctttttcgtggcagaagtatttaccggttctccagggaaatatgttggtctcgcagaaacaattagggggtttcaactgatcctttccggagaattagacggtcttcccgagcaggccttttatttggtgggtaacatcgatgaagctaccgcgaaagctatgaacttagaaatggagagcaatttgaagaaatga

SEQ ID NO: 43477 - protein, 498 aa, Lanaria lanata
MRINPTTSDPAVSTLGKKNLGRIVQIIGPVLDVVFPPGKMPNIYNALVVKGRDIVGQQINVTCEVQQLLGNNRVRAVAMSATDGLTRGMEVLDTGAPLSVPVGGATLGRIFNVLGEPVDNLGPVDTRTTSPIHRSAPAFIQLDTKLSIFETGIKVVDLLAPYRRGGKIGLFGGAGVGKTVLIMELINNIAKAHGGVSVFGGVGERTREGNDLYMEMKESGVINEKNIAESKVALVYGQMNEPPGARMRVGLTALTMAEYFRDVNEQDVLLFIDNIFRFVQAGSEVSALLGRMPSAVGYQPTLSTEMGTLQERITSTKEGSITSIQAVYVPADDLTDPAPATTFAHLDATTVLSRGLAAKGIYPAVDPLDSTSTMLQPRIVGEEHYETAQRVKQTSQRYKELQDIIAILGLDELSEEDRLTVARARKIERFLSQPFFVAEVFTGSPGKYVGLAETIRGFQLILSGELDGLPEQAFYLVGNIDEATAKAMNLEMESNLKK

SEQ ID NO: 43478 - DNA, 1519 bp, Stylobasium spathulatum
  CDS (1)..(1497)
atgagaatcaatcctacaacttctgatcctggggtttccgcgcttgaaaaaaaaaacccggggcgtatcgctcaaataattggtccggtactggatgtagcttttcccccagggaagatgcctaatatttacaacgctttggtagttaagggccgagatactgtcggccaacaaattaacgtgacttgtgaagtacagcaattattaggaaataatcgagttagggctgtagctatgagtgctacagatggtctaatgagagggatggaagtgattgacacgggagctcctctaagtgttccggtcggcggagctactctaggacgaattttcaacgtgcttggagagcccattgataatttgggtcctgtagatactcgcacaacatctcctattcatagatccgcacccgcctttatacaattagatacaaaattatccatttttgaaacaggaattaaagtagtagatcttttagctccttatcgccgtggaggaaaaataggactattcgggggagctggagtgggtaaaacagtactaattatggaattgataaacaacattgccaaagctcacggaggtgtatccgtatttgggggagtaggggaacgtacgcgtgagggaaatgatctttacatggaaatgaaagaatctggagtaattaatgaacaaaatattgcagaatcaaaagtggctctagtctacggtcaaatgaatgaaccaccgggagctcgtatgagagttggtttaactgccctaactatggcggaatatttccgagatgttaatgaacaagacgtacttctatttatcgacaatatcttccgcttcgttcaagcaggatccgaagtatctgccttattgggtcgaatgccttctgctgtgggttatcaacccacccttagtaccgaaatgggttctttacaagaaagaattacttccaccaaagaggggtccataacttctattcaagcagtttatgtacctgcagacgatttgaccgatcctgctcctgccacgacatttgcacatttagatgctactaccgtactatcaagaggattagctgccaaaggtatctatccagcggtagatcctttagattcaacgtcaactatgcttcaacctaggatcgttggtgaagaacattatgaaactgcgcaaagagttaaacaaactttacaacgttacaaagaacttcaggacattatagctatcctggggttggacgaattatccgaagaggatcgcttaacggtagcaagagcacgaaaaattgagcgtttcttatcacagccttttttcgtagcagaagtatttactggttcgccgggaaaatatgttggtctagcagaaacaattcgagggtttaaattgatcctttccggagaattagacggtcttcccgaacaggccttttatttggtaggtaacatcgatgaagctactgcgaaggctacgaacttagaaatggagagcaaattaaagaaatgaccttaaatctttgtgtactgaa

SEQ ID NO: 43479 - protein, 498 aa, Stylobasium spathulatum
MRINPTTSDPGVSALEKKNPGRIAQIIGPVLDVAFPPGKMPNIYNALVVKGRDTVGQQINVTCEVQQLLGNNRVRAVAMSATDGLMRGMEVIDTGAPLSVPVGGATLGRIFNVLGEPIDNLGPVDTRTTSPIHRSAPAFIQLDTKLSIFETGIKVVDLLAPYRRGGKIGLFGGAGVGKTVLIMELINNIAKAHGGVSVFGGVGERTREGNDLYMEMKESGVINEQNIAESKVALVYGQMNEPPGARMRVGLTALTMAEYFRDVNEQDVLLFIDNIFRFVQAGSEVSALLGRMPSAVGYQPTLSTEMGSLQERITSTKEGSITSIQAVYVPADDLTDPAPATTFAHLDATTVLSRGLAAKGIYPAVDPLDSTSTMLQPRIVGEEHYETAQRVKQTLQRYKELQDIIAILGLDELSEEDRLTVARARKIERFLSQPFFVAEVFTGSPGKYVGLAETIRGFKLILSGELDGLPEQAFYLVGNIDEATAKATNLEMESKLKK

SEQ ID NO: 43480 - DNA, 1344 bp, Carsonella ruddii
  CDS (1)..(1344): transl_table=11
atgataggaagaattgtacaaattttaggttctatagtagacgttgaatttaaaaaaaacaatattccatatatatataatgccttatttattaaagaatttaatttatatttagaagttcaacaacaaattggaaataatattgtaagaactatagctttaggtagtacctatggattaaaaagatatcttttagtaatagatactaaaaaaccaattttaactcctgttggaaattgtactttaggacgtatattgaatgttttaggtaatcctattgataataatggtgaaattatttcaaacaaaaaaaaaccaatacattgttcaccgccaaaattttcagatcaagtattttcaaataatatattagaaactggaataaaagtaatagatttattgtgtccatttttaagaggaggaaaaattggtttatttggtggagcaggtgttggtaaaactataaatatgatggaattaataagaaatattgcaattgaacataaaggatgttctgtatttataggagttggtgaaagaactcgtgaaggaaatgatttttattatgaaatgaaagaatcaaatgtattagacaaagtttctttaatatatggtcaaatgaatgaaccttcaggtaatagattaagagttgcattaactggattaagtatagcagaagaatttagagaaatgggtaaagatgtacttttatttatagataatatttacagatttacgttagcaggtactgaaatttcagcattattgggaagaatgccttcagctgttggatatcagcctactttagcagaagaaatgggaaaattacaagaaagaatttcttcaacaaaaaatggaagtattacttcagtacaagctatatacgtacctgctgatgatttaacagatccatctccaagtactacttttactcatttagattctactattgttttgtctagacaaatagcggaattaggaatttatcctgctattgatccattagaatcttattctaaacaattagatccttatatagtaggaattgaacattatgaaattgctaattctgtaaaattttatttacaaaaatataaagaattaaaagatacaatagctattttaggaatggacgaattatcagaaaatgatcaaattattgttaaaagagcaagaaagttgcaaagatttttttctcaacctttttttgttggtgaaataattacaggaataaaaggagaatatgtaaatataaaagatacaattcaatgttttaaaaatattttaaatggtgaatttgataatattaatgaaaaaaatttttatatgataggaaaaatatga

SEQ ID NO: 43481 - protein, 447 aa, Carsonella ruddii
MIGRIVQILGSIVDVEFKKNNIPYIYNALFIKEFNLYLEVQQQIGNNIVRTIALGSTYGLKRYLLVIDTKKPILTPVGNCTLGRILNVLGNPIDNNGEIISNKKKPIHCSPPKFSDQVFSNNILETGIKVIDLLCPFLRGGKIGLFGGAGVGKTINMMELIRNIAIEHKGCSVFIGVGERTREGNDFYYEMKESNVLDKVSLIYGQMNEPSGNRLRVALTGLSIAEEFREMGKDVLLFIDNIYRFTLAGTEISALLGRMPSAVGYQPTLAEEMGKLQERISSTKNGSITSVQAIYVPADDLTDPSPSTTFTHLDSTIVLSRQIAELGIYPAIDPLESYSKQLDPYIVGIEHYEIANSVKFYLQKYKELKDTIAILGMDELSENDQIIVKRARKLQRFFSQPFFVGEIITGIKGEYVNIKDTIQCFKNILNGEFDNINEKNFYMIGKI

SEQ ID NO: 43482 - DNA, 1497 bp, Astilbe taquetii
  CDS (1)..(1497)
  misc_feature (10)..(10): m is a or c
  misc_feature (23)..(23): y is t or c
atgagaatcmatcctactacttytgatcctggggtttccacgcttgaaaaaaaaaacctggggcgtatcgttcaaattattggtccggtactggatgtagcttttcccccgggcaagatgcctaatatttacaacgctctggtagttaagggtcgagatactgtcggtcaacaaattaatgtaacttgtgaggtacagcaattattaggaaataatcgagttagagctgtagctatgagtgctacagatggtctaatgagaggaatggacgtgattgacacgggagctgctctaagtgttccagtcggtggagcaactcttggacgaattttcaacgtacttggagagcctgttgataatttaggtcctgtagatactcgcacaacatctcctattcatagatctgcgcccgcctttatacagttagatacaaaattatctatttttgaaacaggaattaaagtagtagatcttttagccccttatcgtcgtggaggaaaaatcggactatttgggggagctggagtgggtaaaacggtactaattatggaattgatcaacaacattgccaaagctcatgggggtgtatctgtatttggcggagtaggtgaacgtactcgtgaaggaaatgatctttacatggaaatgaaagaatctggagttattaatgaacaaaatattgcagaatcaaaagtagctctagtctatggccagatgaatgaaccgccgggagctcgtatgagagttggtttgactgcactaactatggcggaatatttccgagatgttaatgaacaagatgtacttctatttatcgacaatatcttccgtttcgtccaagcaggatccgaagtatctgccttattgggtaggatgccttccgctgtgggttatcaacccacccttagtaccgaaatgggtactttacaagaaagaattacttctaccaaagagggttccataacttctattcaagcagtttatgtacccgcggacgatttgaccgaccctgctcctgccacgacatttgcacatttagatgctactaccgtactgtcaagaggattagcttcgaaaggtatctatccagcagtagatcctttagattcaacgtcaactatgctccaaccttggatcgttggtgaggaacattatgaaactgcacaaagagttaagcaaactttacaacgttacaaagaacttcaggacattatagctatccttgggttggacgaattatccgaagaggatcgtttaaccgtagcaagagcacgaaaaattgagcgtttcttatcacaaccctttttcgtagcagaagtttttaccggttctccagggaaatatgttggtctagcagaaacaattagagggtttcaattaatcctttcgggggaattagatggtcttcctgaacaagccttttatttggtaggtaacatcgatgaagctaccacgaaggctatgaacttagaaatggagagcaatttgaagaaatga

SEQ ID NO: 43483 - protein, 498 aa, Astilbe taquetii
  misc_feature (4)..(4): The Xaa at location 4 stands for Asn, or His.
  misc_feature (8)..(8): The Xaa at location 8 stands for Phe, or Ser.
MRIXPTTXDPGVSTLEKKNLGRIVQIIGPVLDVAFPPGKMPNIYNALVVKGRDTVGQQINVTCEVQQLLGNNRVRAVAMSATDGLMRGMDVIDTGAALSVPVGGATLGRIFNVLGEPVDNLGPVDTRTTSPIHRSAPAFIQLDTKLSIFETGIKVVDLLAPYRRGGKIGLFGGAGVGKTVLIMELINNIAKAHGGVSVFGGVGERTREGNDLYMEMKESGVINEQNIAESKVALVYGQMNEPPGARMRVGLTALTMAEYFRDVNEQDVLLFIDNIFRFVQAGSEVSALLGRMPSAVGYQPTLSTEMGTLQERITSTKEGSITSIQAVYVPADDLTDPAPATTFAHLDATTVLSRGLASKGIYPAVDPLDSTSTMLQPWIVGEEHYETAQRVKQTLQRYKELQDIIAILGLDELSEEDRLTVARARKIERFLSQPFFVAEVFTGSPGKYVGLAETIRGFQLILSGELDGLPEQAFYLVGNIDEATTKAMNLEMESNLKK

SEQ ID NO: 43484 - DNA, 1526 bp, Eustrephus latifolius
  CDS (19)..(1506)
gaaaattatgtgataattatgaggatcaatcctactacttctggtcctgcggtttccatacttgaagaaaaaaacctagggcgtatcgttcaaattattggcccagtactggatgttgtttttcccccgggcaagatgcctaatatttataacgctttggtagttaaaggtcgagatactgtcggtcagcaaattaatgtgacttgcgaggtacaacaattattaggaaataatcgagttagagctgtagctatgagtgctacagatggtctgacgagaggaatggaagtgattgacacgggagctcctttaagtgttccggtcggcggagcgactctcgggcgaattttcaatgttcttggagaacctgttgataatttaggtcctgtagatactcgtacaacatctccgattcatagatcggcgcccgcctttatacagttagatacgaaattatcaatctttgaaacagggattaaagtggtggatcttttagctccgtatcgccgtggaggaaaaataggactatttgggggagctggcgtgggtaaaacagtacttatcatggaattgatcaacaacattgccaaagctcatggaggcgtatccgtatttggcggagtaggtgaacgtactcgtgaaggaaatgatctttacaaggaaatgaaagaatccggggtgattaatgaaaaaaatattgcagaatcaaaagtagctctagtctatggtcaaatgaatgaaccgccgggagctcgtatgagagttggtttgactgcactaaccatggcggaatatttccgggatgttaatgaacaagacgtgcttctattcatcgacaatatctttcgtttcgtccaagcagggtcagaagtatccgccttattagggagaatgccttccgcagtgggttatcaacccacccttagtacagaaatgggttctttgcaagaaagaattacttccaccaaaaagggatctataacttcgatccaagcagtttatgtacctgcagatgatttgaccgaccccgctcctgccacaacatttgcacatttagatgctactaccgtactatcaagaggattagctgccaaaggtatttatccagcagtagatcctttagattcaacgtcaactatgttacaacctcggatcgttggcgaggaacattatgaaactgcgcaaagagttaagcaaactttacaacgttacaaagaacttcaggacattatagctatcctggggttggacgaattatcggaagaagatcgtttaactgtagcaagagcacgaaaaattgagcgtttcttatcacaaccctttttcgtggcagaagtctttaccggttctccaggaaaatatgttggtctcgcggaaacaattaggggctttcaactgatcctttccggagaattagacagtcttcccgagcaggccttttatttggtgggtaacatcgatgaagctaccgcgaaagctatgaacttagaagaggagaagaaatgaccttaaatctttgtgtactg

SEQ ID NO: 43485 - protein, 495 aa, Eustrephus latifolius
MRINPTTSGPAVSILEEKNLGRIVQIIGPVLDVVFPPGKMPNIYNALVVKGRDTVGQQINVTCEVQQLLGNNRVRAVAMSATDGLTRGMEVIDTGAPLSVPVGGATLGRIFNVLGEPVDNLGPVDTRTTSPIHRSAPAFIQLDTKLSIFETGIKVVDLLAPYRRGGKIGLFGGAGVGKTVLIMELINNIAKAHGGVSVFGGVGERTREGNDLYKEMKESGVINEKNIAESKVALVYGQMNEPPGARMRVGLTALTMAEYFRDVNEQDVLLFIDNIFRFVQAGSEVSALLGRMPSAVGYQPTLSTEMGSLQERITSTKKGSITSIQAVYVPADDLTDPAPATTFAHLDATTVLSRGLAAKGIYPAVDPLDSTSTMLQPRIVGEEHYETAQRVKQTLQRYKELQDIIAILGLDELSEEDRLTVARARKIERFLSQPFFVAEVFTGSPGKYVGLAETIRGFQLILSGELDSLPEQAFYLVGNIDEATAKAMNLEEEKK

SEQ ID NO: 43486 - DNA, 1386 bp, Photobacterium profundum
  CDS (1)..(1386): transl_table=11
atgagtactggtaaaattgtcaaagtcatcggcgctgtcgttgatgtggaatttgaccaagatagtgtgccacgtgtttatgatgctttgaacatcattgatggcaacaatagctctcttgtacttgaagtacagcaacaaattggtagcggaatcgttcgttgtatcgcaatgggttcgtcagatggtatgcgtcgtggtttagttgcggtgaatacgggtgaacccattaccgtgccagtgggtgaagaaacccttggccgtatcatgaacgtattaggccaaccgattgatgaatgtggtgaaattggtcagaaaacctcttacccaattcaccgcgagccaccatcatatgaagatcaagcgaacagtactgaactattagaaaccggtgtaaaagttatcgacttgatttgtccgtttgctaaaggcggtaaaattggtctgttcggtggtgcgggtgtgggtaaaaccgtcaacatgatggagttaatcaacaacatcgccaaagcacactcagggttatcggtatttacgggtgtgggtgagcgaacacgagaaggcaacgacttctactacgaaatgaaagaagccggtgtactcgataaagttgccatggtgtatggccagatgaacgagcccccaggtaaccgcttacgtgtagcacttacaggcttaaccatcgcagaacgcttccgtgatgaaggccgtgacgtgctgttattcatcgataatatctaccgttataccctagcgggaacagaagtatcagctctattgggtcgtatgccttctgcggtaggttaccaaccaacattggctgaagagatgggtgtgctgcaagaacgtatcacatctacgcacaaaggttcgatcacctcgattcaagcggtttatgtgccagcggatgacttaacggatccatcaccagccacaacgtttgctcaccttgatgcaacggttgtactgtcgcgaaatattgccgccttaggtctttacccagcgattgacccattagattcaacgtcgcgtcagcttgatcctttagttgttggcgtcgagcactatgatgttgctcgtggcgtacaaactgtactgcaacgttataaagaactgaaagatattattgcgatcttaggtatggatgaattgtctgaagatgacaaattgaccgtagcccgagcacgtaaagtcgagcgtttcctgactcaaccttaccatgttgctgaagtattcacgggtcaaccgggtatttttgtatcattaaaagatacattgaatggctttaaaggcttattaagtggcgaatacgatgacgttccagaacaagcattcttgtactgtggcgctatcgaagacgttatcgaaaaagcgaaaactatgtaa

SEQ ID NO: 43487 - protein, 461 aa, Photobacterium profundum
MSTGKIVKVIGAVVDVEFDQDSVPRVYDALNIIDGNNSSLVLEVQQQIGSGIVRCIAMGSSDGMRRGLVAVNTGEPITVPVGEETLGRIMNVLGQPIDECGEIGQKTSYPIHREPPSYEDQANSTELLETGVKVIDLICPFAKGGKIGLFGGAGVGKTVNMMELINNIAKAHSGLSVFTGVGERTREGNDFYYEMKEAGVLDKVAMVYGQMNEPPGNRLRVALTGLTIAERFRDEGRDVLLFIDNIYRYTLAGTEVSALLGRMPSAVGYQPTLAEEMGVLQERITSTHKGSITSIQAVYVPADDLTDPSPATTFAHLDATVVLSRNIAALGLYPAIDPLDSTSRQLDPLVVGVEHYDVARGVQTVLQRYKELKDIIAILGMDELSEDDKLTVARARKVERFLTQPYHVAEVFTGQPGIFVSLKDTLNGFKGLLSGEYDDVPEQAFLYCGAIEDVIEKAKTM

SEQ ID NO: 43488 - DNA, 2664 bp, Chlamydomonas reinhardtii
  CDS (225)..(1949)
gcacgctcgaccctgcaccagcacgtgccatgggagttttgtgcttcaataagtaatattgaatgataagacgcggagaatgagggggaagaagaggccatgcacgagatggtgcccatgcaaaatgagtcttctctcgctctggctttgacagcagcgccctcatagattgttctgtatagattttggggttgggcaccgtgatagtcggggcctttaccaggatgttgtccagcgtgcgcctcgctgcccttcgggcgggcaagaccaacagcgtcttccaggccgtccgcgccttcgctgcggagcctgctgctgcggcgactactgatgccggcttcgtcagccaggtcatcggccctgtggtggatgtgcgtttcgatggcgagctgccttcgattctgagtgctctggaggtgcaggggcacaatgtgcgcctggtgctggaggtggcgcagcacatgggtgacaacaccgtgcgctgcgtggccatggacagcactgatggtctggtgcgtggccagaaggtggtgaacaccggctcccccatcaaggtgccggtgggccgtggcactctgggccgcatcatgaacgtgattggcgagcccgtcgacgagcagggccccatcgaatgctcggaggtgtggtccatccaccgcgaggctcctgagttcactgagcagagcactgagcaggagatcctggtgaccggcatcaaggtcgtggacctgctggctccctaccagcgtggtggcaagatcggtctgttcggtggtgccggtgtgggcaagaccgtgctgattatggagctcatcaacaacgtcgctaaggcgcacggtggtttctccgtgttcgccggtgtcggcgagcgcacccgtgagggcaacgacctctaccgtgagatgattgagtcgggtgtgattaagcttggcgacaagcgcggcgagtccaagtgcaccctggtgtacggccagatgaacgagcccccgggtgcccgtgcccgtgtggccctgacgggtctgactgtggccgagtacttccgtgacgtggagggccaggacgtgctgctgttcgtggacaacatcttccgcttcacgcaggcgaactcggaggtgtctgccctgctgggccgcatcccctcggccgtgggttaccagcccaccctggccaccgatctgggtggcctgcaggagcgcattaccaccaccaccaagggttccattacctcggtgcaggctgtgtacgtgcccgccgatgacctgacggatcccgcccccgcaaccaccttcgcgcatctggacgccaccaccgtgctgtcccgctcgattgccgagctgggcatctaccccgccgtggaccccctggactccaccagccgcatgctcaaccccaacatcattggcgccgagcactacaacatcgcccgtggtgtgcagaaggtgctgcaggactacaagaacctgcaggatattattgccattctgggtatggatgagctgagcgaggaggacaagctgaccgtggcgcgcgcccgcaagatccagcgtttcctgtcgcagcccttccaggtggccgaggtgttcaccggcacccccggcaagtacgtggacctgaaggacaccatctccgccttcaccggcatcctgcagggcaagtacgacgaccttcctgagatggctttctacatggtgggcggcatccacgaggtggtggagaaggccgacaagctggccaaggacgtggcggcccgcaaggacgagagcaagaaggccaagtcgtctgaggcgctgaaggacgtgcccagcctggagaagatggcgggcgagatcaaggacgaggtgattgacgccgacgacagcctggaggaggacttcaaggcggaggccatcagcagcgagaacatggtgctgaacgagaagggcgagaaggtgcccctgcccaagaagtaagcggctaggccgcagcagcaggagtgcagatagccttagggagcattcggtgacgcccgctcgccgctccggcggcggctgtagcagtaataattcgttgctgacagagcccgggagttgagggggcggcagctgggcgcgcagccttgcgcagtggctgcgccatggtcgcgtcgcgtgtctgggtctgcctgtgtgcctggcgcacagcagcccgggctgttcggaagcgcacggccgggtgcatcacgctggtgcacggcttaggaacgcgggcgtcgcggggctgtgcgcggatgcgaatttggctctgtgctcattatcgttcagagtgtgtttggtctagtgcacgcccgagcagtggggtgggtccgcggctagtgcggaggcagggcggtgcaggcttataaggcttaggaacctgaccggattgggactcgagggatcagtcagtcaaagatgtcaccatggtgcggcctgagtcgtcaggccggcttggttggcgaggatcagggcgggtgcgcagggagttgttgatggcggggccatgtcagcatgggaccccctggcggcggacctccactcctagcagagcgagacagtagatgtgtgtctatgcggtgtcaagggtacggactgcgacaaggtatgtgtgtgcgcgtgcgtaggcaggcagaagagttgggggcagcagctcctgtaaggacatcaccca

SEQ ID NO: 43489 - protein, 574 aa, Chlamydomonas reinhardtii
MLSSVRLAALRAGKTNSVFQAVRAFAAEPAAAATTDAGFVSQVIGPVVDVRFDGELPSILSALEVQGHNVRLVLEVAQHMGDNTVRCVAMDSTDGLVRGQKVVNTGSPIKVPVGRGTLGRIMNVIGEPVDEQGPIECSEVWSIHREAPEFTEQSTEQEILVTGIKVVDLLAPYQRGGKIGLFGGAGVGKTVLIMELINNVAKAHGGFSVFAGVGERTREGNDLYREMIESGVIKLGDKRGESKCTLVYGQMNEPPGARARVALTGLTVAEYFRDVEGQDVLLFVDNIFRFTQANSEVSALLGRIPSAVGYQPTLATDLGGLQERITTTTKGSITSVQAVYVPADDLTDPAPATTFAHLDATTVLSRSIAELGIYPAVDPLDSTSRMLNPNIIGAEHYNIARGVQKVLQDYKNLQDIIAILGMDELSEEDKLTVARARKIQRFLSQPFQVAEVFTGTPGKYVDLKDTISAFTGILQGKYDDLPEMAFYMVGGIHEVVEKADKLAKDVAARKDESKKAKSSEALKDVPSLEKMAGEIKDEVIDADDSLEEDFKAEAISSENMVLNEKGEKVPLPKK

SEQ ID NO: 43490 - DNA, 2021 bp, Hevea brasiliensis
  CDS (22)..(1710)
ctctctttgaagccccaaccaatggcttcacgcagactattatcctctcttctccggtcatccagtcgccgatcagtctccaaatctcctatctcaaacatcaaccctaagctttcttcctcatctccatcctctaagagccgcgcgtctccttatggttacctcctcacacgcgcggctgagtacgcgacttccgccgccgccgctgccccacctcaacctcctccagcgaagcccgagggtggcaagggtggtggtaagattactgatgagttcactggaaagggtgcgattgggcaggtttgtcaggtgattggtgccgttgtggatgtgaggttcgatgagggactgcctccgattttgacgtctcttgaggttttggaccattcgatcaggctagtgctggaggtggctcagcacatgggtgagggtatggttaggaccattgccatggatgggactgaaggtttggtgagagggcagcgcgtcctcaatactgggtctcccattacagtgccagtgggtagggccaacccttggacgtatcatgaagtcattggagagccaattgacgagaggggtgatatcaagaccagccacttcttgcccattcacagagaagctccagcttttgttgatcaagccactgagcaacagattcttgtaactggtatcaaggttgttgatcttcttgcaccataccaaaggggagggaagattgggctgtttggtggtgctggtgtaggaaaaactgtgcttattatggaacttataaacaatgttgcaaaagctcacggtggtttttcagtgtttgctggtgttggagagcgcactcgtgagggtaatgacctgtacagagaaatgattgagagtggtgtcattaagctaggggataagcaggctgacagcaaatgcgcccttgtatatggtcaaatgaatgaaccccctggtgctcgtgcccgtgttggtctaactgggctaactgtggctgagcacttccgtgatgctgaaggacaagatgtgcttctcttcattgacaatattttccgcttcacccaggctaattcagaggtgtctgctttgcttggtcgtatcccatctgctgtcggttaccaaccaactttggctactgatctgggaggtctccaagagcgtattacaaccaccaagaaaggttctatcacttctgtccaggctatatatgtgcctgctgatgacttgactgatcctgcacctgctacaacctttgcacacttggatgccacaactgtgttgtcacgacagatttctgagctgggtatctatcctgctgttgatccccttgattctacatctcgtatgctctctcctcatattttgggtgaggaacactacaatactgctcgtggagtgcaaaaggttcttcagaactacaagaatctgcaagatattattgccattttgggaatggatgagcttagtgaagatgacaagttgacagttgcccgagcacggaaaatccagaggttcttgagccagcctttccatgttgcagaagttttcacaggtgcccctggcaagtatgttgagttgaaagagagcataaccagcttccagggtgtgttggatggaaaatatgatgaccttccagaacagtcattttacatggttggaggcattgatgaggtgatagccaaggccgataagattgcaaaggagtcagcatcctaaacagaaacggaactctctctgcagtcttttgttctcttgtccggaaaattgcagaaatcaaaaataatctaggtgatgctggcaacaggatattattgatttttttgaggtgaaatgtgttggattatgaattcccgttttaatgtgttattgcagagtgtgataatatagaacaggggactgccctgcctgccaagcccctcttttttctttttatttatttaataaggggaaaaagaaaggcgggcatgtatatttttccttttctatttttttaacctgagaacatgaaacgtgaccattttcacttg

SEQ ID NO: 43491 - protein, 562 aa, Hevea brasiliensis
MASRRLLSSLLRSSSRRSVSKSPISNINPKLSSSSPSSKSRASPYGYLLTRAAEYATSAAAAAPPQPPPAKPEGGKGGGKITDEFTGKGAIGQVCQVIGAVVDVRFDEGLPPILTSLEVLDHSIRLVLEVAQHMGEGMVRTIAMDGTEGLVRGQRVLNTGSPITVPVGRANPWTYHEVIGEPIDERGDIKTSHFLPIHREAPAFVDQATEQQILVTGIKVVDLLAPYQRGGKIGLFGGAGVGKTVLIMELINNVAKAHGGFSVFAGVGERTREGNDLYREMIESGVIKLGDKQADSKCALVYGQMNEPPGARARVGLTGLTVAEHFRDAEGQDVLLFIDNIFRFTQANSEVSALLGRIPSAVGYQPTLATDLGGLQERITTTKKGSITSVQAIYVPADDLTDPAPATTFAHLDATTVLSRQISELGIYPAVDPLDSTSRMLSPHILGEEHYNTARGVQKVLQNYKNLQDIIAILGMDELSEDDKLTVARARKIQRFLSQPFHVAEVFTGAPGKYVELKESITSFQGVLDGKYDDLPEQSFYMVGGIDEVIAKADKIAKESAS

SEQ ID NO: 43492 - DNA, 2029 bp, Zea mays
  CDS (54)..(1715)
cagccgccgcaacccagcgtcccccgaagtctaaccctagatccggaccggccatggcgtcccgccgggtcgtctcctcgctcctccgctccgcgtcccgcctgcgggccgcctcgcccgctgctccacgcccgcgcgcgccaccgcaccgcccgtccccggccgggtacctcttcaaccgcgctgccgcctacgcctcttccgccgcggcccaggcggcacctgccaccccgccgccggccaccgggaagaccgggggcggcaagatcaccgacgagttcaccggcgctggcgccatcggccaggtgtgccaggtgatcggcgccgtcgttgacgtgcgcttcgatgagggcctcccgcccatcctcacggcgctcgaggtgctcgacaacaacatccgcctcgtgctcgaggtggcgcagcaccttggcgagaacatggtgcgcaccatcgctatggacggcacggaggggctcgtccgcggccagcgcgtcctcaacactggctcccccatcaccgtgcctgttggcagggctacccttggacgcatcataaatgttattggtgaaccgattgatgagaagggtgacataaagacaaaccacttcctccctattcatcgtgaagcccctgcctttgttgagcaggccactgagcagcaaattcttgttactggaatcaaggtcgtggatcttcttgcaccctaccaaaggggtggaaagattggtctcttcggtggtgcaggagtgggtaaaactgtgctcattatggagttgatcaacaatgttgctaaggcccatggtggtttctctgtgtttgctggtgttggagaacgtacccgtgaaggtaatgatctgtacagggaaatgattgaaagtggtgtcattaagctagatgacaagcagagcgaaagcaagtgtgctcttgtttacgggcagatgaatgagcccccgggtgctcgtgctcgtgttgggttgactggtttgactgttgctgaacatttccgtgatgctgaaggacaagatgtgcttctgtttattgacaacattttccgttttactcaggcaaactctgaggtgtctgctcttcttggacgtatcccatctgctgtgggataccagccaacccttgccactgatcttggaggactgcaagagcgtattacgacaacaaagaagggttctattacatctgtgcaggccatctacgtgcctgccgatgacttgacggatcctgctcctgctactacctttgcccatcttgatgctacaactgtgttgtcacgacagatctctgagcttggtatttatcctgctgttgatccactggattccacatcaagaatgctttctccccacgtgctgggtgaggatcactacaacactgctcgtggtgtgcagaaggttcttcagaactacaaaaatcttcaggatattattgctatcttgggtatggatgagctcagtgaggatgacaagctgacagtcgcccgtgcaagaaagattcagcgtttcctgagccagcctttccatgtcgctgaagttttcacgggtgctccaggaaagtatgtggagctgaaggaaagcgtgaagagtttccagggtgttttggatgggaagtatgatgacctccctgagcagtcattctacatggttggtggcattgaggaagtcattgctaaggctgagaaaattgccaaggagtctgcttcataaggaggcttcttgcttgttcaaccctgtacaagttccatttttggattttaagcgtttatttatgcttttcccagttaggcatgacgagctggagagtccatctcctgctgagagatgtttgttttacccttctttgcttcctccaccttacacccaaataagcaactgcagtgacgttggttttggctgcacccaaactacatgactgaagaaacttgtggcctgtgtaacgcgaatccatcagaacgccaaagttatggcttctggttgtggcaaattatggttcctccctgttcggttgaaaaaaaaaaaaa

SEQ ID NO: 43493 - protein, 553 aa, Zea mays
MASRRVVSSLLRSASRLRAASPAAPRPRAPPHRPSPAGYLFNRAAAYASSAAAQAAPATPPPATGKTGGGKITDEFTGAGAIGQVCQVIGAVVDVRFDEGLPPILTALEVLDNNIRLVLEVAQHLGENMVRTIAMDGTEGLVRGQRVLNTGSPITVPVGRATLGRIINVIGEPIDEKGDIKTNHFLPIHREAPAFVEQATEQQILVTGIKVVDLLAPYQRGGKIGLFGGAGVGKTVLIMELINNVAKAHGGFSVFAGVGERTREGNDLYREMIESGVIKLDDKQSESKCALVYGQMNEPPGARARVGLTGLTVAEHFRDAEGQDVLLFIDNIFRFTQANSEVSALLGRIPSAVGYQPTLATDLGGLQERITTTKKGSITSVQAIYVPADDLTDPAPATTFAHLDATTVLSRQISELGIYPAVDPLDSTSRMLSPHVLGEDHYNTARGVQKVLQNYKNLQDIIAILGMDELSEDDKLTVARARKIQRFLSQPFHVAEVFTGAPGKYVELKESVKSFQGVLDGKYDDLPEQSFYMVGGIEEVIAKAEKIAKESAS

SEQ ID NO: 43494 - DNA, 1973 bp, Oryza sativa
  CDS (51)..(1709)
aaaagtctaaccctagatccaggccccgcgtctccggcgatctcccggccatggcgactcgccgggccctctcctccctcgtccgcgccgcctccaggctccgcggggcctcgcccgccccgcgcccgcgcgggccgctccaccgaccgtcgccatcggggtacctcttcaaccgcgccgccgcgtacgccacggccgccgcggcgaaggaggcggcgcctcccgcgcccgcgacggggaaggccacgggtggaggtaagatcaccgacgagttcaccggcgccggcgccgtcgggcaggtgtgccaggtcatcggcgccgtcgtcgacgtgcggtttgacgaggggctgcctcccatcctcacggcgctcgaggtgctcgaccacaacatccgcctcgtgctcgaggtggcgcagcaccttggcgagaacatggtgcgcaccatcgctatggacgggactgaggggcttgtccgcggtcagcgcgtcctcaacaccggctccccaatcactgttcctgttggcagggccacgcttggacgtatcatgaatgttattggtgagccaattgatgagaagggtgacataacaacgaaccacttccttcccatccatcgtgaggcgcctgcttttgttgagcaagccacagaacagcaaattcttgttactggaattaaggttgtggatctgcttgcgccctaccaaagaggtggaaagatcggtctttttggtggtgcaggagtcggcaaaactgtccttattatggagttgatcaacaatgttgctaaggcccatggtggtttctctgtgtttgctggtgttggtgaacgtacccgtgaaggtaatgatctttacagggaaatgattgaaagtggtgtcatcaagctaggtgacaaacagagtgaaagcaagtgtgctcttgtctacgggcaaatgaatgagcccccgggtgctcgtgctcgtgttgggttgaccggtttgactgttgcggaacatttccgtgatgccgaaggacaagatgtgcttttgttcattgacaacattttccgtttcactcaggcgaactctgaggtgtctgctcttcttggacgtattccatctgctgtgggatatcaaccaactcttgctactgatcttggaggacttcaagagcgaattacaactacaaagaagggttccattacatctgtccaagctatttatgtgcctgctgatgacttgacggatcctgctcctgctactacttttgcacatcttgatgctactactgtgttgtcacgacagatctctgagcttggtatttaccctgctgtcgatcctctggactccacgtccagaatgctctccccccatgttttgggtgaggatcactacaacactgctcgtggtgtccaaaaggttcttcagaactacaagaatcttcaggatattattgcaattttgggtatggacgagctcagtgaagatgacaagttgaccgtcgctcgcgcaaggaagatccagcgtttcttgagccagcccttccatgtggctgaagttttcacgggtgctcctgggaagtacgtggagctgaaggagagcgtcaacagtttccagggtgttttggatgggaaatatgatgaccttcccgagcagtcattctatatggtgggaggcattgaggaagtcattgctaaagctgagaagatcgccaaggagtcggcttcataagatctcttcattgttaagttctgtacaagttaaatttttggattctggtttctatatgcccgttctgtagccaggacgtgattacaagcaggggtgacatcttctgatgagcgatgtttttttgtcttccttttctccttttacccctaataaggaaccgcagtgacattgtattgtgctgcacaagagtactcggaacttcgaaagcatgtgtcctttataatgcagatccatgaagcataggatcattgagttcttgttttt

SEQ ID NO: 43495 - protein, 552 aa, Oryza sativa
MATRRALSSLVRAASRLRGASPAPRPRGPLHRPSPSGYLFNRAAAYATAAAAKEAAPPAPATGKATGGGKITDEFTGAGAVGQVCQVIGAVVDVRFDEGLPPILTALEVLDHNIRLVLEVAQHLGENMVRTIAMDGTEGLVRGQRVLNTGSPITVPVGRATLGRIMNVIGEPIDEKGDITTNHFLPIHREAPAFVEQATEQQILVTGIKVVDLLAPYQRGGKIGLFGGAGVGKTVLIMELINNVAKAHGGFSVFAGVGERTREGNDLYREMIESGVIKLGDKQSESKCALVYGQMNEPPGARARVGLTGLTVAEHFRDAEGQDVLLFIDNIFRFTQANSEVSALLGRIPSAVGYQPTLATDLGGLQERITTTKKGSITSVQAIYVPADDLTDPAPATTFAHLDATTVLSRQISELGIYPAVDPLDSTSRMLSPHVLGEDHYNTARGVQKVLQNYKNLQDIIAILGMDELSEDDKLTVARARKIQRFLSQPFHVAEVFTGAPGKYVELKESVNSFQGVLDGKYDDLPEQSFYMVGGIEEVIAKAEKIAKESAS

SEQ ID NO: 43496 - DNA, 1680 bp, Arabidopsis thaliana
  CDS (1)..(1680)
atggcgagtcggcgaatcttatcatcgcttctccgttcttcttcgagtagatctacttctaaatcctccttgatcgggagccgaaacccgaggcttttatcccccggtcccgcgcatggagccgctccatgtgggactctccttggccgagtcgccgagtattcgacttcttctccggctaattcggctgcaccatcttctgctcctgctaaagatgagggaaagaagacctatgattacggtggcaaaggcgcgatcgggcgtgtgtgtcaggttattggtgccattgttgatgtgagattcgaagatcaggagggattgcctccgatcatgacatctctcgaggtacaggatcatccaacaaggttggtccttgaggtgtctcatcacttgggtcaaaatgtcgttaggaccattgctatggatggtactgagggtctcgtccgtggaaggaaggttctcaacactggtgctccaatcactgttcctgttggaagggccacccttggacgtatcatgaacgttcttggagaacctattgacgagagaggcgaaattaagaccgagcattacttacccattcacagagacgctccagctttggttgatttggccaccggtcaagagattctcgctactggtattaaggttgttgatctccttgctccttaccaaagaggaggaaagattgggctttttggcggtgctggtgttgggaaaacagtgctcattatggaactgattaacaatgttgccaaagctcatggtggtttctccgtgtttgctggtgtgggagaacggacccgtgaaggcaatgatttgtacagagaaatgattgagagtggtgtcatcaagctaggagagaaacagtctgagagcaaatgtgccctagtgtatggacaaatgaatgagcccccgggtgctcgtgcccgtgttggactgactggtttgactgttgctgagtatttccgtgatgctgaaggccaagatgtcttgcttttcattgacaacatcttccgtttcacccaggccaactctgaagtgtctgcgttgctcggtcgtatcccgtctgctgtggggtaccagccaactctggcttccgatcttggtgctcttcaagagcgaatcacaaccaccaagaaaggttcaattacctctgtccaagccatctatgtccctgctgatgatttgacagatcctgctcctgccacaacttttgctcacttggatgccacaactgtgctttcaagacagatttctgagcttggtatctaccctgctgtggatcctttggattcgacgtcccgtatgctctcgccccacattctaggtgaggagcactacaacacagctcgtggtgtgcagaaagtgttgcagaattacaagaatttgcaagatattatcgccattttgggaatggatgagctaagtgaagatgacaagctgactgttgcccgtgcccgtaagatccagagattcttgagtcagccattccatgttgctgaaatcttcactggtgcccctggaaaatatgtcgaccttaaagaaaacatcaacagtttccagggtttgttggatggcaagtacgatgatctttccgaacaatcgttttacatggttggaggtatcgatgaggtggttgcaaaggcagagaagatcgctaaagagtcagcagcttag

SEQ ID NO: 43497 - protein, 559 aa, Arabidopsis thaliana
MASRRILSSLLRSSSSRSTSKSSLIGSRNPRLLSPGPAHGAAPCGTLLGRVAEYSTSSPANSAAPSSAPAKDEGKKTYDYGGKGAIGRVCQVIGAIVDVRFEDQEGLPPIMTSLEVQDHPTRLVLEVSHHLGQNVVRTIAMDGTEGLVRGRKVLNTGAPITVPVGRATLGRIMNVLGEPIDERGEIKTEHYLPIHRDAPALVDLATGQEILATGIKVVDLLAPYQRGGKIGLFGGAGVGKTVLIMELINNVAKAHGGFSVFAGVGERTREGNDLYREMIESGVIKLGEKQSESKCALVYGQMNEPPGARARVGLTGLTVAEYFRDAEGQDVLLFIDNIFRFTQANSEVSALLGRIPSAVGYQPTLASDLGALQERITTTKKGSITSVQAIYVPADDLTDPAPATTFAHLDATTVLSRQISELGIYPAVDPLDSTSRMLSPHILGEEHYNTARGVQKVLQNYKNLQDIIAILGMDELSEDDKLTVARARKIQRFLSQPFHVAEIFTGAPGKYVDLKENINSFQGLLDGKYDDLSEQSFYMVGGIDEVVAKAEKIAKESAA

SEQ ID NO: 43498 - DNA, 1401 bp, Acetobacterium woodii
  CDS (1)..(1401): transl_table=11
atggcccaaaatatagggaaggttgttcaggttattggaccagtagtcgatgttaaatttcaaaaagacaaactgccaaaattgaacaacgcagtaaatattgagcttaatggacacaccctggtaattgaggtagctcagcaactgggagacgacattgtcagatgtattgccatggattcaacagacggtttgatgagaaatcaggaagctgtggatacagggtcagcgattcaagtacccgttgggaaagcaaccctaggaagaatgtttaacgttttgggtgaaccaattgatggcaagccatttgatacgaaagatgtcgttatgcatccgattcatcggcatccacccagttttgaagaacaacaaacgcaaccagaaatgtttgaaaccggaattaaagtcgttgacttaatttgtccttacgttcgtggtggtaagattggtcttttcggtggtgccggagttggtaaaaccgtattgattcaggaattaattaataatattgcaacccaacacggtggtttatcggtatttgccggtgttggagaacggacccgtgaagggaatgacctttattatgaaatgatggagtctggcgttattaacaaaacagcgctttgctttggtcaaatgaatgagcctcctggagccagaatgcggattgcattagctggactgacgatggctgaatatttccgggatgatgaaggacaggatgtgttattgttcattgataacattttccgctttactcaagctggttcagaagtttcagcacttttgggtcggatgccaagtgccgttggttaccaaccaacactggcaactgaaatgggtgctttacaggaacgaattacatcaaccagtaagggttcaattacctcggttcaggccgtttacgatccagccgatgacttaactgaccctgctccggcaactacttttgcgcatttggatgcaacgacagtattaagtcgtgccattaccgaaaaaggtatttatccggctgttgatccattggattcaacttcacgtattcttgatcctaaaatagttggacaggaacattatgaaacagctcgagaagtgcaggaaattttgcaacgatataaagagttgcaagatattatcgcaattttagggatggatgagttgtcagatgccgataaaattacagtatctcgtgcgcgtaaggttgaacgtttgtttgcgaaccatttaatgttgcggaacagtttaccggtacgctggggtatatgtaaacgatttggtgatacaattaaaggatttaaagaaatccttcaaggacaacatgatgatttaccggaaagtgctttccttttggtaggtacgatcgaagacgctgtagtaaaagcaaaaaaaatcaaaggttag

SEQ ID NO: 43499 - protein, 466 aa, Acetobacterium woodii
MAQNIGKVVQVIGPVVDVKFQKDKLPKLNNAVNIELNGHTLVIEVAQQLGDDIVRCIAMDSTDGLMRNQEAVDTGSAIQVPVGKATLGRMFNVLGEPIDGKPFDTKDVVMHPIHRHPPSFEEQQTQPEMFETGIKVVDLICPYVRGGKIGLFGGAGVGKTVLIQELINNIATQHGGLSVFAGVGERTREGNDLYYEMMESGVINKTALCFGQMNEPPGARMRIALAGLTMAEYFRDDEGQDVLLFIDNIFRFTQAGSEVSALLGRMPSAVGYQPTLATEMGALQERITSTSKGSITSVQAVYDPADDLTDPAPATTFAHLDATTVLSRAITEKGIYPAVDPLDSTSRILDPKIVGQEHYETAREVQEILQRYKELQDIIAILGMDELSDADKITVSRARKVERLFANHLMLRNSLPVRWGICKRFGDTIKGFKEILQGQHDDLPESAFLLVGTIEDAVVKAKKIKG

SEQ ID NO: 43500 - DNA, 2387 bp, Aegilops columnaris
  CDS (256)..(1752)
tccacaaaaggcaaaatgtatatgaaaaaaagattgattgaactttccaacggactcattccatgagtaaacgattgaatgggattcgcttgggcaacgaaatcaagtcctggtccccttttctctcttattgaattaactaattcatttcctttttacttttggattttttttgatttgatttggcattattcaacaataaaaaaagaaaaatttcgacaaattaaattccttttttttaattatgtgataattatgagaaccaatcctactacttctcctcccggggtttccacaattgaagaaaaaagtacaggtcgtatcgatcaaattattggacccgtgctggatgtcacttttcccccaggcaagttaccttatatttataacgctttggtagtccagagtagagacactgccgataagcaaattaatgtgacttgtgaggtacaacaattattaggaaataatcgagttagagctgtagctatgagtgctacggacgggttgatgagaggaatggaagtgattgacacgggagctcctctcagtgttccggtcggtggagctactctcggacgaattttcaacgttcttggggagcctgttgacaatttgggtcctgtagatagtagtgcaacgttccctattcatagatctgcgcctgcctttatcgagttagatacgaaattatccatctttgaaacaggtattaaggtcgtcgatcttttagctccttatcgacgtggaggaaaaataggactatttgggggggctggagtaggtaaaacagtactgatcatggaattaatcaataacattgctaaagctcatgggggcgtatccgtattcggtggagtaggggaacgaactcgtgaaggaaatgatctttatatggaaatgaaagaatccggagtaattaatgaaaaaaatattgaggaatcaaaggtagctctagtctatggccaaatgaatgaaccaccgggagctcgtatgagagttggtttaactgccctaactatggcggaatatttccgagatgttaataagcaagacgtgcttttatttatcgataatatctttcgttttgttcaagcaggatcagaggtatccgctttattagggagaatgccctccgcagtgggttatcaacctactcttagtacagaaatgggttctttgcaagaaagaattgcttctactaaaaagggatctataacttcgattcaagcagtttatgtacctgcagacgatttgaccgaccctgcccctgccacaacatttgcacatttggatgctactaccgtactttccagaggattagcttccaagggtatttatccagcagtagatcctttagattcaacctcgactatgttacagcctcggatcgttggcaacgaacattatgaaactgcgcaaagagttaaggaaactttacaacgttacaaagaacttcaggacattatcgcaattcttggcttggatgaattatcggaagaggatcgtttaactgtagcaagagcaagaaaaattgagcgtttcttatcacaaccgttctttgtggcagaagtttttactggttctccaggaaagtatgttgctcttgcggaaactattaggggatttcaactaatcctttccggagaattagacggcctacctgaacaggctttttatttggtgggtaacatcgatgaagctagcacgaaagctataaccttagaagaggagaacaaatcgaagaaatgaaattaaatctttatgtactgactcctaagcgaattatttgggattgtgaagtgaaagaaatcattttatccactaatagtggccaaattggcgtattaccaaaccacgcccccattaacacagcagtagatatgggtcctttgagaatacgcctcctcaacgaccaatggttaacagcggttctgtggagcggttttgcgagaatagttaataatgagatcatcattttaggaaatgatgcggaactgggtagtgatattgatccggaagaagctcaaaaggcacttgaaatagccgaagctaacttgagtaaagctgagggtacgaaagatttggttgaagcgaagctcgctctcagacgagctaggatacgaatcgaggctgtcaattggattcccccatccaattgaagacaatccagtggtttatagttgatacaaagaaaaagggaagaggggtagaaaaagttattagatagcgaagcgaagtaagtccaatgctatctaataactttttctacctacttacctactattggatttgaaccaatgactcccgccgtatgaaagcaatactctaaccactgagttaagtaggcaatttatcaccacaaaggaagacccattacttcgatc

SEQ ID NO: 43501 - protein, 498 aa, Aegilops columnaris
MRTNPTTSPPGVSTIEEKSTGRIDQIIGPVLDVTFPPGKLPYIYNALVVQSRDTADKQINVTCEVQQLLGNNRVRAVAMSATDGLMRGMEVIDTGAPLSVPVGGATLGRIFNVLGEPVDNLGPVDSSATFPIHRSAPAFIELDTKLSIFETGIKVVDLLAPYRRGGKIGLFGGAGVGKTVLIMELINNIAKAHGGVSVFGGVGERTREGNDLYMEMKESGVINEKNIEESKVALVYGQMNEPPGARMRVGLTALTMAEYFRDVNKQDVLLFIDNIFRFVQAGSEVSALLGRMPSAVGYQPTLSTEMGSLQERIASTKKGSITSIQAVYVPADDLTDPAPATTFAHLDATTVLSRGLASKGIYPAVDPLDSTSTMLQPRIVGNEHYETAQRVKETLQRYKELQDIIAILGLDELSEEDRLTVARARKIERFLSQPFFVAEVFTGSPGKYVALAETIRGFQLILSGELDGLPEQAFYLVGNIDEASTKAITLEEENKSKK

SEQ ID NO: 43502 - DNA, 1497 bp, Agrostis stolonifera
  CDS (1)..(1497)
atgagtaccaatcctactagttctcgtcccggggtttcaacaattgatgaaaaaaatacaggtcgtatcgatcaaattattggacctgtgctggatgtcacttttcccccgggcaagttaccttatatttataacgctttggtagtccagagtagagacactgccgataagcaaattaatgtgacttgtgaggtacaacaattattaggaaataatcgagttagagctgtagctatgagtgctacagacgggttgatgagaggaatggaagtgattgacacgggagctccgctcagtgttccggtcggtggagctactctcggacgaattttcaacgttcttggggagcctgttgacaatttgggtcctgtagatagtagtgcgacgttccctattcatagatctgcgcctgcctttatcgagttagatacgaaattatccatctttgaaacaggtattaaggtcgtcgatcttttagctccttatcgacgtggaggaaaaataggcctatttgggggggctggagtaggtaaaacagtactcatcatggaattaatcaataacattgctaaagctcatgggggtgtatctgtatttggtggagtaggggaacggactcgtgaaggaaatgatctttatatggaaatgaaggaatccggagtaattaatgaaaaaaatattgaggaatcaaaggtagctctagtctatggccaaatgaatgaaccgccgggagctcgtatgagagttggtttaactgccctaactatggcagaatatttccgagatgttaataagcaagacgtgcttttattcatcgataatatctttcgttttgttcaagcaggatcggaggtatccgctttattagggagaatgccctctgcagtgggttatcaacctactcttagtacagaaatgggttctttgcaagaaagaattgcttccactaaaaagggatctataacttcgattcaagcagtttatgtacccgcggacgatttgaccgaccctgctcctgcgacaacatttgcacatttggatgctactaccgtactttccagaggattagcttccaagggtatttatccagcagtagatcctttagattcaacctcaactatgttgcagcctcggatcgttgggaacgaacattatgaaactgcgcaaagagttaaggaaactttacaacgttacaaagaacttcaggacattatcgctattcttgggttggatgaattatctgaggaggatcgtttaactgtagcaagagcaagaaaaattgagcgtttcttatcacaaccgttctttgtggcagaagtttttactggttctccaggaaagtatgttggtcttgccgaaactattaggggatttcaactaatcctttccggagaattagacggcctacccgaacaagctttttatttggtgggtaacatcgatgaagctagcacgaaagctataaccttagaagaggagaacaaatcgaagaaatga

SEQ ID NO: 43503 - protein, 498 aa, Agrostis stolonifera
MSTNPTSSRPGVSTIDEKNTGRIDQIIGPVLDVTFPPGKLPYIYNALVVQSRDTADKQINVTCEVQQLLGNNRVRAVAMSATDGLMRGMEVIDTGAPLSVPVGGATLGRIFNVLGEPVDNLGPVDSSATFPIHRSAPAFIELDTKLSIFETGIKVVDLLAPYRRGGKIGLFGGAGVGKTVLIMELINNIAKAHGGVSVFGGVGERTREGNDLYMEMKESGVINEKNIEESKVALVYGQMNEPPGARMRVGLTALTMAEYFRDVNKQDVLLFIDNIFRFVQAGSEVSALLGRMPSAVGYQPTLSTEMGSLQERIASTKKGSITSIQAVYVPADDLTDPAPATTFAHLDATTVLSRGLASKGIYPAVDPLDSTSTMLQPRIVGNEHYETAQRVKETLQRYKELQDIIAILGLDELSEEDRLTVARARKIERFLSQPFFVAEVFTGSPGKYVGLAETIRGFQLILSGELDGLPEQAFYLVGNIDEASTKAITLEEENKSKK

SEQ ID NO: 43504 - DNA, 1455 bp, Agrobacterium tumefaciens
  CDS (1)..(1455): transl_table=11
atggctaaggcagctacccccaagaaaaccgcagcggtgaacggcgcgggcaaggttacccaggttatcggcgctgttgtcgacgtggcgttcgaaggcgaactgcctccgatcctgaacgcgctcgaaacacagaacaatggcaaccgcctcgttctggaagtcgcgcagcatctcggcgaaaacgtcgtgcgcacgatcgccatggactcgaccgaaggtctggttcgcggtcagtccgttgctgacacgggcgcaccgatcgaggttcctgttggtctggaaacgctcggccgcatcatgaacgtcatcggcgagccggttgacgaagccggtccgatcgtaacggccaagaagcgcgccatccaccaggacgcaccgtcttacgtcgagcagtcgacggaaggccagatcctcgtcaccggcatcaaggtcgtcgaccttctcgctccttacgccaagggcggcaagatcggcctcttcggcggcgccggcgtgggcaagacggttctcatcatggaactgatcaacaacgtcgccaaggcgcatggtggttactcggtattcgccggcgtgggtgagcgtacccgcgaaggcaacgacctttatcacgaaatgatcgagtcgaacgtcaacaagctcggtggcggcgaaggctccaaggctgcgctcgtgtacggccagatgaacgaaccgccgggcgcccgcgctcgcgtcgctctgaccggtctgacgatcgctgaaaacttccgtgatgaaggccaggacgttctgttcttcgtggacaacatcttccgcttcacgcaggctggttctgaagtgtcggctctgctcggccgtattccttcggccgtgggttaccagccgacgctggcaaccgacatgggccagatgcaggaacgcatcaccaccacgaacaagggttccatcacctcggttcaggcaatttacgttcccgccgacgacttgaccgacccggcgccggcaacctcgttcgcgcatcttgacgcaacgacggttctgtcgcgttcgatcgctgaaaagggtatttacccggctgttgacccgctcgactccacctcgcgcatgctcgacccgatgatcgtcggcgaggagcactacgaagttgcccgtaaggttcagtcgaccctgcagcgctacaagtctctccaggacatcatcgccatcctcggcatggacgaactgtcggaagaagacaagctgacggttgcccgcgcccgcaagatcgagcgcttcctgtcgcagccgttcttcgttgctgaagtcttcaccggttctccgggtaagctcgtcgcgctcgaagacacgatcaagggcttcaagggcctggtcaacggcgaatatgacagcctgccggaagcagctttctacatggtcggttcgatggaagaagccatcgaaaaggcaaagaagctgactgctgaagccgcctga

SEQ ID NO: 43505 - protein, 484 aa, Agrobacterium tumefaciens
MAKAATPKKTAAVNGAGKVTQVIGAVVDVAFEGELPPILNALETQNNGNRLVLEVAQHLGENVVRTIAMDSTEGLVRGQSVADTGAPIEVPVGLETLGRIMNVIGEPVDEAGPIVTAKKRAIHQDAPSYVEQSTEGQILVTGIKVVDLLAPYAKGGKIGLFGGAGVGKTVLIMELINNVAKAHGGYSVFAGVGERTREGNDLYHEMIESNVNKLGGGEGSKAALVYGQMNEPPGARARVALTGLTIAENFRDEGQDVLFFVDNIFRFTQAGSEVSALLGRIPSAVGYQPTLATDMGQMQERITTTNKGSITSVQAIYVPADDLTDPAPATSFAHLDATTVLSRSIAEKGIYPAVDPLDSTSRMLDPMIVGEEHYEVARKVQSTLQRYKSLQDIIAILGMDELSEEDKLTVARARKIERFLSQPFFVAEVFTGSPGKLVALEDTIKGFKGLVNGEYDSLPEAAFYMVGSMEEAIEKAKKLTAEAA

SEQ ID NO: 43506 - DNA, 1449 bp, Anabaena variabilis
  CDS (1)..(1449): transl_table=11
atggtcaccaccgcagaaaaaacaaacatcggttacattacccaaatcattggtccggttgtagacgttaaattccctagcggaaaattaccgcaaatctacaacgctctgaccatcaaaggcactaacgaagctggacaggaactcaacctcaccgtagaagtacagcaacttttgggcgacaaccaaatacgcgccgttgctatgagttccacggatggtttagtccgtggtctggaagtcgtcgatacaggcgcgcccatcagcgtacccgttggtaaagcaactctcggacggattttcaacgttcttggcgaacctgtagacaatagaggcccagttaacaaccaagaaactttacccatccaccgtccggctcccaagctcacagagctagaaaccaagccttccgttttcgagaccgggattaaagttgttgacctcctgaccccttatcgacgcggtggtaaaattggtctgttcggcggtgctggtgtcggcaaaaccgtaatcatgatggagctgattaacaacattgctacccagcacggtggcgtgtctgtattcgccggcgtgggagagcgtacccgtgaagggaatgacctctacaacgaaatgattgaatctggggtaatcaacaaagacaacctcaacgaatcaaaaatcgcgttggtgtacggtcaaatgaacgaaccacccggagcaagaatgcgggttggtttgtctggtttgacaatggctgaatacttccgtgatgtcaataagcaagacgtactgttgtttattgacaacattttccggttcgtacaagcaggttctgaagtatccgcgctgttgggtcggatgccttctgctgtgggatatcagccaactttgggtactgatgtaggtcaattgcaagaacggattacctccactaccgaaggttctatcacctcaattcaagctgtgtacgtacctgcggacgacttgacagaccccgcgcctgcaactacctttgctcacttagatggtacaacagtactatctcgtggtttggctgctaaaggtatttatcctgcggtagatccgctaggttccacctctaccatgttgcaacctaacattgttggtgacgaacactacaatactgctcgtgctgtccaatcgaccctgcaacgctacaaagaattgcaagacatcatcgctattctgggtctagatgaactgtctgaagaagacagactcatcgtagcacgggcccggaaagttgagcgtttcttgtctcagcccttcttcgtcgctgaagtattcacaggttctcctggtaagtacgtgaagttagaagacaccatcaaagggttccagaagattctatctggtgagttggatgatctgccagagcaagccttctacttggtaggcgacatcaacgaagcgatcgccaaagccgaaaaactcaaaggctaa

SEQ ID NO: 43507 - protein, 482 aa, Anabaena variabilis
MVTTAEKTNIGYITQIIGPVVDVKFPSGKLPQIYNALTIKGTNEAGQELNLTVEVQQLLGDNQIRAVAMSSTDGLVRGLEVVDTGAPISVPVGKATLGRIFNVLGEPVDNRGPVNNQETLPIHRPAPKLTELETKPSVFETGIKVVDLLTPYRRGGKIGLFGGAGVGKTVIMMELINNIATQHGGVSVFAGVGERTREGNDLYNEMIESGVINKDNLNESKIALVYGQMNEPPGARMRVGLSGLTMAEYFRDVNKQDVLLFIDNIFRFVQAGSEVSALLGRMPSAVGYQPTLGTDVGQLQERITSTTEGSITSIQAVYVPADDLTDPAPATTFAHLDGTTVLSRGLAAKGIYPAVDPLGSTSTMLQPNIVGDEHYNTARAVQSTLQRYKELQDIIAILGLDELSEEDRLIVARARKVERFLSQPFFVAEVFTGSPGKYVKLEDTIKGFQKILSGELDDLPEQAFYLVGDINEAIAKAEKLKG

SEQ ID NO: 43508 - DNA, 1484 bp, Anthoceros formosae
  CDS (1)..(1479)
atgaaaacaaattatcttattcttggagtttctacacttatctccaagaatgtggggcatattagtcagataatcggaccagtactagatgtaacttttcctccaggtaaaatgcctaatatttacaattctttaatagtccgaggtcaaaatccagctggtcaagagattaatgttacttgtgaagtacaacaattattagggaataataaggttagggctgtagcaatgagtgctacagatggtttgacaaggggaatgaaagttactgatactggagcccccttaagtgttccagtcggtgaagttactcttggacgaattttcaatgttcttggagaacctgttgataatttaggtgctatagatgttagcacaacatttcctattcatagatctgcccctgcctttacacaattagatactaaattatccatctttgaaacaggaattaaagtagtagatctgttagctccttatcgtcgtggaggaaagattggactatttggaggagctggagtaggaaaaacggtactcattatggagttgattaataacatagctaaagctcatggaggtgtatccgtttttggtggagtaggggaacgtacccgtgaaggaaacgatctttatatggaaatgaaagaatcgaaagttattaatgagcaagatatttcagaatcaaaagtagcactagtctatggtcagatgaatgagcctccaggggcgcgtatgagagttggtttaactgctttaactatggctgagtattttcgagatgttaataagcaagacgtacttttatttattgataatatttttcgtttcgttcaagcaggatcagaagtttctgctttattaggtagaatgccctccgctgtaggttatcaaccaactttgagcacagaaatgggttctttacaggaaagaattacttcaacaaaagaaggatctataacatcaattcaagctgtttatgtacctgctgatgatttgactgaccctgctcctgctacaacattcgctcacttagatgctaccactgtattatctagaggattagctgccaaaggtatatatcctgccgtagatcctttagattcaacttctacgatgcttcaaccctggattgtaggcgaagagcattacgagacagcacaaggagttaaacaaaccttacaacgttataaggaactgcaagatattatagctattcttggattagacgaattatcggaggaggatcgtttaactgtagcgagagcacgcaaaatagaacgttttttatcacaacctttttttgtggcagaggtttttacgggttctccaggtaaatatgtaagtcttattgaaacaatcaagggttttcaaatgattcttgctggagaattagatggtcttcctgaacaagctttttatttagttggtaatattgatgaagttactgcgaaggctgaaaccttacaaatggagagttgataaaa

SEQ ID NO: 43509 - protein, 492 aa, Anthoceros formosae
MKTNYLILGVSTLISKNVGHISQIIGPVLDVTFPPGKMPNIYNSLIVRGQNPAGQEINVTCEVQQLLGNNKVRAVAMSATDGLTRGMKVTDTGAPLSVPVGEVTLGRIFNVLGEPVDNLGAIDVSTTFPIHRSAPAFTQLDTKLSIFETGIKVVDLLAPYRRGGKIGLFGGAGVGKTVLIMELINNIAKAHGGVSVFGGVGERTREGNDLYMEMKESKVINEQDISESKVALVYGQMNEPPGARMRVGLTALTMAEYFRDVNKQDVLLFIDNIFRFVQAGSEVSALLGRMPSAVGYQPTLSTEMGSLQERITSTKEGSITSIQAVYVPADDLTDPAPATTFAHLDATTVLSRGLAAKGIYPAVDPLDSTSTMLQPWIVGEEHYETAQGVKQTLQRYKELQDIIAILGLDELSEEDRLTVARARKIERFLSQPFFVAEVFTGSPGKYVSLIETIKGFQMILAGELDGLPEQAFYLVGNIDEVTAKAETLQMES

SEQ ID NO: 43510 - DNA, 1437 bp, Aquifex pyrophilus
  CDS (1)..(1437): transl_table=11
atggcggaagttataaagggaagaatcgttcaggtgataggtcccgtcgttgacgttgagtttgaaggagttaaggagcttccccgtatcaaggacggactaaagacgataagaagggcgatagacgacaggggaaactggtttgaggaagtcctctttatggaagttgctcagcacataggggaacacagggtaagggctatagctatgggacccacggacggactcgtgaggggtcaggaagttgagtatctggggggacccataaagatacccgtgggtaaggaagttctcggaagaatattcaacgttgcgggacagcccatagacgagcagggtcccgttgaggcaaaggaatactggcctatgttcaggaatcctcccgaactcgttgagcagtccacaaaggttgagatacttgagacgggaattaaggttatagacctcctccagcccattataaagggtggtaaggtcgggctcttcggcggtgcgggagtcggtaagacggttctcatgcaggagcttatccacaacatagcccgtttccacgagggatactcggtagtcgtcggtgtcggggagagaacgagagaaggaaacgacctctggcttgagatgaaggagtcgggagttctcccctacacggttatggtttacggacagatgaacgagccccccggagttaggttcagggttgcccacacgggtctcacgatggctgaatacttcagagacgttgagggacaggacgttctcatattcatagacaacattttcaggtttgttcaggcgggttcagaggtttcaacgctcctcggaagacttccctccgcggtcggataccagccaacccttaacaccgacgtcggtgaggttcaggaaaggattacatcaaccaagaagggttctattaccgctatacaggcggtttacgttcccgcggacgacataacggaccccgcaccctggtccatatttgcacaccttgacgctacgaccgttctcacgagaagactcgcggaactcggaatataccccgcgattgacccccttgaatcaacatcaaagtatctcgcacccgaatacgtcggagaagagcactacgaagttgctatggaagtgaagaggatactccagaggtataaggagctccaggaaatcatagcaatcctcggtatggaggagctctcggaagaggacaaggcgatagtcaacagggcgaggagaattcagaagttcctatctcagcccttccacgttgcggaacagttcacgggtatgcccggtaaatacgtaaagcttgaggacacgataaggtccttcaaggaagtcctcaccggaaagtatgaccaccttcccgaaaacgctttctacatggtcggaacgatagaggacgcaatagagaaggcaaaacagatgggggctaaggtttaa

SEQ ID NO: 43511 - protein, 478 aa, Aquifex pyrophilus
MAEVIKGRIVQVIGPVVDVEFEGVKELPRIKDGLKTIRRAIDDRGNWFEEVLFMEVAQHIGEHRVRAIAMGPTDGLVRGQEVEYLGGPIKIPVGKEVLGRIFNVAGQPIDEQGPVEAKEYWPMFRNPPELVEQSTKVEILETGIKVIDLLQPIIKGGKVGLFGGAGVGKTVLMQELIHNIARFHEGYSVVVGVGERTREGNDLWLEMKESGVLPYTVMVYGQMNEPPGVRFRVAHTGLTMAEYFRDVEGQDVLIFIDNIFRFVQAGSEVSTLLGRLPSAVGYQPTLNTDVGEVQERITSTKKGSITAIQAVYVPADDITDPAPWSIFAHLDATTVLTRRLAELGIYPAIDPLESTSKYLAPEYVGEEHYEVAMEVKRILQRYKELQEIIAILGMEELSEEDKAIVNRARRIQKFLSQPFHVAEQFTGMPGKYVKLEDTIRSFKEVLTGKYDHLPENAFYMVGTIEDAIEKAKQMGAKV

SEQ ID NO: 43512 - DNA, 1497 bp, Atropa belladonna
  CDS (1)..(1497)
atgagaatcaatcctactacttctggttctggggtttccacgcttgaaaaaaaaaacctggggcgtgtcgtccaaatcatcggtccggtactagatgtagcctttcccccgggcaagatgccgaatatttataacgctctggtagttcaaggtcgagatagtgttggtcaaccaattaatgtggcttgtgaggtacagcaattattaggaaataatcgagttagggctgtagctatgagtgctacagacggtctaacgagaggaatggaagtgattgacaaaggagctcctataagtgttccggtcgggggagcgactctgggacgaatttttaacgtgctcggagagcctgttgataatttagggcctgtagatactagtacaatgtctcctattcatagatctgcgcccgcctttatacagttagatacaaaattatctatttttgaaacaggaattaaagtagtagatcttttagccccttatcgccgtggaggaaaaatcggactattcgggggagctggagtgggtaaaacagtactcattatggaattgattaacaatattgctaaagctcacgggggcgtatccgtatttggcggagtgggtgaacgtactcgggaaggaaatgatctttacatggaaatgaaagaatctggggtgattaatgaagaaaatattgcagaatcaaaagtggccctagtttacggtcagatgaatgaaccgccgggagctcgtatgagagttggtttgactgccctaactatggcggaatatttccgagatgttaatgagcaagacgtacttctatttattgacaatatcttccgtttcgtccaagcaggatccgaagtatcggccttattgggtagaatgccttccgctgtgggttatcaaccgaccctgagtaccgaaatgggttctttacaagaaagaattacttctaccaaagaagggtccataacctctattcaagccgtttatgtacccgcagacgatttgaccgaccctgctcctgctacgacatttgcacatttagatgctactaccgtactatcaagaggattggctgccaaaggtatttatccagcagtagatcctttagattcaacgtcaaccatgcttcaacctcggatcgttggtgaggaacattacgaaaccgcccaaagagttaagcaaactttacaacgttacaaagaacttcaggacattatagctatccttggattggacgaattatccgaagaggatcgtttactcgtagcaagagcgcgaaaaattgagcgtttcttatcacaaccctttttcgtagcagaagtatttaccggttctccagggaaatatgttggtctagcagaaacaattcgaggatttcaattgatcctttccggagaattagatggtcttcctgaacaggccttttatttggtaggtaatatcgatgaagctaccgcgaaggctatgaacttagaaatggagagcaatttgaagaaatga

SEQ ID NO: 43513 - protein, 498 aa, Atropa belladonna
MRINPTTSGSGVSTLEKKNLGRVVQIIGPVLDVAFPPGKMPNIYNALVVQGRDSVGQPINVACEVQQLLGNNRVRAVAMSATDGLTRGMEVIDKGAPISVPVGGATLGRIFNVLGEPVDNLGPVDTSTMSPIHRSAPAFIQLDTKLSIFETGIKVVDLLAPYRRGGKIGLFGGAGVGKTVLIMELINNIAKAHGGVSVFGGVGERTREGNDLYMEMKESGVINEENIAESKVALVYGQMNEPPGARMRVGLTALTMAEYFRDVNEQDVLLFIDNIFRFVQAGSEVSALLGRMPSAVGYQPTLSTEMGSLQERITSTKEGSITSIQAVYVPADDLTDPAPATTFAHLDATTVLSRGLAAKGIYPAVDPLDSTSTMLQPRIVGEEHYETAQRVKQTLQRYKELQDIIAILGLDELSEEDRLLVARARKIERFLSQPFFVAEVFTGSPGKYVGLAETIRGFQLILSGELDGLPEQAFYLVGNIDEATAKAMNLEMESNLKK

SEQ ID NO: 43514 - DNA, 2824 bp, Bacillus caldotenax
  CDS (952)..(2373): transl_table=11
taaggccggcgggggcatatctgccctcatgcctgttagaacccgtgcagcaaaaaggtggtgaaacctttggcatcgttacgcgatattaaaacgcgcatcaatgcgacgaagaagacaagccaaattacaaaagcgatggaaatggtctcgacgtcgaagctgaaccgagcggaaaaacgcgaaatcgttcgtccatatatggagaaaattcaagaagtcgtggccatgtcggcttcggcggcgcgttcgcatccgatgctcgtttcgcgcccggtgaaaaaaaccggttatctcgtgatcacgtcggatcgcggtctggctggcgcgtacaacagcaacgtcgtgcgcctcgtgtacccaaaacgatccaaaaacgccatgcttcctccggacgaaatagcgatcatcgtcatcggccgcgtcgggttgagctttttccgcaagcggaacatgccggtcattctcgacatcacccgcttgccggaccagccgtcgtttgccgatattaaagaaatcgcccgcaaaacggttgggttattcgccgacggtacgtttgacgagctgtatatgtattacaaccattacgtgagcgcgatccagcaagaggtgacggaacggaagcttctgccgctcactgacttcttggcggagaataagcaacgcacggtgtacgaatttgaaccgtcgcaagaagaaattttggacgtcttattgccgcagtatgcggaaagcctcatttacggcgcattgctcgatgcaaaagcaagcgaacacgccgcccgcatgacggcgatgaagaacgcaacggacaatgcgaacgacgtcattcgcacattgacgctttcctacaaccgcgctcgccaagcggcgattacgcaagaaattacggaaattgtcgccggacgaaacgccttgcaatagggcactagcaagttaggagggaaaacgatgacaagaggacgcgttatccaagtcatgggtccggttgtagacgtcaagtttgagaacggccacttgccggcgatctacaacgccctgaaaattcaacataaagcgcgcaacgaaaacgaagtcgacatcgacttgacattggaagtcgccttgcaccttggcgatgatacagtacggacgatcgcgatggcgtccacagacggcctcatccgcggcatggaagtcatcgataccggtgcaccgatttcggtgccggtcggcgaagtcacgcttggccgcgtgttcaacgtcttgggcgagccgatcgacttggaaggcgacattccggctgacgcccgccgcgacccgattcaccgtccggcgccaaaattcgaggaattggcgacggaagtcgaaattttggaaacggggattaaagtcgttgacttgcttgccccgtatattaaaggcggaaaaatcggtttgttcggcggcgctggcgtaggaaaaacggtcttgattcaagagctgatccacaacatcgcccaagagcacggcgggatttccgtctttgctggcgtcggcgaacggacacgcgaaggaaacgacttgtaccatgagatgaaagattccggcgtcatcagcaaaacggccatggtgttcggacaaatgaatgagccgccgggggcgcggatgcgcgtcgccttgaccggcttgacgatggccgaatacttccgtgatgaacaaggccaagacgtgttgctctttatcgataacatcttccgtttcacgcaggccggttcggaagtgtcggcgctgttaggccgcatgccgtcggccgttggttaccaaccgacattggcgacggagatgggtcaattgcaagagcggatcacgtcgacggcgaaaggatcgactacctcgattcaagcgatttacgtcccggccgacgactatacggacccggctccggccacgacgttctcgcacttggatgcgacgacgaacctggagcggaacgtcgcggagatggggatttatccggccgttgacccgctcgcttcgacatcgcgtgcgttggcgccggaaatcgtcggcgaggagcactaccaagtcgcccgcaaagtgcagcaaacgctgcaacgttataaagaattgcaagacatcatcgccatcttggggatggatgaactgtcggatgaagacaaactcgtcgttcatcgcgcccgccgcatccagttcttcttgtcgcaaaacttccacgtggcggagcagttcacgggccaaccgggctcctacgtgccggtgaaagaaacagtgcgcggctttaaagaaattttggaaggcaaatacgaccatcttccggaagatcggttccgcttagtcggccgcattgaagaagtcgttgaaaaagcgaaagcgatgggtgtcgaagtgtgacccgggatagggggattggacaatgaaaacgatccacgtgagcgtcgttactcctgatggcccggtgtacgaagacgatgttgagatggtcagcgtcaaagcgaaaagcggcgagctcggcattttgccggggcacattcggcttgtcgccccgctcgagatcagcgcggcccggctgaaaaaaggcggcaaaacgcaatacattgccgtcagcggcggctttttggaagtccgcccggacaaagtgacgattttggctcaagctgctgaacgggcggaggacattgacgtcctccgcgccaaagcgcgaaagagcgggcggacgccgctgcaaagccagcaggatgacatcgacttcaaacgggccgaactggcgttaaaacgcgccatgaaccgtttgagtgttgcggaaatgaagtaaaaagcaggggaaaactcccctgcttttttt

SEQ ID NO: 43515 - protein, 473 aa, Bacillus caldotenax
MTRGRVIQVMGPVVDVKFENGHLPAIYNALKIQHKARNENEVDIDLTLEVALHLGDDTVRTIAMASTDGLIRGMEVIDTGAPISVPVGEVTLGRVFNVLGEPIDLEGDIPADARRDPIHRPAPKFEELATEVEILETGIKVVDLLAPYIKGGKIGLFGGAGVGKTVLIQELIHNIAQEHGGISVFAGVGERTREGNDLYHEMKDSGVISKTAMVFGQMNEPPGARMRVALTGLTMAEYFRDEQGQDVLLFIDNIFRFTQAGSEVSALLGRMPSAVGYQPTLATEMGQLQERITSTAKGSTTSIQAIYVPADDYTDPAPATTFSHLDATTNLERNVAEMGIYPAVDPLASTSRALAPEIVGEEHYQVARKVQQTLQRYKELQDIIAILGMDELSDEDKLVVHRARRIQFFLSQNFHVAEQFTGQPGSYVPVKETVRGFKEILEGKYDHLPEDRFRLVGRIEEVVEKAKAMGVEV

SEQ ID NO: 43516 - DNA, 1528 bp, Bacillus PS3
  CDS (61)..(1482): transl_table=11
gaaattgtcgccggagcaaacgccttgcaatagggcactagcaagttaggagggaaaacgatgacaagaggacgcgttatccaagtcatgggtccggttgtagacgtcaagtttgagaacggccacttgccggcgatctacaacgccctgaaaattcaacataaagcgcgcaacgaaaacgaagtcgacatcgacttgacattggaagtcgccttgcaccttggcgatgatacagtacggacgatcgcgatggcgtccacagacggcctcatccgcggcatggaagttatcgataccggtgcaccgatttcggtgccggtcgggcaagtcacgcttggccgcgtgttcaacgtcttgggcgagccgatcgacttggaaggcgacattccggctgacgcccgccgcgacccgattcaccgtccggcgccaaaattcgaggaattggcgacggaagtcgaaattttggaaacggggattaaagtcgttgacttgcttgccccgtatattaaaggcggaaaaatcggtttgttcggcggcgctggcgtaggaaaaacggtcttgatccaagagctgattcacaacatcgcccaagagcacggcgggatttccgtctttgctggcgtcggcgaacggacacgcgaaggaaacgacttgtaccatgagatgaaagattccggcgtcatcagcaaaacggccatggtgttcggacaaatgaatgagccgccgggggcgcggatgcgcgtcgccttgaccggcttgacgatggccgaatacttccgtgatgaacaaggccaagacggcttgctctttatcgataacatcttccgtttcacgcaggccggttcggaagtgtcggcgctgttaggccgcatgccgtcggccattggttaccaaccgacgttggcgacggagatgggtcaattgcaagagcggatcacgtcgacggcgaaaggctcgatcacctcgattcaagcgatttacgtcccggccgacgactatacggacccggctccggccacgacgttctcgcacttggatgcgacgacgaacctggagcggaagctcgcggagatggggatttatccggccgttgacccgctcgtctcgacatcgcgtgcgttggcgccggaaatcgtcggcgaggagcattatcaagtcgcccgcaaagtgcagcaaacgctcgaacgttataaagaattgcaagacatcatcgccatcttggggatggatgaactgtcggatgaagacaaactcgtcgttcatcgcgcccgccgcatccagttcttcttgtcgcaaaacttccacgtggcggagcagttcacgggccaaccgggctcgtacgtgccggtgaaagaaacagtgcgcggctttaaagaaattttggaaggcaaatacgaccatcttccggaagatcggttccgcttagtcggccgcattgaagaagtcgttgaaaaagcgaaagcgatgggtgtcgaagtgtgacccgggatagggggattggacaatgaaaacgatccacgtgagcgtc

SEQ ID NO: 43517 - protein, 473 aa, Bacillus PS3
MTRGRVIQVMGPVVDVKFENGHLPAIYNALKIQHKARNENEVDIDLTLEVALHLGDDTVRTIAMASTDGLIRGMEVIDTGAPISVPVGQVTLGRVFNVLGEPIDLEGDIPADARRDPIHRPAPKFEELATEVEILETGIKVVDLLAPYIKGGKIGLFGGAGVGKTVLIQELIHNIAQEHGGISVFAGVGERTREGNDLYHEMKDSGVISKTAMVFGQMNEPPGARMRVALTGLTMAEYFRDEQGQDGLLFIDNIFRFTQAGSEVSALLGRMPSAIGYQPTLATEMGQLQERITSTAKGSITSIQAIYVPADDYTDPAPATTFSHLDATTNLERKLAEMGIYPAVDPLVSTSRALAPEIVGEEHYQVARKVQQTLERYKELQDIIAILGMDELSDEDKLVVHRARRIQFFLSQNFHVAEQFTGQPGSYVPVKETVRGFKEILEGKYDHLPEDRFRLVGRIEEVVEKAKAMGVEV

SEQ ID NO: 43518 - DNA, 1518 bp, Bacteroides thetaiotaomicron
  CDS (1)..(1518): transl_table=11
atgtcacagattatcggacatatctcacaggtgatcggccctgtggtcgacgtgtactttgaaggtacggacgcagagttaatgctgccaagcattcacgacgcactggagataaagaggccaaacggcaaaatactggttgtagaagttcagcaacacatcggcgagaatacggttcgtaccgtggctatggacagcactgacggacttcagcgaggcatgaaggtgtatcccaccggaggcccgatcacaatgccgataggcgaacagattaaaggacgactgatgaacgtagtgggcgactctatcgacggtatgaagagtctcgaccgtacaggcgcatattccatccaccgtgatcccccaaagtttgaagatttgacaactgtgcaggaggtactcttcacgggtatcaaagtaatcgacctgctggagccgtatgccaaaggtggcaagatcggactctttggcggtgccggtgtaggaaagaccgtacttattcaggaactgatcaataatattgccaagaaacataacggattctccgtatttgccggagtcggcgagcgtacccgtgaaggtaacgacttgctgcgtgaaatgatcgagtcgggcgttatccgctacggcgaggctttcaaggaaagtatggagaagggcgactgggacctttcgaaagtagactataatgaactggaaaagtcgcaggtatccttgattttcggacagatgaacgagcctccgggcgcacgtgcctctgtggcattgtccggactgacggtagcggaatctttccgtgatgccggcaaggaaggtgagaaacgtgatatcctgttttttatcgataacattttccgtttcacgcaggcgggttcggaagtctcggctctgctgggacgtatgccttctgccgttggttatcagccgacacttgccacggaaatgggtgcgatgcaggaacgtatcacttccacccggaaaggttctatcacctccgtacaggcagtatatgtgcctgcggatgacttgacggaccctgctccggcaacaaccttcagccatctggatgcaacgaccgtgctcgaccgtaagattacggaattgggtatctatccggctgtcgatccactggcttctacgtcccgtatccttgacccgcacatcgtgggacaggaacattatgacgtagcacagcgcgtgaaacagattttgcagcgcaacaaggaattgcaggacatcatctccatccttggtatggaggaactttcggaagaagataaactggtcgtgaaccgtgcgcgccgtgtgcagcgtttcctttcgcagccgtttgccgttgccgaacagtttacaggcgttccgggcgtgatggtaggcatcgaggatacaatcaaagggttcagaatgattctcgacggtgaggtagacaacctccccgaacaggctttcctgaacgtgggcacgattgaagaagcgatagagaaaggcaagaaattgctggaacaagcgaaaaagtaa

SEQ ID NO: 43519 - protein, 505 aa, Bacteroides thetaiotaomicron
MSQIIGHISQVIGPVVDVYFEGTDAELMLPSIHDALEIKRPNGKILVVEVQQHIGENTVRTVAMDSTDGLQRGMKVYPTGGPITMPIGEQIKGRLMNVVGDSIDGMKSLDRTGAYSIHRDPPKFEDLTTVQEVLFTGIKVIDLLEPYAKGGKIGLFGGAGVGKTVLIQELINNIAKKHNGFSVFAGVGERTREGNDLLREMIESGVIRYGEAFKESMEKGDWDLSKVDYNELEKSQVSLIFGQMNEPPGARASVALSGLTVAESFRDAGKEGEKRDILFFIDNIFRFTQAGSEVSALLGRMPSAVGYQPTLATEMGAMQERITSTRKGSITSVQAVYVPADDLTDPAPATTFSHLDATTVLDRKITELGIYPAVDPLASTSRILDPHIVGQEHYDVAQRVKQILQRNKELQDIISILGMEELSEEDKLVVNRARRVQRFLSQPFAVAEQFTGVPGVMVGIEDTIKGFRMILDGEVDNLPEQAFLNVGTIEEAIEKGKKLLEQAKK

SEQ ID NO: 43520 - DNA, 1596 bp, Bartonella henselae
  CDS (1)..(1596): transl_table=11
atggtaaaagcagtgacgtcaagtaaggaaacagcaaaagttgagaaaaagaaatctgctcctcgttcaggcgtgaaaaaagccgtctcgaaatctcaagctggtgtaaaggattcctctagtcctgtgcataagtcttctaaaaaagctccgcttgcagaagcagcagtcggtgtgatcaaacaagttattggtgctgttgttgatgtgcagtttgaaggccctttgccaaatattctcaatgcattagaaacagataatttgggcaatcggctagttttagaagttgctcagcatttgggtgaaaataccgtgcgtaccattgccatggatactaccgatggtcttgtccgtggtcaaaaagtttttgatacaggaacacagatcagtgttcccgtgggagaagcaacacttggtcgtattatgaatgtgattggagagccggttgataatgttggcccaattgctacaagcaaaacccgttccattcaccaagaggctcctgaatatgtggagcaatcaaccgcatcagaaatccttgtgactggtattaaagtcgttgatctgttagctccttattctaaaggggggaaggttggtttgtttggaggtgccggtgttggtaaaaccgttctcattatggagcttatcaacaatattgcaaaggcgcatggtggctattcagtgtttgccggtgttggtgaacgtacacgtgagggaaatgatctttattatgaaatgatcgaaagccgtgtgaatgtgaatccaaaagacaacaatggttcaacagaaggatcaaaatgtgcactcgtttatgggcaaatgaatgaaccaccaggggcgcgtgcacgtgtggctctttcaggattgaccattgcagaaagtttccgtgatgagggacaagatgttttgttcttcgtagataatattttccgttttacgcaagcaggcgctgaagtgtcagctcttttagggcgtattccttctgctgtagggtatcagccaactttggcaactgatatgggggctttgcaagagcgtattaccagtacaagaacaggctctattacctctgttcaggctatttatgttcctgccgatgacttgacagatcccgctcctgcaacatcttttgcccatttggatgcgaccacagttctttctcgttccattgctgaaaagggtatttatccagcagtcgatccactcgattctttctcacgtatgttagatccattgatcgtgggggaagagcattatactgttgcttgtcaagttcagaccattttgcaacgttataggtcattgcaggatattattgctattcttggaatggatgaactttctgaagatgataagttactggtagggcgtgcccgtaaaattgaacgtttcctttcccaacctttccatgttgctgaagcctttaccggttcacctggaaaattggtgcctttagaagagacaatcaaaggctttaagggtctttgcgctggtgagtatgataatttgccagaagcggctttttatatggtcggttcgattgatgaagcagttgaaaaaggaaagcgtcttattgcagaagtttcttcataa

SEQ ID NO: 43521 - protein, 531 aa, Bartonella henselae
MVKAVTSSKETAKVEKKKSAPRSGVKKAVSKSQAGVKDSSSPVHKSSKKAPLAEAAVGVIKQVIGAVVDVQFEGPLPNILNALETDNLGNRLVLEVAQHLGENTVRTIAMDTTDGLVRGQKVFDTGTQISVPVGEATLGRIMNVIGEPVDNVGPIATSKTRSIHQEAPEYVEQSTASEILVTGIKVVDLLAPYSKGGKVGLFGGAGVGKTVLIMELINNIAKAHGGYSVFAGVGERTREGNDLYYEMIESRVNVNPKDNNGSTEGSKCALVYGQMNEPPGARARVALSGLTIAESFRDEGQDVLFFVDNIFRFTQAGAEVSALLGRIPSAVGYQPTLATDMGALQERITSTRTGSITSVQAIYVPADDLTDPAPATSFAHLDATTVLSRSIAEKGIYPAVDPLDSFSRMLDPLIVGEEHYTVACQVQTILQRYRSLQDIIAILGMDELSEDDKLLVGRARKIERFLSQPFHVAEAFTGSPGKLVPLEETIKGFKGLCAGEYDNLPEAAFYMVGSIDEAVEKGKRLIAEVSS

SEQ ID NO: 43522 - DNA, 1611 bp, Bartonella quintana
  CDS (1)..(1611): transl_table=11
atggtaaaagcagtgtcgtcaagcaaaggagcagcaaaagttgaacaaaaaaaatcagctgcccgttcaggcgtgaaaaaaaacgcctcaaaatctcaagccagtctacaggatacctctagtcctctaaaaacttcttctaaaaatgcccatgcaaaaaaagatgtccaggcaaaaggagcagtgggtgagatcaaacaggttattggtgctgtggtcgatgtgcaatttgaaggcgcgttgccaaatattcttaatgcattagaaacagaaaatttaggcaatcgactggttttagaagtcgctcagcatttgggtgaaaatacagtgcgtacaatcgccatggatacaactgatggtcttacgcgtggtcaaaaggtttttgatacagaaacacagatctgtgttcctgtgggagaagcaacccttggtcgtattatgaatgtcattggagagccggtcgacaatgttggaccaatcgctacaaccaaaacccgttccattcaccaaaaggcccctgaatatgttgaccaatcaacagcatcagaaatccttgttactggtattaaagtcgttgatttgttagcaccttattctaaaggtggtaaggttggtttgtttggcggtgctggtgtgggtaaaaccgttctcattatggagctcatcaacaatattgcaaaggcccatggcggttattcagtatttgccggtgttggagagcgcacacgtgaaggaaatgatctctattatgaaatgatcgaaagccgtgtgaatgtgaatccaaaagacaacaatggttcaacaaaaggatcaaaatgtgccctcgtttatggacaaatgaatgagccaccaggagcacgggcacgtgttgcactttcaggattgaccattgcagaaagtttccgtgatgaaggtcaagatgttcttttcttcgtcgataatatcttccgttttacacaagcaggcgctgaagtgtcagctcttttaggacgtatcccttctgctgtgggctatcagccaactttggcaacggacatgggggctttgcaagagcgtattacaagtacaaaaacaggctctattacctctgttcaggctatttatgtgccggctgatgacttgacagatccagcaccagctacatcttttgcccatttggatgcgacaacggttctttcccgttcgattgctgaaaagggtatttatccagcagttgatccccttgattctttctcacgcatgttggatccattggttgtgggtgaagagcattatactgttgcctgtcaagttcagaccattttgcaacgttatagatcgttgcaggatattattgctattcttggaatggatgaactttctgaagaggacaagttgctggtagggcgagcgcgtaaaattgaacgttttctttcgcaacctttccatgtggctgaaacctttactggatcacccggaaaactggtacctttagaagaaacaatcaaagggtttaaaggtctttgtgctggtgattatgatgatctgccagaagcagctttttatatggtgggttcgattgatgaagctcttgaaaaaggaaaacgtcttattgcagaagctgcttcataa

SEQ ID NO: 43523 - protein, 536 aa, Bartonella quintana
MVKAVSSSKGAAKVEQKKSAARSGVKKNASKSQASLQDTSSPLKTSSKNAHAKKDVQAKGAVGEIKQVIGAVVDVQFEGALPNILNALETENLGNRLVLEVAQHLGENTVRTIAMDTTDGLTRGQKVFDTETQICVPVGEATLGRIMNVIGEPVDNVGPIATTKTRSIHQKAPEYVDQSTASEILVTGIKVVDLLAPYSKGGKVGLFGGAGVGKTVLIMELINNIAKAHGGYSVFAGVGERTREGNDLYYEMIESRVNVNPKDNNGSTKGSKCALVYGQMNEPPGARARVALSGLTIAESFRDEGQDVLFFVDNIFRFTQAGAEVSALLGRIPSAVGYQPTLATDMGALQERITSTKTGSITSVQAIYVPADDLTDPAPATSFAHLDATTVLSRSIAEKGIYPAVDPLDSFSRMLDPLVVGEEHYTVACQVQTILQRYRSLQDIIAILGMDELSEEDKLLVGRARKIERFLSQPFHVAETFTGSPGKLVPLEETIKGFKGLCAGDYDDLPEAAFYMVGSIDEALEKGKRLIAEAAS

SEQ ID NO: 43524 - DNA, 1407 bp, Bdellovibrio bacteriovorus
  CDS (1)..(1407): transl_table=11
atggcattcggtaaagtaaaacaggtaatgggtcccgtagtagacgtggaatttgaaggcggggaacttcctgcgatcaactccgctctgcgtgtatcaaataaatttatctctgacgttgaattcaaccttgttcttgaagttgctcagcacttgggtgacggtgttgtaagaactatctctatggaccaaactgaaggtttggttcgtggtgaaaaagttaaagcgttgggcactcaaatcacagcgccagtaggccgtgaagctttgggccgtatcatcaacgtagttggtgaaccaatcgacgaaatgggtccagtaaacgcaaaagaacaatggggcatccacagaacggctcctaaattcgaagaccaagcaactgctgctgcaatgttgatgactggtatcaaagtcgtagacttgctggctccatacgctaagggtggtaagatcggtctgttcggtggtgccggcgtaggtaaaacagtacttatccaggaacttatccgtaacatcgctacagagcacggtggtttctccgtattcgcgggcgttggtgagcgtactcgtgaaggtaatgacttgtggcaagagatgaagcagtctggcgttttggccaagacttccctggtgttcggtcagatgaacgaacctcctggagctcgtgcgcgtgttgctttgactggtttgactgttgctgagtacttccgtgacgttgaaaaccaagacgtattgttcttcgtcgacaacatcttccgcttcactcaagcgggtgccgaagtttctgcattgttgggtcgtatcccttctgcggttggttaccagccaactcttgcgactgagatgggtactcttcaagagcgtatcacttccactaaaaaaggttccatcacttccgttcaagcggtttacgtaccagcggatgactacacggatccagctccagcaaccacgttcactcacttggatgctacgacaaacttggatcgtgatatcgcggctatggcgatcttccctgcggttcacccattgacgtccacttcacgtcttttggatccaactgttatcggcgaagaacactacaagtgcgctcgtgacgttcaggcgttgttgcagcgtaaccgtgagcttcaagacatcatcgcgatcctaggtatggacgagttgtctgaatctgataaattggttgtttcccgttctcgtaagatccagcgtttcttgtctcagccgttcttcgttgctgagcagttcactggcttgccaggtaagtacgtggatatcaaagacactgttaaaggtttccgcgagatccttgatggtaaacacgatgctcttccagagcaggcgttctaccttgttggtactatcgaagacgctatcgagaaagctaagaagctgcaggcctag

SEQ ID NO: 43525 - protein, 468 aa, Bdellovibrio bacteriovorus
MAFGKVKQVMGPVVDVEFEGGELPAINSALRVSNKFISDVEFNLVLEVAQHLGDGVVRTISMDQTEGLVRGEKVKALGTQITAPVGREALGRIINVVGEPIDEMGPVNAKEQWGIHRTAPKFEDQATAAAMLMTGIKVVDLLAPYAKGGKIGLFGGAGVGKTVLIQELIRNIATEHGGFSVFAGVGERTREGNDLWQEMKQSGVLAKTSLVFGQMNEPPGARARVALTGLTVAEYFRDVENQDVLFFVDNIFRFTQAGAEVSALLGRIPSAVGYQPTLATEMGTLQERITSTKKGSITSVQAVYVPADDYTDPAPATTFTHLDATTNLDRDIAAMAIFPAVHPLTSTSRLLDPTVIGEEHYKCARDVQALLQRNRELQDIIAILGMDELSESDKLVVSRSRKIQRFLSQPFFVAEQFTGLPGKYVDIKDTVKGFREILDGKHDALPEQAFYLVGTIEDAIEKAKKLQA

SEQ ID NO: 43526 - DNA, 1473 bp, Bifidobacterium longum
  CDS (1)..(1473): transl_table=11
atggctgacaaccagaccactgcggccgagcctaccaacggtcgcgtcacccgcgtccagggctcggttatcgacgttgaattcccggtgggtcatctgcccgacatctacaacgccctgaaagtaacgatcgtcaacaccagcgccaaggaagaaggcgaggcgaaggagaccgagatcaccctcgaggtcgaacagcacctcggtgattccacggtccgttgcgtcgctctgaagcccaccgacggcctggttcgtggtgcctccgtctccgacaccggcgccccgatctccgtgccggtcggcgacgtgaccaagggccacgtcttcgacgtgtccggtaacatcctcaacaagaagccggatgagaccatcaccgtctccgagcgttggcctatccaccgcaacccgccggccttcgatcagctggagtccaagacccagatgttcgaaacgggcatcaaggtcatcgatctgctgaccccgtacgtgcagggcggcaagatcggtctgttcggtggtgcaggtgtgggcaagaccgtgctgattcaggaaatgattcagcgcgtggcccagaaccacggtggtgtgtccgtgttcgctggcgtcggcgagcgtacccgtgagggtaacgatctgatcggcgaaatggccgaggccggcgtgcttgagaagaccgcactggtcttcggccagatggatgagcagccgggtacccgtctgcgtgtcccgctgaccgcactgaccatggcagagtacttccgtgacgtgcagaaccaggacgtgctgctgttcatcgacaacatcttccgcttcacccaggccggttccgaggtgtccaccctgctggggcgtatgccttccgccgtgggttaccagccgaacctggccgatgagatgggttccctccaggagcgcatcacctcgacccgtggtcactcgatcacctcgttgcaggccatttacgtgccggccgatgattacaccgacccggccccggccacgaccttcgcccacttggatgcaaccaccgagctttctcgtgacattgcctccaagggtatctacccggctgtggacccgctgagctccacctcgcgaatcctcgatccgcgttacgtgggccaggctcactacgactgcgccaaccgcgtcaaggcgattctgcagcgtaacaaggagctgcaggacatcatcgccctgatcggtatcgacgagctcggcgaagaggacaagaccaccgtgaaccgtgctcgtaagatcgagcagttcctcggccagaacttctatgtggctgagaagttcaccggtcgccccggctcctacgtgccggccgacgagaccatcgaagccttcacccgcatctgcgacggcgtgtacgacgacgtcccggagcaggcgttctccggcatcggcggcatcgacgacctcgaagagaagtggcacaacatgcagaaggaactgggtgcgtga

SEQ ID NO: 43527 - protein, 490 aa, Bifidobacterium longum
MADNQTTAAEPTNGRVTRVQGSVIDVEFPVGHLPDIYNALKVTIVNTSAKEEGEAKETEITLEVEQHLGDSTVRCVALKPTDGLVRGASVSDTGAPISVPVGDVTKGHVFDVSGNILNKKPDETITVSERWPIHRNPPAFDQLESKTQMFETGIKVIDLLTPYVQGGKIGLFGGAGVGKTVLIQEMIQRVAQNHGGVSVFAGVGERTREGNDLIGEMAEAGVLEKTALVFGQMDEQPGTRLRVPLTALTMAEYFRDVQNQDVLLFIDNIFRFTQAGSEVSTLLGRMPSAVGYQPNLADEMGSLQERITSTRGHSITSLQAIYVPADDYTDPAPATTFAHLDATTELSRDIASKGIYPAVDPLSSTSRILDPRYVGQAHYDCANRVKAILQRNKELQDIIALIGIDELGEEDKTTVNRARKIEQFLGQNFYVAEKFTGRPGSYVPADETIEAFTRICDGVYDDVPEQAFSGIGGIDDLEEKWHNMQKELGA

SEQ ID NO: 43528 - DNA, 1395 bp, Blochmannia floridanus
  CDS (1)..(1395): transl_table=11
atgagtattggaaaaattattcaggtgattggagcggtgattgatgtagaatttcaatataatgatattcccaatttatatcatgcacttgaggtgaatattgataatggtaattctcatcaggtgttaatattagaagtagtgcaacaattagggagaagtattgtacgttgtattgcaatgggaagtacaaatggattaaaacgtggtttagatgtaacgaatttaaaacatggtattcaagttccggtaggtaaggaaacattaggcagagtaatggatgttttaggcaatccaatagatatgaaaggaccaattaattcaatagaaaaatggtctattcatcgatctgctcctttgtatgaagagttatcatcaaatcaagagttgttgattactggaattaaagtaattgatttaatgtgtccttttataaaaggaggtaaaatagggctttttggaggagcaggggttggaaaaactgttaatataatggaattaattcgtaatattgctatagaacatgctggttattcggtatttgttggagtgggcgaacgcattcgagaaggtaatgatttttatcatgaaatgatacattctggtatacttgataaggttgctttagtttatggtcaaatgaatgagcctcctggaaatagattacgggtggctttaactggtttaactatagcagaaaaatttcgtgatgaaggtcatgatgtgttgttatttattgataatatatatcgttatactcttgctggaacagaagtttctgctttgttagggcgtgttccatctgctgtagggtatcaatctacgttatctgaagaaatggggatgttacaggaacgtattgcttctactaaatctggatcaattacttctgttcaggcgatatatgtacctgcagatgatttaactgatccatctcctacaactacttttgctcatttggatgcaactatagttttaagccgacagattgctgctcttggaatttatccagcagtagatccattagattcttacagtaaacagttagatccatgtattgtaggtcaggagcattatgatattgctaataatgttaagtctattttacagcgttatcaagagttaaaggatattattgctattttaggtatggatgaattatctgaggaggataaattaatagtattgagatctcgaaaaattcaacgatttttatctcaaccattttttgttgctgaagtatttactggattttctggatcatatgtatctttagaagatacaattgcaggttttaaagaaattatcgatggaaagtatgatcatttaccggagcaatctttttatatggttggatctgttaaggaagctatagagaaaagtaaaatactttaa

SEQ ID NO: 43529 - protein, 464 aa, Blochmannia floridanus
MSIGKIIQVIGAVIDVEFQYNDIPNLYHALEVNIDNGNSHQVLILEVVQQLGRSIVRCIAMGSTNGLKRGLDVTNLKHGIQVPVGKETLGRVMDVLGNPIDMKGPINSIEKWSIHRSAPLYEELSSNQELLITGIKVIDLMCPFIKGGKIGLFGGAGVGKTVNIMELIRNIAIEHAGYSVFVGVGERIREGNDFYHEMIHSGILDKVALVYGQMNEPPGNRLRVALTGLTIAEKFRDEGHDVLLFIDNIYRYTLAGTEVSALLGRVPSAVGYQSTLSEEMGMLQERIASTKSGSITSVQAIYVPADDLTDPSPTTTFAHLDATIVLSRQIAALGIYPAVDPLDSYSKQLDPCIVGQEHYDIANNVKSILQRYQELKDIIAILGMDELSEEDKLIVLRSRKIQRFLSQPFFVAEVFTGFSGSYVSLEDTIAGFKEIIDGKYDHLPEQSFYMVGSVKEAIEKSKIL

SEQ ID NO: 43530 - DNA, 1401 bp, Bordetella pertussis
  CDS (1)..(1401): transl_table=11
atgagcaacggaaccatcgttcagtgcatcggcgccgtggtggatattcagttcccccgcgataacatgcccaagatctacgaagcgctcaccctggtcgacgagggttcctcgttcgccgagaagggcttgacgctggaagtgcaacaacagctgggcgacggcgtggtgcgtaccatcgcgctgggttccagcgacgggctgcgccgcggcatgcaagtggccggcaccggcgcaccgatctcggtgcccgtgggccacggcaccctgggccgcatcatggacgtgctgggccgtcccatcgacgaagccggtcccatcgcctccgacgagaagcgcgccatccaccagcccgcgccccgtttcgacgagctgtcgccgtcggtcgagctgctggaaaccggcatcaaggttatcgacctggtgtgcccgttcgccaagggcggcaaggtcggcctgttcggcggcgccggcgtgggcaagaccgtcaacatgatggaactgatcaacaacatcgccaagcagcacagcggcttgtcggtgttcgccggcgtgggcgagcgtacccgcgaaggcaacgacttctaccacgaaatggaagagtcgaacgttctggacaaggtggccatggtgttcggccagatgaacgagcccccgggcaaccgcctgcgcgtggcgctgaccggcctgaccatggccgagaagttccgcgacgaaggccgtgacatcctgttcttcgtcgacaacatctaccgctacaccctggccggtaccgaagtgtcggcgctgctgggccgtatgccgtcggcggtgggctaccagcctacgctggccgaggaaatgggcgtgctgcaagagcgcatcacctcgaccaagaccggttcgatcacctcgatccaggccgtgtacgtgcctgccgacgacttgaccgacccgtcgcccgccacgaccttccagcacttggactcgaccgtcgtgctgtcgcgtgacatcgctgcgctgggcatctatcccgccgtggacccgctggattcctccagccgccagctcgacccgcaagtcgtgggcgaagagcactaccaggtggcccgtggcgtgcagcagacgctgcagcgctacaaggaactgcgcgacatcatcgcgattctgggcatggacgaactgtcgccggaagacaagcaggccgtggcccgcgcgcgcaagatccagcgcttcctgtcgcagcccttctacgtggccgaagtgttcaccggctcgccgggcaagtacgtgtcgctggccgaaacgatccgtggcttcaagatgatcgtcgacggcgagtgcgacgcgctgcccgagcaggcgttctacatggtcggcacgatcgacgaggccttcgagaaggccaagaaactccaataa

SEQ ID NO: 43531 - protein, 466 aa, Bordetella pertussis
MSNGTIVQCIGAVVDIQFPRDNMPKIYEALTLVDEGSSFAEKGLTLEVQQQLGDGVVRTIALGSSDGLRRGMQVAGTGAPISVPVGHGTLGRIMDVLGRPIDEAGPIASDEKRAIHQPAPRFDELSPSVELLETGIKVIDLVCPFAKGGKVGLFGGAGVGKTVNMMELINNIAKQHSGLSVFAGVGERTREGNDFYHEMEESNVLDKVAMVFGQMNEPPGNRLRVALTGLTMAEKFRDEGRDILFFVDNIYRYTLAGTEVSALLGRMPSAVGYQPTLAEEMGVLQERITSTKTGSITSIQAVYVPADDLTDPSPATTFQHLDSTVVLSRDIAALGIYPAVDPLDSSSRQLDPQVVGEEHYQVARGVQQTLQRYKELRDIIAILGMDELSPEDKQAVARARKIQRFLSQPFYVAEVFTGSPGKYVSLAETIRGFKMIVDGECDALPEQAFYMVGTIDEAFEKAKKLQ

SEQ ID NO: 43532 - DNA, 1434 bp, Bradyrhizobium japonicum
  CDS (1)..(1434): transl_table=11
atggcagcccagtccggtcgcgtcacccaggtcatcggcgccgtcgtcgacgtgcagttcgaaggccacctcccggccattctcaattcgctcgagaccaagaacggcggcaaccgcctggtgctcgaagtcgcccagcatctcggcgaatccaccgtgcgcacgatcgcgatggacaccaccgagggtctggtccgcggccaggaagtgaccgacaccggttcgccgatccgcgttcccgtcggcgaaggcacgctcggccgcatcatcaacgtcatcggcgagccgatcgacgaagccggcccggtcaagtcggaaggcctgcgcgccatccaccaggaagcgccgacctacaccgaccagtccaccgaagctgaaattctcgtcaccggcatcaaggtcgtcgatctcctggctccctatgcgaagggcggcaagatcggcctgttcggcggcgccggcgtcggcaagaccgtgctgattcaggagctgatcaacaacgtcgcgaaggcgcacggtggttactccgtgttcgccggcgtcggcgagcgtacccgcgagggcaacgacctctatcacgagttcatcgagtccaaggtcaacgccgatccgcacaatccggatccgagcgtgaagtcgaagtgcgcgctggtgttcggccagatgaacgagccgccgggcgcccgcgcccgcgtcgcgctcaccggtctgaccatcgcggaagacttccgcgacaagggccaggacgtgctgttcttcgtcgacaacatcttccgcttcacccaggccggctcggaagtgtcggcgctgctcggccgtattccttcggcggtgggttatcagccgacgctcgcgaccgacatgggcgcgctgcaggagcgcatcaccaccacgcagaagggctcgatcacctcggtgcaggccatctacgttccggccgacgacttgaccgacccggcgcccgcgacctcgttcgcgcatctggacgcgaccaccacgctgtcgcgctcgatcgccgaaaagggcatctacccggcggtggacccgctcgactcgacctcgcgcatgctctccccgctggtcgtcggcgaggagcactacgcggtcgcccgtcaggtccagcaggtgctgcagcgctacaaggcgcttcaggacatcatcgccattctcggcatggacgagctttcggaagaggacaagctgacggtggcccgcgcccgcaaggtcgagcgcttcatgtcgcagccgttccacgtcgccgaaatcttcaccggctcgcccggcaagttcgtcgacctcgccgacaccatcaagggcttcaagggcctggtggaaggcaagtacgaccacctgccggaagctgccttctacatggtcggcaccatcgaagaggcggtcgagaagggcaagaagctcgccgctgaagcggcctaa

SEQ ID NO: 43533 - protein, 477 aa, Bradyrhizobium japonicum
MAAQSGRVTQVIGAVVDVQFEGHLPAILNSLETKNGGNRLVLEVAQHLGESTVRTIAMDTTEGLVRGQEVTDTGSPIRVPVGEGTLGRIINVIGEPIDEAGPVKSEGLRAIHQEAPTYTDQSTEAEILVTGIKVVDLLAPYAKGGKIGLFGGAGVGKTVLIQELINNVAKAHGGYSVFAGVGERTREGNDLYHEFIESKVNADPHNPDPSVKSKCALVFGQMNEPPGARARVALTGLTIAEDFRDKGQDVLFFVDNIFRFTQAGSEVSALLGRIPSAVGYQPTLATDMGALQERITTTQKGSITSVQAIYVPADDLTDPAPATSFAHLDATTTLSRSIAEKGIYPAVDPLDSTSRMLSPLVVGEEHYAVARQVQQVLQRYKALQDIIAILGMDELSEEDKLTVARARKVERFMSQPFHVAEIFTGSPGKFVDLADTIKGFKGLVEGKYDHLPEAAFYMVGTIEEAVEKGKKLAAEAA

SEQ ID NO: 43534 - DNA, 2123 bp, Brassica napus
  CDS (545)..(2041)
gactttttataaatcgaaatatttaatattaaaataataataaaatcactcttgacagtaatatatgttgtatatgtaaatcctagatatgacaatatgcggaattcatccatgaaaatgaaaaacaaggggggggttgatatcgatgggacgcataaccggatatgctaaaatgaaaatatgaaaaaaaaaaagctaatgagatcgaaataatgaatcataaatagagttccatttcggaattggctagataaaacaaagtcttgcctattatgacaaataaatcaaagactttccacaaaaattttttttattcatatattttttattttaaaactaggttttggttagttgagcttgaaaacgactattccttcattgaaatttaattaagtaaaaaattgaattgcatattcgcttgggtggtaccaatgaaatcgagtgcttactcccatttattattgaattaaccaatgaatttactatacgaagattttttctgtattcgaaaaatttcgcaacaaaattgaacatattttttattatgagaataaatcctactacttcggatccagcggtttcaatacgtgaaaaaaacaacctgggacgtattgcccaaatcattggtccggtactggatgtagcctttcccccgggcaagatgcctaatatttacaatgctctggtggttaagggtcgagatacgcttggtcaagaaattaatgtgacttgtgaagtacagcaattattaggaaacaaccgagttagagctgtagctatgagcgcgaccgagggtttaaagagagggatggacgtggttgatatgggaaatcctctaagtgttccagtcggcggagcgactctaggacgaattttcaatgtacttggggaacctgttaataatttaggtcctgtcgatactctcacaacatctcctatccataaatccgcgcctgcttttatagacttagatacaaccttatctatttttgaaacaggaattaaagtagtagatcttttggccccttatcgtcgtgggggaaaaatcggactattcggtggggctggcgtgggtaaaacagtactaattatggaattgatcaacaacattgccaaagctcatggtggtgtatccgtatttggtggagtaggcgaacgaacccgtgaaggaaatgatctttacatggaaatgaaagagtctggagtcattaatgaactaaaccttgcggactccaaagtagccctagtctacggtcagatgaatgaaccgccgggagctcgtatgagagttggtctgactgccttaactatggcggaatatttccgagatgttaatgagcaagacgtacttctatttatcgacaatatcttccgttttgtacaagcaggatccgaggtatccgctttattgggtagaatgccttctgctgtgggttaccaacccacccttagtgccgaaatgggttctttacaagaaagaattacttctacgaaaaaagggtccataacctctattcaagcagtttatgtacctgcagacgatttgactgaccctgctcctgccaccacatttgcacatttagatgcgactaccgtactatcaagaggattagctgctaaaggcatctatccagcggtagatcctttagattcaacgtcaactatgctacaacctcgaatcgttggcgaggaacattatgaaactgcgcaacaagtaaagcaaactttacaacgttacaaggagcttcaggacattatagctatcctggggttggacgaattatccgaagaggatcgcttaaccgtcgcaagagcacgaaagattgagcgtttcttatcacaaccttttttcgtagcagaagtatttacaggttctccgggaaaatatgttgggctagcggaaacaattagagggtttaatttgatcctttccggagaatttgattctcttcctgaacaggccttttacttagtgggtaacatcgatgaagctactgcgaaggctacgaacttagaaatggagagtaaattgaagaaatgaccttaaatctttgtgtactgactccgaatcgaattgtttgggattcagaagtaaaagaaatcattttatctactaatagcgg

SEQ ID NO: 43535 - protein, 498 aa, Brassica napus
MRINPTTSDPAVSIREKNNLGRIAQIIGPVLDVAFPPGKMPNIYNALVVKGRDTLGQEINVTCEVQQLLGNNRVRAVAMSATEGLKRGMDVVDMGNPLSVPVGGATLGRIFNVLGEPVNNLGPVDTLTTSPIHKSAPAFIDLDTTLSIFETGIKVVDLLAPYRRGGKIGLFGGAGVGKTVLIMELINNIAKAHGGVSVFGGVGERTREGNDLYMEMKESGVINELNLADSKVALVYGQMNEPPGARMRVGLTALTMAEYFRDVNEQDVLLFIDNIFRFVQAGSEVSALLGRMPSAVGYQPTLSAEMGSLQERITSTKKGSITSIQAVYVPADDLTDPAPATTFAHLDATTVLSRGLAAKGIYPAVDPLDSTSTMLQPRIVGEEHYETAQQVKQTLQRYKELQDIIAILGLDELSEEDRLTVARARKIERFLSQPFFVAEVFTGSPGKYVGLAETIRGFNLILSGEFDSLPEQAFYLVGNIDEATAKATNLEMESKLKK

SEQ ID NO: 43536 - DNA, 1566 bp, Brucella melitensis
  CDS (1)..(1566): transl_table=11
atggcaaaagcagcgaccccgaaaactaccgccgcggccgaagcaaagccagcggcgaaggcacccgccaaaaaggcggcgcccaagaccaccgcagcagccaagcccgctgctacgaagtctggcgcccccaaggcagcagcagccggtgcgatcggccacattacgcaggtcatcggcgctgtcgtcgacgtcaagttcccggaaggccagctgccgctgatcctgaacgcgcttgaagtggacaatcagggccatcgtctggttctcgaagttgcccagcacctcggcgaagacaccgtgcgcaccatcgccatggacgcgaccgaaggtctcgttcgcggtcaggaagcacgcgacactggcgaaccgatcatggtgccggtcggcgtcgaaacgcttggccgcatcatgaacgtcatcggcgagccggttgacgaagcaggccccatcaagaccaaggcaacccgcgccatccaccagaacgcgccggaatatatcgaacagtcgaccgaagccgaaattctggtcacgggcatcaaggtcgtcgaccttctggcgccttacgccaagggcggcaagatcggcctcttcggcggtgcaggcgtcggcaagaccgttctcatcatggaactcatcaacaacgtcgccaaggcgcacggcggttattccgtgttcgcaggcgtcggtgagcgtacccgtgagggcaacgacctttaccacgaaatgatcgagtcgggcgtgaacaagctcggcggcggcgaaggctccaaggcagccctcgtttacggccagatgaacgaacccccgggtgcccgcgcccgcgttgccctttccggtctgacggttgctgaaaacttccgtgaccagggccaggacgttctgttcttcgtggacaacatcttccgcttcacgcaggcaggttcggaagtgtcggctcttctcggccgtattccttccgctgtgggttatcagccgacgctggcaaccgacatgggcgccatgcaggaacgcatcaccacgacgaccaagggttcgatcacctcggttcaggccatttacgtgcctgccgacgacttgaccgacccggcaccggcaacctcgttcgcccacctggatgcaacgaccgttctgtcgcgctcgatcgctgaaaagggtatctacccggctgttgacccgctcgactccacgtcgcgtatgctcgacccgaaggtcgtcggtgaagaacactatgccgtcgcccgtcaggttcagtcgatcctgcaacgttacaaggcccttcaggacatcatcgcgatcctgggcatggacgaactgtctgaagaagacaagctcaccgttgcccgcgcccgcaagatcgaacgcttcctgtcgcagccgttcttcgttgctgaagtcttcaccggttcgccgggcaagctggtcgatctcgccgacaccatcaagggcttcaagggcctttgcgctggcgactacgatcaccttccggaagctgccttctacatggtcggcagcatcgaggaagcactcgaaaaggccaagaagctggcggctgaagctgcctga

SEQ ID NO: 43537 - protein, 521 aa, Brucella melitensis
MAKAATPKTTAAAEAKPAAKAPAKKAAPKTTAAAKPAATKSGAPKAAAAGAIGHITQVIGAVVDVKFPEGQLPLILNALEVDNQGHRLVLEVAQHLGEDTVRTIAMDATEGLVRGQEARDTGEPIMVPVGVETLGRIMNVIGEPVDEAGPIKTKATRAIHQNAPEYIEQSTEAEILVTGIKVVDLLAPYAKGGKIGLFGGAGVGKTVLIMELINNVAKAHGGYSVFAGVGERTREGNDLYHEMIESGVNKLGGGEGSKAALVYGQMNEPPGARARVALSGLTVAENFRDQGQDVLFFVDNIFRFTQAGSEVSALLGRIPSAVGYQPTLATDMGAMQERITTTTKGSITSVQAIYVPADDLTDPAPATSFAHLDATTVLSRSIAEKGIYPAVDPLDSTSRMLDPKVVGEEHYAVARQVQSILQRYKALQDIIAILGMDELSEEDKLTVARARKIERFLSQPFFVAEVFTGSPGKLVDLADTIKGFKGLCAGDYDHLPEAAFYMVGSIEEALEKAKKLAAEAA

SEQ ID NO: 43538 - DNA, 1392 bp, Burkholderia cepacia
  CDS (1)..(1392): transl_table=11
atgagtactgctgctttggtagaaggcaagatcgtacagtgcatcggcgccgttatcgacgtggaattcccgcgcgacagcatgccgaagatctacgacgcgctcattctcgatggctcggaactgacgctcgaagtccagcaacagctgggcgacggcgtggtccgtaccatttgtctgggtgcatccgacggcctgcgccgcggcctgaccgtgaagaacacgagcaagccgatttcggtgccggtcggcaagccgaccctcggtcgtatcatggacgtcctcggccgtccgatcgacgaagccggcccgatcgaaagcgaacatacgcgttcgatccaccagaaggctccggcgttcgacgaactgtcgccgtcgaccgaactgctcgaaacgggtatcaaggtcatcgacctgatctgcccgttcgcaaagggcggcaaggtcggcctgttcggcggtgctggcgtgggcaagaccgtcaacatgatggagctcatcaacaacatcgcgaaggaacacggcggttactccgtgttcgcgggcgtgggcgagcgtacccgtgaagggaacgacttctaccacgaaatgaaggactcgaacgttctcgacaaggtcgcgctggtgtacggccagatgaacgagccgccgggcaaccgtctgcgcgtgctgaccggcctgacgatggccgagcacttccgtgacgaaggcctcgacgtcctgttcttcgttgacaacatctaccgtttcacgctggccggtaccgaagtgtcggcactgctcggccgtatgccgtcggcagtgggctatcagccgacgctggctgaagaaatgggcaagctgcaagagcgcatcacgtcgaccaagaagggctcgattacgtcggtccaggccgtgtacgtccctgcggacgacttgaccgacccgtcgccggccacgaccttcggccacctggacgcaaccgtcgttctgtcgcgtgacatcgcttcgctgggtatctacccggcggtcgacccgctcgactcgacgtcgcgccagatcgacccgaacgtgatcggtgaagagcactactcgatcacccgtcgcgttcagcagacgctgcagcgctacaaggaactgcgcgacatcatcgcgattctgggcatggacgaactgtcgccggaagacaagctgtcggtcgcacgtgcgcgtaagatccagcgtttcctgtcgcagccgttccacgtcgctgaagtgttcacgggctcgccgggcaagtacgtgccgctgaaggaaacgatccgtggcttcaagatgatcgtcgacggcgagtgcgaccacctgccggaacaggcgttctacatggtcggcacgatcgacgaagccttcgaaaaggccaagaagatctcgtaa

SEQ ID NO: 43539 - protein, 463 aa, Burkholderia cepacia
MSTAALVEGKIVQCIGAVIDVEFPRDSMPKIYDALILDGSELTLEVQQQLGDGVVRTICLGASDGLRRGLTVKNTSKPISVPVGKPTLGRIMDVLGRPIDEAGPIESEHTRSIHQKAPAFDELSPSTELLETGIKVIDLICPFAKGGKVGLFGGAGVGKTVNMMELINNIAKEHGGYSVFAGVGERTREGNDFYHEMKDSNVLDKVALVYGQMNEPPGNRLRVLTGLTMAEHFRDEGLDVLFFVDNIYRFTLAGTEVSALLGRMPSAVGYQPTLAEEMGKLQERITSTKKGSITSVQAVYVPADDLTDPSPATTFGHLDATVVLSRDIASLGIYPAVDPLDSTSRQIDPNVIGEEHYSITRRVQQTLQRYKELRDIIAILGMDELSPEDKLSVARARKIQRFLSQPFHVAEVFTGSPGKYVPLKETIRGFKMIVDGECDHLPEQAFYMVGTIDEAFEKAKKIS

SEQ ID NO: 43540 - DNA, 1395 bp, Burkholderia mallei
  CDS (1)..(1395): transl_table=11
atgagtactgctgctttggtagaaggcaagatcgtacagtgcatcggcgccgttatcgacgtggaattcccgcgcgagagcatgccgaagatctacgacgcgctcattctggaaggctcggaactgacgctcgaagtccagcagcagctgggcgacggcgtggtccgtaccatctgtctgggtgcctccgacggcctgcgccgcggcgtcgtggtgaagaatacgggcaatccgatttcggtgccggtcggcaagccgaccctcggccgcatcatggacgtgctcggccgcccgatcgacgaggcgggaccgatcgagagcgaaaacaagcgctcgatccaccagaaggcgccggcgttcgacgagctgtcgccgtcgaccgaactgctcgaaacgggcatcaaggtcatcgatctgatctgcccgttcgcaaagggcggcaaggtcggcctgttcggcggcgcgggcgtgggcaagaccgtcaacatgatggagctcatcaacaacatcgcgaaggagcacggcggttactccgtgttcgcgggcgtgggcgagcgtacccgtgaagggaacgacttctaccacgaaatgaaggactcgaacgttctcgacaaggtcgcgctggtgtacggccagatgaacgagccgccgggcaaccgtctgcgcgtggcgctgacgggcctcacgatggccgagcacttccgtgacgaaggcctcgacgtgctgttcttcgtcgacaacatctaccgtttcacgctggccggtaccgaagtgtcggcgctgctcggccgtatgccgtcggcagtgggctatcagccgacgctggctgaagaaatgggcaagctgcaagagcgcatcacgtcgacgaagaagggctcgatcacgtcggttcaggccgtgtacgtgcctgcggacgacttgaccgacccgtcgccggccaccaccttcggccacttggacgcaaccgtcgttctgtcgcgtgacatcgcatcgctcggtatctatccggccgtcgacccgctcgactcgacgtcgcgccagatcgacccgaacgtgatcggcgaagagcactactcgatcacccgccgcgttcagcagacgctgcagcgctacaaggaactgcgcgacatcatcgcgattctgggcatggacgagctgtcgccggaagacaagctgtcggttgcgcgcgcacgtaagatccagcgtttcctgtcgcagccgttccacgtcgccgaagtgttcacgggctcgccgggcaagtacgtgccgctgaaggaaacgatccgcggcttcaagatgatcgtcgacggcgagtgcgaccacctgccggaacaggcgttctacatggtcggcacgatcgacgaagccttcgagaaggccaagaagatccagtaa

SEQ ID NO: 43541 - protein, 464 aa, Burkholderia mallei
MSTAALVEGKIVQCIGAVIDVEFPRESMPKIYDALILEGSELTLEVQQQLGDGVVRTICLGASDGLRRGVVVKNTGNPISVPVGKPTLGRIMDVLGRPIDEAGPIESENKRSIHQKAPAFDELSPSTELLETGIKVIDLICPFAKGGKVGLFGGAGVGKTVNMMELINNIAKEHGGYSVFAGVGERTREGNDFYHEMKDSNVLDKVALVYGQMNEPPGNRLRVALTGLTMAEHFRDEGLDVLFFVDNIYRFTLAGTEVSALLGRMPSAVGYQPTLAEEMGKLQERITSTKKGSITSVQAVYVPADDLTDPSPATTFGHLDATVVLSRDIASLGIYPAVDPLDSTSRQIDPNVIGEEHYSITRRVQQTLQRYKELRDIIAILGMDELSPEDKLSVARARKIQRFLSQPFHVAEVFTGSPGKYVPLKETIRGFKMIVDGECDHLPEQAFYMVGTIDEAFEKAKKIQ

SEQ ID NO: 43542 - DNA, 1398 bp, Campylobacter jejuni
  CDS (1)..(1398): transl_table=11
atgcaaggatttatttcacaggtattaggtccggttgttgatgtagattttaacgactatttgcctcaaattaatgaagcaattgttgtaaattttgaaagcgaaggaaaaaaacataaacttgttttagaagtagcagctcatttaggagataatagagttagaactattgctatggatatgacagatggtttggtaaggggcttaaaagctgaggctttaggtgctcccattagtgttcctgttggtgagaaagttttaggaagaattttcaatgttactggagatttgatcgatgaaggtgaagaaatttctttcgataaaaaatgggcaattcatagagatccaccagcttttgaagatcaaagcacaaaaagtgagatttttgaaacagggattaaagttgtagatttacttgctccttatgcaaaaggtggtaaagtaggtctttttggtggtgcaggtgttggtaaaactgttattattatggagcttattcacaatgttgcatttaagcatagcggctattctgtatttgcaggtgtgggtgagagaactcgtgaaggaaatgacctttataatgaaatgaaagaaagtaatgttttagacaaagttgctctatgttatggacaaatgaatgaaccaccaggggcaagaaatcgtattgctttaacaggtttaacaatggctgagtattttagagatgaaatgggtcttgatgtgcttatgtttattgataatatctttagattttcacaatcaggttctgaaatgtcagcacttttaggaagaattccatcagctgtgggttatcaaccaaccttagcaagtgaaatgggtaaattccaagaaagaattacttcaactaaaaaaggctcaatcacttcagttcaagctgtttacgttccagctgatgacttaacagacccagctccagcaactgtttttgctcacttagatgctacaacggttttaaatagagctattgctgaaaagggtatttatcctgcagttgacccacttgactcaacttcaagaatgcttgacccaaatatcattggagaagaacattataaagttgctcgtggtgttcaatcagtgcttcaaaaatacaaagatttacaagatatcatcgccattttaggtatggatgagcttagcgaagaggataaacttgtagttgaaagagcaagaaagattgaaaaattcttatcacaaccatttttcgttgcagaagttttcacaggtagcccaggaaaatatataagccttgaagatacaatagcaggatttaagggaattttagaaggtaaatatgatcatttaccagaaaatgctttctatatggttggaaatatagatgaagctattgcaaaagcggataaattaaaaggttaa

SEQ ID NO: 43543 - protein, 465 aa, Campylobacter jejuni
MQGFISQVLGPVVDVDFNDYLPQINEAIVVNFESEGKKHKLVLEVAAHLGDNRVRTIAMDMTDGLVRGLKAEALGAPISVPVGEKVLGRIFNVTGDLIDEGEEISFDKKWAIHRDPPAFEDQSTKSEIFETGIKVVDLLAPYAKGGKVGLFGGAGVGKTVIIMELIHNVAFKHSGYSVFAGVGERTREGNDLYNEMKESNVLDKVALCYGQMNEPPGARNRIALTGLTMAEYFRDEMGLDVLMFIDNIFRFSQSGSEMSALLGRIPSAVGYQPTLASEMGKFQERITSTKKGSITSVQAVYVPADDLTDPAPATVFAHLDATTVLNRAIAEKGIYPAVDPLDSTSRMLDPNIIGEEHYKVARGVQSVLQKYKDLQDIIAILGMDELSEEDKLVVERARKIEKFLSQPFFVAEVFTGSPGKYISLEDTIAGFKGILEGKYDHLPENAFYMVGNIDEAIAKADKLKG

SEQ ID NO: 43544 - DNA, 1422 bp, Carboxydothermus hydrogenoformans
  CDS (1)..(1422): transl_table=11
atgaacgtaggtcgggtagtgcaggttatcggcgttgtggtggacgtagagtttgaaccgggtaaggttcctcccatttataacgccttaaaaataagaagcgaagaccaggacacacccaccgaagtgcccattaacctgacgctggaagttgcccagcacctgggcaacaaccgggtccgggcggtagcgatgtcgtctaccgatggcctggttcggggcatgaaagtggtggataccggagcgcccattaccgttccggtaggccgtcctgttttgggacgcctgttaaacgtgctcggggaacccattgacggtaagggaccggtggaaagcgaccattactatcccattcaccggcccgctcctcctctggaagaacagtccacccgggcggaaatcctggaaacggggattaaggttatcgaccttttggtaccgttcttaaagggtggtaaaatcgggcttttcggcggtgccggagtaggtaagaccgttatcgtgatggagctcatcaacaacattgccaagcagcacggtggtatttccgtgtttgccggtgtgggcgagcggacccgggaaggtaacgacctttaccacgaaatgaaagaagcgggcgttttggataagaccatcatggtgttcgggcaaatgaacgaaccacccggggtgcgtcttagagtagggcttaccggtcttaccatggcggaatacttccgggatgaagaggggcaggacgtgctcctctttatcgacaacatcttccgcttcacccaggccggatccgaagtgtccgccctactgggccggatgccttcggcggtgggttaccagcccaccctggcgaccgagatgggtcagctccaggagcggattacctcaacccggaaaggttcgattacttcggtgcaggcggtttacgtgccggcggacgacttaaccgacccggcgccggcgacaaccttcgcacacctggatgctaccgtcgttctttcccggcaaattgccgagctcgggatttatccggcggtggaccccctggactccacttcccggattttagacccgcatatcgtcggggaggaacattatcaggtagcccggggtgtgcagcgggtgctccagcgctataaagaactgcaggacatcatcgccattctcggtatggatgagctttccgacgaagacaagctgatcgtggcccgggcccggaagctgcagcgcttcctttcccagccgtttaccgtggccgaagcgtttaccgggcggcccgggaagtacgtgccggtgaaagaaaccatccggggctttaaagaaatcctggaaggcaagcacgacgatattccggagacctgcttctacatggcgggcaccatcgacgaagtggtggaaagggcccgggagcttgaaggaagtgcataa

SEQ ID NO: 43545 - protein, 473 aa, Carboxydothermus hydrogenoformans
MNVGRVVQVIGVVVDVEFEPGKVPPIYNALKIRSEDQDTPTEVPINLTLEVAQHLGNNRVRAVAMSSTDGLVRGMKVVDTGAPITVPVGRPVLGRLLNVLGEPIDGKGPVESDHYYPIHRPAPPLEEQSTRAEILETGIKVIDLLVPFLKGGKIGLFGGAGVGKTVIVMELINNIAKQHGGISVFAGVGERTREGNDLYHEMKEAGVLDKTIMVFGQMNEPPGVRLRVGLTGLTMAEYFRDEEGQDVLLFIDNIFRFTQAGSEVSALLGRMPSAVGYQPTLATEMGQLQERITSTRKGSITSVQAVYVPADDLTDPAPATTFAHLDATVVLSRQIAELGIYPAVDPLDSTSRILDPHIVGEEHYQVARGVQRVLQRYKELQDIIAILGMDELSDEDKLIVARARKLQRFLSQPFTVAEAFTGRPGKYVPVKETIRGFKEILEGKHDDIPETCFYMAGTIDEVVERARELEGSA

SEQ ID NO: 43546 - DNA, 1497 bp, Castanea sativa
  CDS (1)..(1497)
atgagaataaatcctactacttctgatcctggggtttccgcgcttgaaaaaaaaaacttgggacgtatagctcaaatcatcggtccggtactggatgtaactttccccccccggaaaatgcctaatatttacaacgctctggtagttaagggtcgagatactgccggtcaacaaattaatgtgacttgtgaagtacaacaactattaggaaataatcgagttagagctgtagctatgagtgctacagatggtctaatgagaggaatggaagtgattgacacgggagctcctttaagcgttccggtcggcggagcgactttaggacgaattttcaacgtgcttggagagcccgttgacaatttaggtcctgtagatactcgcacaacatctcctattcatagatctgcgcctgcttttatacagttagatacaaaattatctatttttgaaacaggaattaaagtagtagatcttttagccccttatcgccgtggaggaaaaataggactattcgggggagctggagtgggtaaaacagtactcattatggaattgatcaacaacattgccaaagctcatgggggtgtatctgtatttggcggagtaggtgaacgtactcgtgaaggaaatgatctttacatggaaatgaaagaatctggagtaattaatgaacaaaatattgcagaatcgaaagtcgctctagtatatggtcagatgaatgaaccgcctggagctcgtatgagagttggtttaactgccctaaccatggcagaatatttccgagatgttaatgaacaagacgtacttctatttatcgacaatatcttccgtttcgttcaagcaggatccgaagtatccgccttattgggtagaatgccttccgctgtgggttatcaacccacccttagtaccgaaatgggttctttacaagaaagaattacttctaccaaagaaggatccataacttctattcaagcagtttatgtgcctgcggacgatttgaccgatcctgctcctgccacgacatttgcacatttagatgctactaccgtactatcaagaggattagctgccaaaggtatctatccagcagtcgatcctttagattcaacttcaactatgctccaacctcggatcgttggtgaagaacattatgaaactgcgcaaagagttaaacaaactttacagcggtacaaagaacttcaggacattatagctatccttggattggacgaattatccgaagaggatcgcttaaccgtagcaagagcacgaaaaattgagcgtttcttatcacaaccttttttcgtagcagaagtatttacggggtccccgggaaaatatgttggtctatcagaaaccattagagggtttaaattgatcctttccggagaattagatggtcttcctgaacaggctttttatttggtaggtaacatcgatgaagctactgcgaaggctacaaacttagaaatggagagcaaattgaagcaatga

SEQ ID NO: 43547 - protein, 498 aa, Castanea sativa
MRINPTTSDPGVSALEKKNLGRIAQIIGPVLDVTFPPRKMPNIYNALVVKGRDTAGQQINVTCEVQQLLGNNRVRAVAMSATDGLMRGMEVIDTGAPLSVPVGGATLGRIFNVLGEPVDNLGPVDTRTTSPIHRSAPAFIQLDTKLSIFETGIKVVDLLAPYRRGGKIGLFGGAGVGKTVLIMELINNIAKAHGGVSVFGGVGERTREGNDLYMEMKESGVINEQNIAESKVALVYGQMNEPPGARMRVGLTALTMAEYFRDVNEQDVLLFIDNIFRFVQAGSEVSALLGRMPSAVGYQPTLSTEMGSLQERITSTKEGSITSIQAVYVPADDLTDPAPATTFAHLDATTVLSRGLAAKGIYPAVDPLDSTSTMLQPRIVGEEHYETAQRVKQTLQRYKELQDIIAILGLDELSEEDRLTVARARKIERFLSQPFFVAEVFTGSPGKYVGLSETIRGFKLILSGELDGLPEQAFYLVGNIDEATAKATNLEMESKLKQ

SEQ ID NO: 43548 - DNA, 1620 bp, Caulobacter crescentus
  CDS (1)..(1620): transl_table=11
atggccaagacccccgctgaaaagccggcgaccgccgccaagaagcccgccgcccccaaggccgccgctgctccgaaggccgccgccgccaaggcccccgccgccgccaaggctccggccgccaagaagccggccgctccgaaggccgccgccgcgccgaaggctcccgccgccggcctggaaggcgccaccggccgcctcgtccagatcatcggcgccgtcgtcgatatcgagttcgacggcgctctgccggcgatcctgaacgccgtcgagaccgtcaacaccgccacgggccagcgcctggtgttcgaagtcgcccagcacctgggtcagagcaccgtccgcgccatcgccatggacgccaccgaaggcctggttcgtggccagcccgtgcgcgacaccggcgagccgatccgcgtgccggtcggtccgggcaccctgggccgcatcatgaacgtcatcggcgagccgatcgacgaacagggcccgatccgttcggacatcagccgcacgatccaccgtgacgccccgtccttcgccgagcagaccaacaccgctgaagtgctggtcacgggcatcaaggtcatcgacctgatgtgcccctacaccaagggcggcaagatcggcctgttcggcggcgccggcgtcggcaagaccgtgacgatgcaggaactgatcaacaacatcgccaaggcttacggcggttactcggttctggccggcgtgggtgagcgcacccgcgaaggcaacgacctgtatcacgagatgatcgagtcgaacgtgaacgtcgacccgaaggctaacaacggctcgaccgaaggctcgcgctgcgccctcgtttacggccagatgaacgaacccccgggcgcccgcgcccgcgtcgccctgaccggcctctccatcgcggaatacttccgtgacgaagaaggcaaggacgtgctgctgttcgtcgacaacatcttccgcttcacccaggccggcgccgaagtgtcggctctgctgggccgtatcccgtcggccgtgggttaccagcccaccctggccaccgagatgggcaacctgcaggagcgcatcacctcgacgaacaagggttcgatcacctcggtccaggccatctacgtgcccgccgacgacttgaccgacccggctccggccacctcgttcgcccacttggacgccaccaccgttctgtcgcgtgacatcgcggcccaggccatcttcccggccgtggacccgctggactcgacctcgcggatcatggacccgctggtcatcggcgaagagcactacacggtggcgcgccgcgtccaggaagtgctgcagcagtacaaggccctgaaggacatcatcgccatcctgggcatggacgaactgtcggaagaggacaagctggtcgtggctcgcgcccgcaagatccagcgcttcctgtcgcagccgttccacgtcgccgagcagttcaccaacacgccgggcgccttcgtccagctgaaggacacgatccgctcgttcaagggcatcgtcgacggcgagtacgatcacctgccggaaggcgccttctacatggtcggtccgatcgaagaagccgtggccaaggccgaaaagatggcggctgaagcctaa

SEQ ID NO: 43549 - protein, 539 aa, Caulobacter crescentus
MAKTPAEKPATAAKKPAAPKAAAAPKAAAAKAPAAAKAPAAKKPAAPKAAAAPKAPAAGLEGATGRLVQIIGAVVDIEFDGALPAILNAVETVNTATGQRLVFEVAQHLGQSTVRAIAMDATEGLVRGQPVRDTGEPIRVPVGPGTLGRIMNVIGEPIDEQGPIRSDISRTIHRDAPSFAEQTNTAEVLVTGIKVIDLMCPYTKGGKIGLFGGAGVGKTVTMQELINNIAKAYGGYSVLAGVGERTREGNDLYHEMIESNVNVDPKANNGSTEGSRCALVYGQMNEPPGARARVALTGLSIAEYFRDEEGKDVLLFVDNIFRFTQAGAEVSALLGRIPSAVGYQPTLATEMGNLQERITSTNKGSITSVQAIYVPADDLTDPAPATSFAHLDATTVLSRDIAAQAIFPAVDPLDSTSRIMDPLVIGEEHYTVARRVQEVLQQYKALKDIIAILGMDELSEEDKLVVARARKIQRFLSQPFHVAEQFTNTPGAFVQLKDTIRSFKGIVDGEYDHLPEGAFYMVGPIEEAVAKAEKMAAEA

SEQ ID NO: 43550 - DNA, 1482 bp, Chaetosphaeridium globosum
  CDS (1)..(1482)
atgataaattcttcgtttatactgttagcatctactgttacaagtaaaaaagttggacgtattacccaaattataggtcctgttatggatgtagcatttccttcgggaaatatgcctaatatttacaacgctttagttgtaaaaggaaaaaatgctgcaggtcaagatatcgatgtaacgtgtgaagtacaacaattattaggagataataaagttcgcgcagttgcaatgagtgcaacggatggtcttatgagaggtatggatgttattgataccggatcagctttaagtgtacctgttggcgaggtaactctgggtagaatttttaatgtattaggagaacccgttgacaatatgggtccagtcaacgctacagtaacatctccaattcatagatctgcaccagcgtttacacaattggacactaaattatctatttttgaaacaggtattaaggttgttgatctattagctccttatcgtagaggaggtaaaattgggttgtttggtggtgctggtgtaggtaaaacagttcttattatggaacttattaataatattgctaaagcacacggtggagtttcagtttttggtggtgtaggtgaacgcacacgtgaaggtaatgacttgtacatggaaatgaaagaatctaaagttattaatgaagaaaatttgggtgaatcaaaagtagctttagtttacggtcagatgaatgagccaccaggtgctcgtatgcgtgttggattaacagcattaactatggccgagtatttccgtgatgtaaataaacaagacgttctattatttattgataatatttttaggtttgttcaagcaggttctgaagtatctgcattattaggaagaatgccttcagctgtaggatatcaacctacattaagtactgaaatggggggtttacaagaacgaatcacttctacaaaagaaggatctattacttctattcaagctgtttatgtacctgctgatgatttaacagatccagcaccagcaacaacttttgctcacttagatgcaacgactgtattatctagaggtttagcagcgaaaggaatttatcctgccgtagacccattagattctacttctactatgttacaaccttggattgtaggtgaagaacattatgaaactgcgcaaggtgttaaaaaaactttacaaagatataaagaattacaagatattattgcaattttaggtttagatgaattatcagaagaagatcgtttattagttgcaagagctcgtaaaatcgaacgtttcttgtctcaacctttctttgttgcggaagtttttacaggatctcctggaaaatatgttagtcttgtagaaacaattaaaggttttcaaatgattctatctggcgatttagattctttacctgaacaagctttttatttagtaggtaatattgacgaagcaactgcaaaagcagcaactctacaagtggagaattcataa

SEQ ID NO: 43551 - protein, 493 aa, Chaetosphaeridium globosum
MINSSFILLASTVTSKKVGRITQIIGPVMDVAFPSGNMPNIYNALVVKGKNAAGQDIDVTCEVQQLLGDNKVRAVAMSATDGLMRGMDVIDTGSALSVPVGEVTLGRIFNVLGEPVDNMGPVNATVTSPIHRSAPAFTQLDTKLSIFETGIKVVDLLAPYRRGGKIGLFGGAGVGKTVLIMELINNIAKAHGGVSVFGGVGERTREGNDLYMEMKESKVINEENLGESKVALVYGQMNEPPGARMRVGLTALTMAEYFRDVNKQDVLLFIDNIFRFVQAGSEVSALLGRMPSAVGYQPTLSTEMGGLQERITSTKEGSITSIQAVYVPADDLTDPAPATTFAHLDATTVLSRGLAAKGIYPAVDPLDSTSTMLQPWIVGEEHYETAQGVKKTLQRYKELQDIIAILGLDELSEEDRLLVARARKIERFLSQPFFVAEVFTGSPGKYVSLVETIKGFQMILSGDLDSLPEQAFYLVGNIDEATAKAATLQVENS

SEQ ID NO: 43552 - DNA, 1482 bp, Chara vulgaris
  CDS (1)..(1482)
atgacaaccgtaaatttagatcttcaaaattctctagttgcggagaaaaatagaggaaagattactcaaattattggacctgttatggatatttctttcttgccaggacaaatgcctaatatttataactgtttgactgtaaaaggaaaaaatgcttcaggggatttcatagatgtaacttgtgaagttcaacaacttttaggagataataaagtaagagcagtagctatgagtgctactgatggtcttatgagaggaatggaagtcattgatacaggatcacctttgagtgtgcctgtaggtgaaactactttaggtcgtattttcaatgtattaggagaaccagtagataatctaggtcctgtagatacgagtattactttccctattcatagagctgctcctgcttttacgcaattagatactaaattatctatttttgaaactggaattaaggtagtagatcttttggcaccttatcgtagaggtggaaagattggattatttggtggtgccggagttggtaagacagtattaattatggaattaattaataatattgctaaagcacatgggggagtgtctgtttttggtggtgttggagaaagaactcgtgaaggaaacgacttatatatggagatgaaagaatctaaagttattaacgaagaaaatatttctgaatccaaagtagctctagtttatggacaaatgaatgagccgccaggtgctcgcatgagagttggacttactgctttaactatggcagaatattttcgagatgtgaataaacaagacgtacttttatttattgataatatcttcagatttgtacaggctggatcagaagtttctgctttattaggtaggatgccttcagcagtaggttatcaacctactttaagtacagaaatgggcactcttcaagaaagaattacttcgacaaaagaaggctctattacctctattcaagcagtttatgtacctgcagatgatttaactgatccagctcctgctactacctttgctcatttagatgctactactgttctttctcggaatcttgctgcaaagggaatatatccagcagtagatccacttgattcaacatctactatgcttcagccatggatcgtaggagaagaacattatgaaactgctcaaggagtaaaagagactttgcagcgttataaagaattacaagacattattgctattcttggtttagacgaattatctgaagaagatcgtctaatagttgcaagagctcgtaagatcgaacgttttctctctcaacctttttttgtagcagaagtcttcactggatctcctggcaagtatgtcagcttaatagatacaattaaaggatttcaaatgatattatcgggagaattagatcatctacctgagcaggctttttatcttgtaggagatatagaagaagctactgctaaagcagcaactatacaagtacaaagtgagtga

SEQ ID NO: 43553 - protein, 493 aa, Chara vulgaris
MTTVNLDLQNSLVAEKNRGKITQIIGPVMDISFLPGQMPNIYNCLTVKGKNASGDFIDVTCEVQQLLGDNKVRAVAMSATDGLMRGMEVIDTGSPLSVPVGETTLGRIFNVLGEPVDNLGPVDTSITFPIHRAAPAFTQLDTKLSIFETGIKVVDLLAPYRRGGKIGLFGGAGVGKTVLIMELINNIAKAHGGVSVFGGVGERTREGNDLYMEMKESKVINEENISESKVALVYGQMNEPPGARMRVGLTALTMAEYFRDVNKQDVLLFIDNIFRFVQAGSEVSALLGRMPSAVGYQPTLSTEMGTLQERITSTKEGSITSIQAVYVPADDLTDPAPATTFAHLDATTVLSRNLAAKGIYPAVDPLDSTSTMLQPWIVGEEHYETAQGVKETLQRYKELQDIIAILGLDELSEEDRLIVARARKIERFLSQPFFVAEVFTGSPGKYVSLIDTIKGFQMILSGELDHLPEQAFYLVGDIEEATAKAATIQVQSE

SEQ ID NO: 43554 - DNA, 1389 bp, Chlorobium tepidum
  CDS (1)..(1389): transl_table=11
atgcaagaaggtaagatttcccagatcatcggccctgtcgttgacgttgactttcctgaaggacagcttccgtctatcctcgatgccctcactgtcacccgtcaggacggctcgaaactggtactcgaaacccagcagcaccttggagaggagcgtgttcggacaatcgccatggaagggaccgacggtctggtcagaggcatgagcgctgtcaacaccggcaaaccgatccaggtcccggtaggcggagaggtgctcggcagaatgctgaacgttgtcggcgatcccatcgacggcaaaggccctgtcccggcaaagaaaacctactctatccatcgcgccgctccgaaattcgacgaactttcgaccaaaaccgagatgttcgaaaccggcatcaaggttatcgatctcctcgagccctactcccgcggtggtaaaaccggtctgttcggcggcgctggcgtcggcaagaccgtgctcatcatggagctgatcaacaatatcgccaagcagcagtcgggttactccgtgttcgctggcgtcggcgagcgcacccgtgaaggaaacgacctctggcacgagatgatggagtctggcgttatcgacaagaccgctctcgtgttcggccagatgaacgagcctccgggagcacgcgcacgcgtcgccctgaccggccttagcatcgccgagtacttccgtgaggaagagggccgtgacgtgcttctgttcatcgacaacatcttccgcttcacccaggcaggttccgaggtatccgcgcttcttggccgtatgccgagcgccgtaggctaccagccgactctcagcaccgagatgggtgagcttcaggacaggatcacctccaccaagaaaggttcggttacctccgtgcaagccatctacgtccctgccgatgaccttaccgatccagctccggctaccgcattcacccacctcgatgccacgaccgtgctttcacgtcagatcgccgagcttggtatctacccggctgtcgatccgcttgattcaacctcccgaatcctcgatccgaacatcgtcggtgacgatcactacaacaccgcgcaggctgtcaagcagattctccagcgctacaaagaccttcaggacatcatcgccattctcggtatggacgagctgagcgacgaggacaaactcgtggttgcccgcgcccgcaaagtgcagcgcttcctgtcgcagccctttttcgtggctgaagcgtttaccggtcttgcaggcaagtacgtcaagctcgaagacaccatcaagggcttcaaggagatcatcgatggccgtcacgacaacctgcccgaagctgccttctacctggtcggcaccatcgaagaggcggttgccaaagcaaaaacgctctaa

SEQ ID NO: 43555 - protein, 462 aa, Chlorobium tepidum
MQEGKISQIIGPVVDVDFPEGQLPSILDALTVTRQDGSKLVLETQQHLGEERVRTIAMEGTDGLVRGMSAVNTGKPIQVPVGGEVLGRMLNVVGDPIDGKGPVPAKKTYSIHRAAPKFDELSTKTEMFETGIKVIDLLEPYSRGGKTGLFGGAGVGKTVLIMELINNIAKQQSGYSVFAGVGERTREGNDLWHEMMESGVIDKTALVFGQMNEPPGARARVALTGLSIAEYFREEEGRDVLLFIDNIFRFTQAGSEVSALLGRMPSAVGYQPTLSTEMGELQDRITSTKKGSVTSVQAIYVPADDLTDPAPATAFTHLDATTVLSRQIAELGIYPAVDPLDSTSRILDPNIVGDDHYNTAQAVKQILQRYKDLQDIIAILGMDELSDEDKLVVARARKVQRFLSQPFFVAEAFTGLAGKYVKLEDTIKGFKEIIDGRHDNLPEAAFYLVGTIEEAVAKAKTL

SEQ ID NO: 43556 - DNA, 1389 bp, Chlorobium vibrioforme
  CDS (1)..(1389): transl_table=11
atgcaagaaggtaagatttctcagatcatcggccctgtcgttgacgttgattttcctgaagggcagctgccatctatcctcgatgcccttacagtcacccgccaggacggctcgaagctggttctcgaaacacaacagcaccttggcgaggagcgcgtcagaacgatctccatggaaggtacagatggtctcgtcagaggcatgagcgtggccaataccggtcggccgatccaggctccggtcggcgcagaagtgctcggcagaatgcttaacgttgtcggcgaaccgatcgacggcaaaggccccgtaccctcaaagaaatcgtacccgatccaccgttccgctccgaagttcgacgagctttcgaccaaagccgaaatgttcgaaaccggcatcaaggttatcgaccttctcgagccttactctcgcggtggtaaaaccggtttgttcggtggtgcaggcgttggcaagaccgtgctcatcatggagctgatcaacaatattgctaaagaacagtccggttactccgtgtttgccggtgtcggtgagcgtacccgtgaagggaacgacctctggcacgagatgatggagtccggcgttatcgacaagaccgctcttgtattcggccagatgaacgagcctccgggtgcccgtgcccgcgttgcgctgaccggcctcagcatcgcagagtacttccgtgatgaagagggccgtgacgtgctgctgttcattgacaacatcttccgcttcacccaggcgggtgctgaagtgtccgcacttctcggtcgtatgccgagcgctgtgggttaccagccgaccctcggtactgaaatgggtgagcttcaggacagaatcgtttcgaccaagaaaggttcggtcacctcggtacaggctatctatgtgcctgctgatgaccttaccgacccggctccggccaccgcatttacccacctcgatgcaacgaccgtgctttcgcgtcagattgctgagttgggcatctacccggctgttgacccgctcgactccacctcgcgtatcctcgacccgaacatcatcggtaacgaccactacgacaccgcgcaggccgtcaagcagatcctccagcgctacaaggatcttcaggacatcatcgccattctcggtatggacgaactgagcgacgaagacaagctcgtggttgcccgcgctcgtaaggtgcagcgcttcctgtcgcagccgttcttcgtggctgaagcatttaccggtcttgctggcaaatatgtcaagctcgaagacaccatcaaaggcttcaaggagatcatcgcaggtaaacatgacagcctgcctgaaaatgccttctacctggtcggcaccattgaagaggcagtcgaaaaagcaaaaaagctctaa

SEQ ID NO: 43557 - protein, 462 aa, Chlorobium vibrioforme
MQEGKISQIIGPVVDVDFPEGQLPSILDALTVTRQDGSKLVLETQQHLGEERVRTISMEGTDGLVRGMSVANTGRPIQAPVGAEVLGRMLNVVGEPIDGKGPVPSKKSYPIHRSAPKFDELSTKAEMFETGIKVIDLLEPYSRGGKTGLFGGAGVGKTVLIMELINNIAKEQSGYSVFAGVGERTREGNDLWHEMMESGVIDKTALVFGQMNEPPGARARVALTGLSIAEYFRDEEGRDVLLFIDNIFRFTQAGAEVSALLGRMPSAVGYQPTLGTEMGELQDRIVSTKKGSVTSVQAIYVPADDLTDPAPATAFTHLDATTVLSRQIAELGIYPAVDPLDSTSRILDPNIIGNDHYDTAQAVKQILQRYKDLQDIIAILGMDELSDEDKLVVARARKVQRFLSQPFFVAEAFTGLAGKYVKLEDTIKGFKEIIAGKHDSLPENAFYLVGTIEEAVEKAKKL

SEQ ID NO: 43558 - DNA, 1446 bp, Chlorella vulgaris
  CDS (1)..(1446)
atgagcgtttctacagaaacaaaaagtagtggtcgtattacacaaattattggtccagtattagatgtgtcatttccagcagggaaaatgccaaatatttataatgcattaaccgttggtggtaaaaatgaagctggccaagagatttctgtaacatgtgaagttcaacaattattaggtgatcattgtgtacgtgctgtagcaatgagtgcaaccgatggtttaatgcgtggaatggaagttttagacagcggaaaacccttaaatgttccagtaggagcagctactttaggtcgtatttttaacgttcttggggaaccagtagataaccttggacctgtaaatacaaaagaccaacttccaattcaccgttcagcaccagcttttgtagatttagacactaaactttcgatttttgaaagcggaatcaaagttgttgatctgttagcaccttatcgtcgaggtggcaaaattggtttatttggtggtgcaggtgtagggaaaactgtacttattatggaactaattaataacatcgcaaaagcgcatggtggcgtttctgtgtttggtggtgttggagaacgtacacgtgaaggaaatgacctttacatggaaatgaaagaatctggtgtaattaatgagtcaaatattagtgaatctaaagtagcacttgtatatggtcaaatgaatgagccaccaggagcacgtatgcgtgttggtttaacagcattaacaatggcggaatttttccgtgatattaataaacaagatgtacttctttttattgataacattttccgatttgttcaagcaggttccgaagtttcagcacttttaggtcgtatgccgtctgctgtagggtatcaaccaactttagcaacagagatgggtgggttacaagaacgtattacctcgacaaaagatggtagtatcacatcaatccaagctgtgtatgtacctgcagatgatttaacagatccagcaccagctacaactttcgctcatttagatgcaacaacagtactttctcgaaatttagcatctaaaggaatttatccagctgtagatcctttagattctacttcaacaatgttacaaccatggattgttggtgatcaacattatcagtgtgcacaaaacgtcaaacaaactttacaacgttataaagaattacaagatatcattgccattctgggcttagatgaattatctgaagaagatcgtcttattgtagcgcgagctcgtaaaattgaacgatttttatctcaacctttctttgttgccgaagtgtttacaggttcacctggaaaatatgtaagtttagcagaaactattcaaggatttaatctaattttatccggtgaactcgatgatcttcctgaacaagctttttatttagttggtaatcttgatgaagcagtttctaaagcagcaacactttcatag

SEQ ID NO: 43559 - protein, 481 aa, Chlorella vulgaris
MSVSTETKSSGRITQIIGPVLDVSFPAGKMPNIYNALTVGGKNEAGQEISVTCEVQQLLGDHCVRAVAMSATDGLMRGMEVLDSGKPLNVPVGAATLGRIFNVLGEPVDNLGPVNTKDQLPIHRSAPAFVDLDTKLSIFESGIKVVDLLAPYRRGGKIGLFGGAGVGKTVLIMELINNIAKAHGGVSVFGGVGERTREGNDLYMEMKESGVINESNISESKVALVYGQMNEPPGARMRVGLTALTMAEFFRDINKQDVLLFIDNIFRFVQAGSEVSALLGRMPSAVGYQPTLATEMGGLQERITSTKDGSITSIQAVYVPADDLTDPAPATTFAHLDATTVLSRNLASKGIYPAVDPLDSTSTMLQPWIVGDQHYQCAQNVKQTLQRYKELQDIIAILGLDELSEEDRLIVARARKIERFLSQPFFVAEVFTGSPGKYVSLAETIQGFNLILSGELDDLPEQAFYLVGNLDEAVSKAATLS

SEQ ID NO: 43560 - DNA, 1398 bp, Chromobacterium violaceum
  CDS (1)..(1398): transl_table=11
atgagccaaggcaaaatcgtacaaatcattggcgcggtgatcgacgtggaatttccgcgcgacgccatgccgaaggtttatgatgccctgaagctggtagacgccgacctgacgctcgaagttcagcaacagctgggcgacggcgtggtccgtaccattgcgatgggcagctccgacggtctgaagcgtggcatggctgtagccaacaccggcgcaccgatttcggtgccggttggcgccgccaccctcggccgcatcatggacgtactgggcaacccggtggacgaagcgggtccggtcgcgaccgacgcgcgtcgcgccatccaccaagctgcgccgaagttcgacgaactgtcggccgcagccgacatcctggaaaccggcatcaaggtgatcgacctgctgtgcccgttcgccaagggcggcaaggtgggtctgttcggcggcgccggtgtgggcaagaccgtgaacatgatggagttgatcaacaacatcgccaaggcccactcgggtctgtccgtgttcgccggcgtgggtgagcgtacccgtgaaggtaacgacttctaccacgaaatgaaggactccaacgtcctggacaaggtggcgatggtgtacggtcagatgaacgagccgccgggcaaccgtctgcgcgtggccctgaccggcctgaccatggccgagcacttccgcgacgagaaggacgaaaacggcaagggccgcgacgtgctgctgttcgtggacaacatctaccgctacaccctggccggtaccgaagtgtccgctctgctgggccgcatgccgtccgcggtgggctaccagccgacgctggccgaggaaatgggccgtctgcaagaacgtattacctcgaccaaggatggttccattacctccatccaggccgtgtacgtccctgcggatgacttgaccgacccgtccccggcgaccaccttcgcccacttggacgctaccgtggtactgtcgcgcgacatcgcctcgctgggtatctacccggccgtggacccgctcgactccacctcgcgccagctggatccgctggtggtgggcgacgagcattacaccgtcgcccgcggcgtgcagtccactctgcagcgctacaaggaactgcgcgacatcatcgcgattctgggtatggacgagctgtccgaggaagacaaactggtcgtggctcgcgcccgtaagatccagcgcttcctgtcccagccgttccacgtggccgaagtgtttaccggttccccgggcaaatacgtgccgctgcgcgaaaccatcaagggcttcaaggccattctcgctggcgaatacgaccacctgccggaacaagcgttctacatggttggcgcgatcgaagaagctgccgagaaagccaagacccttaactaa

SEQ ID NO: 43561 - protein, 465 aa, Chromobacterium violaceum
MSQGKIVQIIGAVIDVEFPRDAMPKVYDALKLVDADLTLEVQQQLGDGVVRTIAMGSSDGLKRGMAVANTGAPISVPVGAATLGRIMDVLGNPVDEAGPVATDARRAIHQAAPKFDELSAAADILETGIKVIDLLCPFAKGGKVGLFGGAGVGKTVNMMELINNIAKAHSGLSVFAGVGERTREGNDFYHEMKDSNVLDKVAMVYGQMNEPPGNRLRVALTGLTMAEHFRDEKDENGKGRDVLLFVDNIYRYTLAGTEVSALLGRMPSAVGYQPTLAEEMGRLQERITSTKDGSITSIQAVYVPADDLTDPSPATTFAHLDATVVLSRDIASLGIYPAVDPLDSTSRQLDPLVVGDEHYTVARGVQSTLQRYKELRDIIAILGMDELSEEDKLVVARARKIQRFLSQPFHVAEVFTGSPGKYVPLRETIKGFKAILAGEYDHLPEQAFYMVGAIEEAAEKAKTLN

SEQ ID NO: 43562 - DNA, 1497 bp, Coffea arabica
  CDS (1)..(1497)
atgaaaataaatcctactacttctggttctggggtttccacgcttgaaaaaaaaaacatggggcgtattgtccaaatcatcggcccggtactagatgtagcctttccggcgggcaagatgccgaatatttataacgccctagtagttaaaggtcgagatactgttggtcaaccaattaatgtaacttgtgaggtacagcaattattaggaaataatcgcgttagagctgtagctatgagttctacagatggtctaacgagaggaatggaagtgattgacacgggagctcctctaagtgttccggtaggaggagcaactctgggacgaattttcaacgtgcttggagaacccgttgataatttaggtgctgtagatactcgtacaacatctcctattcatagatctgcgcccgcctttatacagttagatacaaaattatctatttttgaaacgggaattaaagtagtagatcttttagccccttatcgccgtggaggaaaaataggactcttcgggggagctggagtaggtaaaacagtactcattatggaattgattaacaatattgccaaagcccatggaggcgtatccgtatttggcggagtgggtgaacgtactcgtgaaggaaatgatctttacatggaaatgaaagaatctggagtgattaataaagaaaatattgcagaatcaaaagtggctctagtttacggtcagatgaatgaaccgccgggagctcgtatgagagttggtttgactgccctaactatggcggaatatttccgagatgttaatgaacaagacgtacttctatttatcgacaatattttccgtttcgtccaagcaggatccgaagtctcggccttattgggtagaatgccttccgctgtgggctaccaacccaccctgagtaccgaaatgggttctttacaagaaagaattacgtctaccaaagagggatctataacttctattcaagcagtttatgtacctgcagacgatttaaccgaccccgcccctgctacgacatttgcacatttagatgccactaccgtactatcaagaggattagctgccaaaggtatctatcccgcagtagatcctttagattcaacatcaaccatgcttcaacctcggattgttggtgaggaacattatgaaactgcgcaaagggttaagcaaactttacaacgttataaagaactccaggatattatagctatcctcgggttagatgaattatccgaagaggatcgtttaaccgtagcacgagcacgaaaaattgagcgtttcttatcacaaccctttttcgtagcagaagtatttaccggttctccaggaaaatatgttggtctagcagaaacaattagaggatttcaattgatcctttccggagaattagatagtcttcctgaacaggctttttatttggtaggtaatatcgatgaagctaccgcgaaggctatgaacttagaaatggagaacaatttgaagaaatga

SEQ ID NO: 43563 - protein, 498 aa, Coffea arabica
MKINPTTSGSGVSTLEKKNMGRIVQIIGPVLDVAFPAGKMPNIYNALVVKGRDTVGQPINVTCEVQQLLGNNRVRAVAMSSTDGLTRGMEVIDTGAPLSVPVGGATLGRIFNVLGEPVDNLGAVDTRTTSPIHRSAPAFIQLDTKLSIFETGIKVVDLLAPYRRGGKIGLFGGAGVGKTVLIMELINNIAKAHGGVSVFGGVGERTREGNDLYMEMKESGVINKENIAESKVALVYGQMNEPPGARMRVGLTALTMAEYFRDVNEQDVLLFIDNIFRFVQAGSEVSALLGRMPSAVGYQPTLSTEMGSLQERITSTKEGSITSIQAVYVPADDLTDPAPATTFAHLDATTVLSRGLAAKGIYPAVDPLDSTSTMLQPRIVGEEHYETAQRVKQTLQRYKELQDIIAILGLDELSEEDRLTVARARKIERFLSQPFFVAEVFTGSPGKYVGLAETIRGFQLILSGELDSLPEQAFYLVGNIDEATAKAMNLEMENNLKK

SEQ ID NO: 43564 - DNA, 1386 bp, Colwellia psychrerythraea
  CDS (1)..(1386): transl_table=11
atgagtacaggtaaagtcgtccaaataattggcgcagttgtggatgtagaatttccacaagatgccgtacctcaggtatatgacgcattaaagataactgaaggtgaccttgaaggtttagtacttgaagtgcaacagcagcttggtggcggcgttgtgcgtactatcgcaatgggtacatctgacggtttgcgtcgtggtctgaatgtagtaaatacaggtcaaggaatccaagtaccagttggtgttgagactttaggtcgcatcatgaacgtactgggtgagccaattgatgaagctggccctatcggcgaaaaagaccgttggtctattcaccgtgaagcacctgcttatgctgaacaatcaatgtctaacgaattgttagaaactggtatcaaagtaatcgatttagtttgtccattcgctaagggtggtaaagttggtcttttcggtggtgctggtgttggtaaaacagtaaacatgatggaacttatccgtaacatcgcaatcgagcacagtggttactcagtatttgctggtgttggtgagcgtacacgtgaaggtaacgatttctatcacgaaatgaatgattctaatgtacttgataaagtatcattagtttacggccaaatgaacgagcctccaggaaaccgtttacgtgttgcctttactggtttaactatggctgagaaattccgtgacgaaggtcgtgacgtattattctttgttgataatatctatcgttatactcttgcgggtactgaagtttctgcacttcttggacgtatgccatcagcggttggttatcaaccaacacttgctgaagaaatgggtgtattacaagaacgtattacttcaactaacaaaggttcaatcacttcaatccaagcggtatacgtaccagcagatgatttaactgaccctagccctgcaactacttttgctcacttagatgcaactgttgtattaagtcgtgatattgcttcgcaaggtatttatcctgcgattgacccactagattcatcttcacgtcaactagatccattagtagttggtactgaacattatgaaactgctcgtggcgttcaaacagtattacaacgttacaaagaacttaaagatatcatcgccatcttaggtatggatgagttatctgaagaagataagcaaactgtatctcgtgcacgtaagattcagcgttacttatctcagccgttcttcgttgctgaagtatttactggttctcctggtaaatatgtatcattaaaagacaccattgctggctttaaaggcattttagctggtgaatacgatgatatgcctgagcaagcgttctacatggttggtggtattgaagaagccatcgagaaagcgaacaagatgtaa

SEQ ID NO: 43565 - protein, 461 aa, Colwellia psychrerythraea
MSTGKVVQIIGAVVDVEFPQDAVPQVYDALKITEGDLEGLVLEVQQQLGGGVVRTIAMGTSDGLRRGLNVVNTGQGIQVPVGVETLGRIMNVLGEPIDEAGPIGEKDRWSIHREAPAYAEQSMSNELLETGIKVIDLVCPFAKGGKVGLFGGAGVGKTVNMMELIRNIAIEHSGYSVFAGVGERTREGNDFYHEMNDSNVLDKVSLVYGQMNEPPGNRLRVAFTGLTMAEKFRDEGRDVLFFVDNIYRYTLAGTEVSALLGRMPSAVGYQPTLAEEMGVLQERITSTNKGSITSIQAVYVPADDLTDPSPATTFAHLDATVVLSRDIASQGIYPAIDPLDSSSRQLDPLVVGTEHYETARGVQTVLQRYKELKDIIAILGMDELSEEDKQTVSRARKIQRYLSQPFFVAEVFTGSPGKYVSLKDTIAGFKGILAGEYDDMPEQAFYMVGGIEEAIEKANKM

SEQ ID NO: 43566 - DNA, 1386 bp, Coxiella burnetii
  CDS (1)..(1386): transl_table=11
atgacaacagcaaaatcaggcacaaccattgaaattatcggcgctgtcgttgacgttgagtttccccgtcacgctgtcccgaaagtgtacgatgctttgcaggtggatgaaaataatttaacgctcgaagtccaacagcaactcggggacggtgtcgtgcgcacaattgccatgggcagcactgagggcttaaaacgcgatatcgccgtaaaaaatacggaaaaaccgattgaagttcccgtaggaaaagaaactttaggtcgtatcatgaacgtgctgggtgagccgatcgatgagttaggtcccattaattcaaaagaaaaactccctattcatcgtcctgcgccgagctttattgagcaatctggcgctaccgaattattagaaaccggtattaaagtggtcgatttgctttgcccctttgctaagggaggcaaagtgggtctttttggaggcgcgggcgttggaaaaacggttaatatgatggaattaatccgtaatatcgccattgaacacagcggttattctgtttttgcgggtgtgggagaaagaacgcgagaaggcaatgatttttatcatgaaatgaaagaatccaatgtcttggataaagtggcgttggtgtacggacaaatgaacgagccgccagggaaccgcttgcgggtgggtttgacggggcttacgctggcggaagccttccgtgacgaaggacgcgacgttctgttatttatcgataatatctttcgttacactttggcaggggttgaagtctctgccctcctcggtcggatgccatcggctgtgggttatcagccgacgttggccgaagagatgggggccctgcaagaacgcattacttccactaaaaaagggtccattacgtcgatccaagctgtttatgttcccgctgacgatttaaccgatccatcgccagcaaccactttcgcgcatttggatgcgacagttgtgctctcgcggcaaattgccgaacggggaatttatccagccattgatccgttggattccaccagccgccagcttgaccccttaatcattggcgaagaacattatcgagtggctcgaggcgttcaagaaaccttgcagcgatacgaagaattaaaagatatcattgccattcttggcatggatgaattgtccgaagacgacaaacgagccgtccgacgcgcgcgcaagatccaacgctttttatcgcaacctttctttgtggctgaagtatttaccggcgcgccgggcaaatatgtttcgctacaagatacgattcgcggatttaaagggatcatcaatggcgaatacgatgagctgcccgagcaagctttttacatggtaggctcaatcgaagaagccgttgagaaagcgaaatcactatga

SEQ ID NO: 43567 - protein, 461 aa, Coxiella burnetii
MTTAKSGTTIEIIGAVVDVEFPRHAVPKVYDALQVDENNLTLEVQQQLGDGVVRTIAMGSTEGLKRDIAVKNTEKPIEVPVGKETLGRIMNVLGEPIDELGPINSKEKLPIHRPAPSFIEQSGATELLETGIKVVDLLCPFAKGGKVGLFGGAGVGKTVNMMELIRNIAIEHSGYSVFAGVGERTREGNDFYHEMKESNVLDKVALVYGQMNEPPGNRLRVGLTGLTLAEAFRDEGRDVLLFIDNIFRYTLAGVEVSALLGRMPSAVGYQPTLAEEMGALQERITSTKKGSITSIQAVYVPADDLTDPSPATTFAHLDATVVLSRQIAERGIYPAIDPLDSTSRQLDPLIIGEEHYRVARGVQETLQRYEELKDIIAILGMDELSEDDKRAVRRARKIQRFLSQPFFVAEVFTGAPGKYVSLQDTIRGFKGIINGEYDELPEQAFYMVGSIEEAVEKAKSL

SEQ ID NO: 43568 - DNA, 1473 bp, Cressa truxillensis
  CDS (1)..(1473)
  misc_feature (20)..(20): n is a, g, c or t
atgagaagcaatcctactanttctggttctgaggtttccgcggttgaaaaaaaaaacctagggcgtatcgtccaaatcattggtccggtactagatgtagcttttcctcccggcaagatgccttatatttataatgctctggtagttcaagggcgagacaatgaacaaatgaacgtgacttgcgaggtacagcaaatattgggaaataatcgagttagagctgtagctatgagtgatacagatggtctaatgagaggaatggaagtgattgacacgggagtttcaataagtgttcccgtcggtggagcgactctgggacgaattttcaacgtgctcggagaacctgttgataagttaggtcctgtagatactaaaacaacgtctcctattcatagatctgcgcccgcctttatacagttagatacaaaattatccatttttgaaacaggaattaaagtagtagatcttttagccccttatcgccgtggaggaaaaatcggactattcgggggagctggagtggggaaaacagtactcattatggaattgattaacaatattgccaaagctcacgggggagtatccgtatttggcggagtgggtgaacgtactcgtgaaggaaatgatctttacatggaaatgaaagaatctggagtgattaatgaagaaaatattgcagaatcaaaagtggctctagtttacggtcagatgaatgaaccaccgggagctcgtatgagagttggtttgactgccctaactatggcggaatatttccgagatgttaatgagcaagacgtacttctatttatcgacaatatctttcgttttgtccaagcgggatcggaagtatcagccttactgggtagaatgccttcggctgtgggttatcaaccgaccctgagtaccgaaatgggtactttacaagaaagaattacttccaccaaagagggttctataacctcgattcaagccgtttatgtacctgcagatgatttgaccgatcctgctcctgctaccacatttgcgcatttagatgcgactaccgtactctcaagaggtttagctgctaaaggtatctatccagcagtagatcctttagattcaacgtcaacgatgcttcaacctcggatcgttggtgaggaacattatgaaactgcgcaacgagttaaggaaactttacaacgttacaaagaacttcaggacattatagctatcctcgggttggacgaattatccgaagaggatcgtttaaccgtagcaagagcgcgaaaaattgagcgttttttatcacaaccctttttcgtagcagaagtatttactggttctccaggaaaatatgttggtctagcagaaacaattagaggatttcaactgatcctttccggcgaattagatggtcttcctgaacaagccttttatttggtaggtaatatcgatgaagctaccgcgaaggctatgaacttaaaaacttag

SEQ ID NO: 43569 - protein, 490 aa, Cressa truxillensis
  misc_feature (7)..(7): The Xaa at location 7 stands for Asn, Ile, Ser, or Thr.
MRSNPTXSGSEVSAVEKKNLGRIVQIIGPVLDVAFPPGKMPYIYNALVVQGRDNEQMNVTCEVQQILGNNRVRAVAMSDTDGLMRGMEVIDTGVSISVPVGGATLGRIFNVLGEPVDKLGPVDTKTTSPIHRSAPAFIQLDTKLSIFETGIKVVDLLAPYRRGGKIGLFGGAGVGKTVLIMELINNIAKAHGGVSVFGGVGERTREGNDLYMEMKESGVINEENIAESKVALVYGQMNEPPGARMRVGLTALTMAEYFRDVNEQDVLLFIDNIFRFVQAGSEVSALLGRMPSAVGYQPTLSTEMGTLQERITSTKEGSITSIQAVYVPADDLTDPAPATTFAHLDATTVLSRGLAAKGIYPAVDPLDSTSTMLQPRIVGEEHYETAQRVKETLQRYKELQDIIAILGLDELSEEDRLTVARARKIERFLSQPFFVAEVFTGSPGKYVGLAETIRGFQLILSGELDGLPEQAFYLVGNIDEATAKAMNLKT

SEQ ID NO: 43570 - DNA, 1497 bp, Cucumis sativus
  CDS (1)..(1497)
atgagaataaatcctacgacttctagtcctgaagtttccacgcttgaaaaaaacaacttgggacgtatcgctcaaataattggtccggtactagatgtagcttttcccccgggcaaaatgcctaatatttacaacgctttgatagttaaaggtcaagatatttccggtcaagaaattaatgtgacttgtgaagtacagcaattattaggaaataatcgagttagagctgtagctatgagtgctacagatggtctaaggagaggaatggaagtggttgacacgagagctcctctaagtgttccagtcggcggagcgactctcggccgaattttcaacgtgcttggagagcctattgataatttgggtcctgtagatactcgcacaacatctcctattcatagatccgcccctgcttttatccagttagatacaaaattatctatttttgaaacaggaattaaagtagtggatctgttagccccttatcgacgtggaggaaaaataggactattcggaggggctggagtgggtaaaacagtactcattatggaattgatcaacaacattgccaaagctcatggaggtgtatctgtatttggaggagtaggtgaacgtactcgtgaaggaaatgatctttacatggaaatgaaagaatccggagtaattaatgaagaaaattttgcagaatcaaaagtggctctagtctacggtcagatgaatgaaccgccgggagctcgtatgagagttggtttaactgccctaactatggcggaatatttccgagatgttaatgaacaagacgtgcttctatttatcgacaatatctttcgtttcgttcaagcgggatccgaagtatccgcgttactgggtagaatgccttcggctgtgggttatcaacccactcttagtaccgaaatgggttccttacaagaaagaattacttctaccaaggaagggtccataacttctattcaagctgtttatgtacctgcggacgatttgaccgatcctgctcctgccaccacatttgcacatttggatgctactaccgtactatcaagaggattagctgccaaaggtatctatccagcagtagatcctttagattcaacctcaactatgctacaaccgagaatcgttggtgaagaacattatgaaactgcgcaaagagttaaacaaaccttacaacgttacaaagaactgcaagacattatagctatccttgggttggacgaattatccgaagaggatcgcttaaccgtagcacgagcacgaaaaattgaacgtttcttatcacaaccttttttcgtagcagaagtatttaccggctccccggggaaatacgttggcctagcagaaacaattagagggtttaaattaatcctttccggagaattagatggtcttcccgaacaagccttttatttggtaggtaacatcgatgaagctactgcgaaggctacgaacttagaaatggagagcaatttgaagaaatga

SEQ ID NO: 43571 - protein, 498 aa, Cucumis sativus
MRINPTTSSPEVSTLEKNNLGRIAQIIGPVLDVAFPPGKMPNIYNALIVKGQDISGQEINVTCEVQQLLGNNRVRAVAMSATDGLRRGMEVVDTRAPLSVPVGGATLGRIFNVLGEPIDNLGPVDTRTTSPIHRSAPAFIQLDTKLSIFETGIKVVDLLAPYRRGGKIGLFGGAGVGKTVLIMELINNIAKAHGGVSVFGGVGERTREGNDLYMEMKESGVINEENFAESKVALVYGQMNEPPGARMRVGLTALTMAEYFRDVNEQDVLLFIDNIFRFVQAGSEVSALLGRMPSAVGYQPTLSTEMGSLQERITSTKEGSITSIQAVYVPADDLTDPAPATTFAHLDATTVLSRGLAAKGIYPAVDPLDSTSTMLQPRIVGEEHYETAQRVKQTLQRYKELQDIIAILGLDELSEEDRLTVARARKIERFLSQPFFVAEVFTGSPGKYVGLAETIRGFKLILSGELDGLPEQAFYLVGNIDEATAKATNLEMESNLKK

SEQ ID NO: 43572 - DNA, 1473 bp, Cuscuta japonica
  CDS (1)..(1473)
atgagaataaatcctcctacttatggttctgaaatttcctcgattgaaaaaaaaaaccgagggtgtatcgtccaaatcattggtcccgtactagatgtagcttttccccctggcaagatgcctaatatttataatgctctggtagtgaaagggcgagacactgaacaaatgaacgtgacttgcgaggtacagcaattattgggaaataatcgagttcgagctgtagctatgaatgatacagatggtctaatgagagggatggaagtgattgacacgggaactcctataactgttccggtcggtggatcaactctgggacgaattttcaacgtgctcggagaacctgttgataattttggtcctgtagatactaatacaacgtctactattcatagatctgcgcccgcctttatacagttggatacaaaattatctatttttgaaaccggaattaaagtagtagattttttagccccttatcgtcgcggaggaaaaatcggactatttgggggagctggagtggggaaaacagtacttattatggaattgattaacaatattgccaaagctcacgggggagtatccgtatttggcggagtaggtgaacgtactcgtgaaggaaatgatctttacatggaaatgaaagaatccggagtgattaatgaaaacaatattacagaatcaaaagtggctctagtttacggtcagatgaatgaaccgccgggagctcgcatgagagttggtttgactgccctaactatggcggaatatttccgagatgttaatgagcaagacgtacttctgtttatcgacaatatctttcgtttcgtccaagcgggatcagaagtatcggccttactgggtagaatgccttctgctgtgggttatcaaccgaccttgagtacagaaatgggttctttacaagaaagaattacttccaccaaagaaggttccataacctcgattcaagcagtttatgtacctgcagatgatttgaccgatcctgctcccgctaccacatttgcacatttggatgcaactaccgtactatcaagaggtttggctgctaaaggtatctacccagcagtagatcctttagattcaacgtcaatgatgcttcaacctcgcatcgttggtgaggaacattatgaaactgcgcaaaaagttaagcaaactttacaacgttacaaagaacttcaggacattatagctatccttgggttggacgaattatctgaagaggatcgtttaaccgtagcaagagcgcgaaaaattgagcgtttcttatcacaaccctttttcgtagcagaagtatttaccggttctccaggaaaatatgttggtctagccgaaacaattagaggttttaatttgatcctttctggcgaattagatagtcttcctgaacaggctttttatttggtaggtaatatcgatgaagctaccgagaaggcaatgaacttaaaaacttag

SEQ ID NO: 43573 - protein, 490 aa, Cuscuta japonica
MRINPPTYGSEISSIEKKNRGCIVQIIGPVLDVAFPPGKMPNIYNALVVKGRDTEQMNVTCEVQQLLGNNRVRAVAMNDTDGLMRGMEVIDTGTPITVPVGGSTLGRIFNVLGEPVDNFGPVDTNTTSTIHRSAPAFIQLDTKLSIFETGIKVVDFLAPYRRGGKIGLFGGAGVGKTVLIMELINNIAKAHGGVSVFGGVGERTREGNDLYMEMKESGVINENNITESKVALVYGQMNEPPGARMRVGLTALTMAEYFRDVNEQDVLLFIDNIFRFVQAGSEVSALLGRMPSAVGYQPTLSTEMGSLQERITSTKEGSITSIQAVYVPADDLTDPAPATTFAHLDATTVLSRGLAAKGIYPAVDPLDSTSMMLQPRIVGEEHYETAQKVKQTLQRYKELQDIIAILGLDELSEEDRLTVARARKIERFLSQPFFVAEVFTGSPGKYVGLAETIRGFNLILSGELDSLPEQAFYLVGNIDEATEKAMNLKT

SEQ ID NO: 43574 - DNA, 1509 bp, Cytophaga lytica
  CDS (1)..(1509): transl_table=11
atgtctaaagttacaggtaaagtttcccaaattattggcccagttatagatgtggagttccaagcaggggtagatcttccaaaaatttatgattcattagaaattaaaaaagcagatggatcaattttggttttggaagtacaatcacacattggtgagaacacagtaagaactatatctatggattcttctgatggtttaagtcgtggagcagaggttaatgcaacaggaagcgctatacaaatgccagttggagatgacgtttacggacgtttatttaacgtaattggagacgctattgatggtcttgggaatttaccaaaatctggtaaagatggtttgccaatacacagagaggcaccaaaatttgaagacttatctacttctacagaagtattatttacaggtattaaagtaattgaccttattgagccttatgcaaaaggtggtaagattggtttatttggaggtgccggagtaggtaaaacagtattaattcaggaattaattaacaacattgcaaaaggtcacggtggactttctgtatttgctggtgtaggtgagcgtactcgtgagggtaacgatttactacgtgagatgttagagtctggtattattaaatacggagatgactttatgcactctatggaagaaggtggttgggatttatctaaagttgataaatctgtaatgaaagattctaaagcaacctttgtatttggacaaatgaatgagccaccaggagcacgtgcacgtgttgcattatctggtttaactattgcagaatatttccgtgatggagcaggtgaaggtcaaggtaaagatgtacttttctttgtggataacattttccgttttacacaagctggttctgaggtatctgcattacttggtcgtatgccatctgcggtaggttaccaaccaacattagcaacagaaatgggtgctatgcaagagcgtattacatcaacaaaaagaggttctattacatctgtacaggcggtttacgtacctgcggatgatttaacggatccagcaccggcaactacctttgctcacttagatgcaacaacggtattgtctcgtaaaattgcagagttaggtatttacccagcggtagatccattagattctacttctagaatcttagctccagaaattttaggaaaagatcactactcttgtgcacaacgtgtaaaagagttgttacaacgttataaagaattacaagatattattgctatccttggtatggaagaattatctgaggaagataaaatggcagttggtagagcaagacgtgtacaacgtttcttatctcagcctttccacgtagcagagcaatttacaggtcttaaaggtgttttagtagatatcaaggatactattaaaggatttaatatgattatggatggtgaattagatcacttaccagaatctgcatttaaccttaaaggtactattgaagaagctatagaagcaggagaaaaaatgcttgctgaagcataa

SEQ ID NO: 43575 - protein, 502 aa, Cytophaga lytica
MSKVTGKVSQIIGPVIDVEFQAGVDLPKIYDSLEIKKADGSILVLEVQSHIGENTVRTISMDSSDGLSRGAEVNATGSAIQMPVGDDVYGRLFNVIGDAIDGLGNLPKSGKDGLPIHREAPKFEDLSTSTEVLFTGIKVIDLIEPYAKGGKIGLFGGAGVGKTVLIQELINNIAKGHGGLSVFAGVGERTREGNDLLREMLESGIIKYGDDFMHSMEEGGWDLSKVDKSVMKDSKATFVFGQMNEPPGARARVALSGLTIAEYFRDGAGEGQGKDVLFFVDNIFRFTQAGSEVSALLGRMPSAVGYQPTLATEMGAMQERITSTKRGSITSVQAVYVPADDLTDPAPATTFAHLDATTVLSRKIAELGIYPAVDPLDSTSRILAPEILGKDHYSCAQRVKELLQRYKELQDIIAILGMEELSEEDKMAVGRARRVQRFLSQPFHVAEQFTGLKGVLVDIKDTIKGFNMIMDGELDHLPESAFNLKGTIEEAIEAGEKMLAEA

SEQ ID NO: 43576 - DNA, 1401 bp, Dechloromonas aromatica
  CDS (1)..(1401): transl_table=11
atgagtcaaggttcaatcgttcagtgcatcggcgccgttgtggacatccacttcccgcgcgacgcgatgccgaaggtctacgacgctctcaagctggatgcttccgaagcaaacggcatggcagaagatggcctgaccttcgaagtgcaacaacaactgggtgacggcgtcgtccgcaccatcgccatgggttcgtccgacggtctgcgtcgtggcatgaaggtgaacaacaccggcgccggcatttccgtgcctgtcggtatgggcaccctgggccgcatcatggatgtgctgggtcgcccgatcgacgaagccggtccgatcgattccaccgagctgcgcgttattcaccagccggctccgaagtttgacgaactgtcgtcttccgtcgatctgctggaaaccggcatcaaggttatcgatctgatctgcccgttcgccaagggcggcaaggttggcctgttcggtggcgccggcgtcggcaagaccgttaacatgatggaactgatcaacaacatcgcgaagcagcacgccggcttgtccgtgtttgctggcgtgggcgagcgtacccgtgaaggtaacgacttctaccacgaaatgaaggactccaacgttctcgacaaggtcgcgatggtgttcggtcagatgaacgagccgccgggcaaccgtctgcgcgtcgcgctgaccggcctgaccatggctgagcgtttccgtgacgacggtcgtgacattctgttcttcgtcgacaacatttaccgctacacgctggctggtacggaagtttccgcactgcttggccgtatgccttccgccgtgggctatcagccgacgctggctgaagaaatgggtcgtctgcaagagcgtatcacctcgaccaaggttggttcgatcacctccatccaggccgtttacgtgcctgccgatgacttgaccgacccgtccccggctaccaccttcctgcacttggactccacggttgtgttgtcgcgtgacatcgcctcgctgggtatctacccggctgtcgatccgcttgactccacttcccgccagctcgacccgcaggtcgttggtgaagagcattactccgttgcccgtgccgtgcagatgaatctgcagcgctacaaggaactgcgtgacatcatcgcgattctgggtatggacgaactgtctccggaagacaagctggccgtgtcccgcgcccgcaagattcagcgcttcctgtcgcagccgttccacgtggctgaagtcttcaccggctcgccgggcaagttcgtttccctgaaagaaacgatcaagggcttcaagggcatttgtgccggcgaatacgatcacctgccggaacaagcgttctacatggtgggcggtatcgaggaagtcatcgagaaggccaagacgctgtaa

SEQ ID NO: 43577 - protein, 466 aa, Dechloromonas aromatica
MSQGSIVQCIGAVVDIHFPRDAMPKVYDALKLDASEANGMAEDGLTFEVQQQLGDGVVRTIAMGSSDGLRRGMKVNNTGAGISVPVGMGTLGRIMDVLGRPIDEAGPIDSTELRVIHQPAPKFDELSSSVDLLETGIKVIDLICPFAKGGKVGLFGGAGVGKTVNMMELINNIAKQHAGLSVFAGVGERTREGNDFYHEMKDSNVLDKVAMVFGQMNEPPGNRLRVALTGLTMAERFRDDGRDILFFVDNIYRYTLAGTEVSALLGRMPSAVGYQPTLAEEMGRLQERITSTKVGSITSIQAVYVPADDLTDPSPATTFLHLDSTVVLSRDIASLGIYPAVDPLDSTSRQLDPQVVGEEHYSVARAVQMNLQRYKELRDIIAILGMDELSPEDKLAVSRARKIQRFLSQPFHVAEVFTGSPGKFVSLKETIKGFKGICAGEYDHLPEQAFYMVGGIEEVIEKAKTL

SEQ ID NO: 43578 - DNA, 1395 bp, Dehalococcoides ethenogenes
  CDS (1)..(1395): transl_table=11
atggcaaacggaaaggttatacaggtaattggttcggttgttgacgtagagttctcggcagattccatgccggctctgtttaacgcattggaaattccccgtgataacggcaagatggtgctggaagtgcagtcacacgtcggtaacaaccgcgtaaagtgcctttcctttactcctaccgatggtctggagcgcggcgccgaggttatagataccaaaaggccgctttcagttccggtaggccggaatactctggggcgtatctttaacgtgctgggtgaacctctggataacaggggtgatgtaaaagctgaaaagactatgcctatccaccgctcggcaccagctatggacgagctggaatcttctgctcaggtattggaaacaggtcttaaagttatcgacctgattgccccctttgcccgcggcggtaagatcggtgctttgggtggcgctggcgtaggcaagacagtgcttattcaggaacttatccgcaatattgctaccgaacacgaagggttttcggtttttgccggtgtaggtgaacgttcccgcgaaggtaatgacctctggcatgaaatggaagactccggcgtgcttcccaaaactaccatggtattcggtcagatgaatgagcttcccgcagtacgtctgcgtattgctcttaccggccttaccatggccgaatatttccgtgacgaagaaagacaggacgtgctcctgtttattgacaatatttatcgttatactctggccggtatggaagtatccgctcttctggggcgtatgccttccgctgtaggttatcagcctactctggctacagagatgggtgctctgcaggaacgcattgcctccaccaaacagggttcgattacttcattccaggctgtgtatgtaccggcagatgactataccgatcccggtgtagtcgccaccttcggtcacctggatgctatgatagcccttgagcgttcactggctgaacaggctctttatccggcggtagacccgctggcttccaattcccgcatacttgaccctcaggtagtgggtgaggaacactatcaggtagcccgtgacgtgcagaaggttctccagcgttacaaggacctgcaggacgttattgctatcttgggtatggaagaactttctgaagaagataaactcacagttgcccgtgcccgccgtattcagcgtttcctgactcagcccatgtttgtttccgaggtatttaccggccgtcccggtcagtatgtatctctggctgagactatccgcgggttcaaggaaatccttgagggtaagcatgacagtttgcctgaacaggctttctatatggtaggcactattgatgatgccgtagccgaagctaaaaagctcagcgcggcctaa

SEQ ID NO: 43579 - protein, 464 aa, Dehalococcoides ethenogenes
MANGKVIQVIGSVVDVEFSADSMPALFNALEIPRDNGKMVLEVQSHVGNNRVKCLSFTPTDGLERGAEVIDTKRPLSVPVGRNTLGRIFNVLGEPLDNRGDVKAEKTMPIHRSAPAMDELESSAQVLETGLKVIDLIAPFARGGKIGALGGAGVGKTVLIQELIRNIATEHEGFSVFAGVGERSREGNDLWHEMEDSGVLPKTTMVFGQMNELPAVRLRIALTGLTMAEYFRDEERQDVLLFIDNIYRYTLAGMEVSALLGRMPSAVGYQPTLATEMGALQERIASTKQGSITSFQAVYVPADDYTDPGVVATFGHLDAMIALERSLAEQALYPAVDPLASNSRILDPQVVGEEHYQVARDVQKVLQRYKDLQDVIAILGMEELSEEDKLTVARARRIQRFLTQPMFVSEVFTGRPGQYVSLAETIRGFKEILEGKHDSLPEQAFYMVGTIDDAVAEAKKLSAA

SEQ ID NO: 43580 - DNA, 1413 bp, Desulfovibrio desulfuricans
  CDS (1)..(1413): transl_table=11
atgagtaacataggcaagatcactcaggtcatcggcgccgttgtcgacgtcgagtttgccgatggcaaccttcctaacattctgaacgcgttggtcattaaaaaccccaacaacgctgactgccccgagcttatctgcgaagtggcacagcatctgggtgacaacgttgttcgcacaatcgccatggacgcgaccgaaggtcttgtccgcggcatggaagtgaccgatactggcaaccccatcatggtgcccgtgggcagcgcctctctgggccgcatcatgaacgttgtgggccgtcctgtggacgaaatgggcgacatcgacgcggcgaaaagccttcccattcaccgtcccgcacccgaattcaacgagcagaacaccaacgttgaactgcttgaaaccggcatcaaggttgttgacctgctgattcccttccccaagggcggcaaaatgggtctcttcggcggtgcaggcgtgggtaaaaccgttattctgatggaaatgatcaacaacattgcaaaacagcacggcggtatttccgtgtttgcaggtgttggtgagcgtacccgtgaaggtaacgacctgtaccacgaaatgaaggacgccggcgttctggaaaaagccgcacttgtgtacggccagatgaacgaacctccgggagcacgtgcacgtgttgcactgactgcactggcctgcgcggaatacttccgtgacgaagaaaatcaggacgtgctgctctttgttgacaatatattccgctttacgcaggcaggttcggaagtgtccgcactgctcggccgtatgccttccgcggtgggttaccagcccacgctgggcaccgaccttggcggcctgcaggaacgcatcacctccaccaccaagggttccatcacctcggtgcaggctgtttacgttcccgcggacgaccttaccgaccccgcgcctgcaaccacgttctcgcaccttgacggaacgctcgtgctttcgcgtcagattgcagaactcggcatctaccctgcggttgacccgctggactccacttcgcgtattctcgaccccaacgttgttggtgccgaacactacagcgtggcacgtgaagttcagatggtgctgcagaagtacaaagacctgcaggacatcattgccattctgggtatggacgaactgtcggacgaggacaagcagaccgttgcgcgcgcacgccgcatccagcgtttcctctctcagccgttccacgtggcagaagtgttcaccggcacccctggtgtgtatgtaaagctggaagagaccatcaaggccttccgcggcattctgaacggtgaatacgaccatctggctgaaaacgacttctacatggtcggcggtatcgaaatggccgtggagcgttataaccagcgtcagcaagccgcgtaa

SEQ ID NO: 43581 - protein, 470 aa, Desulfovibrio desulfuricans
MSNIGKITQVIGAVVDVEFADGNLPNILNALVIKNPNNADCPELICEVAQHLGDNVVRTIAMDATEGLVRGMEVTDTGNPIMVPVGSASLGRIMNVVGRPVDEMGDIDAAKSLPIHRPAPEFNEQNTNVELLETGIKVVDLLIPFPKGGKMGLFGGAGVGKTVILMEMINNIAKQHGGISVFAGVGERTREGNDLYHEMKDAGVLEKAALVYGQMNEPPGARARVALTALACAEYFRDEENQDVLLFVDNIFRFTQAGSEVSALLGRMPSAVGYQPTLGTDLGGLQERITSTTKGSITSVQAVYVPADDLTDPAPATTFSHLDGTLVLSRQIAELGIYPAVDPLDSTSRILDPNVVGAEHYSVAREVQMVLQKYKDLQDIIAILGMDELSDEDKQTVARARRIQRFLSQPFHVAEVFTGTPGVYVKLEETIKAFRGILNGEYDHLAENDFYMVGGIEMAVERYNQRQQAA

SEQ ID NO: 43582 - DNA, 1416 bp, Desulfotalea psychrophila
  CDS (1)..(1416): transl_table=11
atgagtgagcaaaaaattggaaagattacacaggttattggacctgttgtagatgttgagtttgagccgggccagctgcctaatattctgaatgcctgtactgtgaccaatcctggtattaatgacgtcccggataacctggttatcgagattgctcagcatttaggtgataacgtttgtcgttgtattgctatggaccagaccgatggtcttgttcgtggcatggttgtaagagatacgggcctgcctatcaccattcctgtcggtgagggtgctcttggtcgtatcatgaacgttgttggtcgtcccgtggatggactcggtcccattccggcaaagacaagcatgtccattcaccgtgatgcgccactttttaccgagcaggacaccgaagtgcgtgttcttgaaaccggtattaaggtaattgatctccttgttccattcccacttggtggaaagatggggctcttcggtggtgccggttgtggtaagaccgttattatgatggagatggttaataatattgccatgcatcatggtggtatctctgtcttctgtggtgttggagagcgtacccgtgagggtaatgatctctacaacgagatgaaggagtccggtgttcttcctaaggctgcccttgtttatggtcagatgacagagcctccgggagcacgtgcccgggttgccctgaccggtcttactgctgctgagtatttccgtgatgaagaggggcaggatgtactgttcttcgtggataatatctttcgttttacccaggcaggctccgaagtttctgccctccttggccgtattccatctgcggtaggttatcagcctaccttggcaacggatcttggtgccctgcaggaacgtattacctccaccaacaagggttctattactgctgttcagtgtgtatatgtaccggcggatgatttaaccgatcctgcccctgctaccacctttgctcaccttgatggtaccgttgttctttctcgtcagatctctgagcttggtatctaccctgccgttgatccgctggattcaacctctcgtattctcgatccgaatgttatcggtgaagagcattacgacgttgcccgtggtgtccaggtaagcctgcagaagtacaaagatcttcaggatattattgctattcttggtatggatgagctctctgaggaagatcagcagttggtttcccgtgcccgtaagattcagcgatacctgtcgcaaccatttaccgttgccgaggtatttaccggtatgcctggtaaattcgttaaggttgccgatactgttcagggcttcaaagagatcctggaaggaaagcacgacgcactcaacgagaactccttctatatggttggtagcattgacgaagctgttgcaaaggatgctgcatctaaggcgtaa

SEQ ID NO: 43583 - protein, 471 aa, Desulfotalea psychrophila
MSEQKIGKITQVIGPVVDVEFEPGQLPNILNACTVTNPGINDVPDNLVIEIAQHLGDNVCRCIAMDQTDGLVRGMVVRDTGLPITIPVGEGALGRIMNVVGRPVDGLGPIPAKTSMSIHRDAPLFTEQDTEVRVLETGIKVIDLLVPFPLGGKMGLFGGAGCGKTVIMMEMVNNIAMHHGGISVFCGVGERTREGNDLYNEMKESGVLPKAALVYGQMTEPPGARARVALTGLTAAEYFRDEEGQDVLFFVDNIFRFTQAGSEVSALLGRIPSAVGYQPTLATDLGALQERITSTNKGSITAVQCVYVPADDLTDPAPATTFAHLDGTVVLSRQISELGIYPAVDPLDSTSRILDPNVIGEEHYDVARGVQVSLQKYKDLQDIIAILGMDELSEEDQQLVSRARKIQRYLSQPFTVAEVFTGMPGKFVKVADTVQGFKEILEGKHDALNENSFYMVGSIDEAVAKDAASKA

SEQ ID NO: 43584 - DNA, 1413 bp, Desulfovibrio vulgaris
  CDS (1)..(1413): transl_table=11
atgagtgctaacattggcaagatcgttcaggttatcggcgccgtcgtcgacgtcgagtttccgagcggccagctgccgaacattctgaacgcgctggatatcaagaaccccaacaacacggacgcgcccgacctcgtctgcgaagttgcccagcaccttggcgacaacatcgtgcgcaccatcgccatggacgcgaccgaaggtctcgtgcgcggcatggaagcctccgacaccggcaagcccatcatggtgcccgtcggcaaggcctcccttggccgtatcatgaacgtcgtgggtcgccccgtggacgaactcggccccatcaacgcggacaagtcgcttccgattcaccgcgctgctcccgagttcaccgaacagaacaccaaggttgaactgctcgaaaccggcatcaaggtcgtcgacctgctcatcccgttccccaagggcggcaagatgggcctcttcggcggcgcaggcgtcggcaagacggttatcctcatggaaatgatcaacaacatcgcgaagcagcacggcggtatctccgtgttcgccggtgttggtgagcgtacccgtgaagggaacgacctttaccacgaaatgaaggacgctggcgttctggagaaggccgcactcatctacggccagatgaacgaaccgccaggagcccgtgcccgcgtcgccctgaccgccctcgcctgcgcggagtacttccgtgacgtcgagaaccaggacgtgctgctgttcgtcgacaacatcttccgtttcacccaggcgggttcggaagtgtcggcactgctcggccgcatgccttcggcggttggttaccagcccaccctcggtaccgacctcggtgccctgcaggaacgcatcacctccaccaccaagggttcgatcacctcggttcaggccgtctacgtccccgcggacgaccttaccgaccccgcgcccgcaaccacgttctcgcaccttgacggtacgctcgttctgtcccgtcagattgcagaactcggcatctaccccgcggttgacccgctcgactccacgtcgcgcatcctcgaccccaacgtggtgggtgttgaacactacggcgttgcccgtcaggttcagcaggtactccagaagtacaaggaccttcaggacatcatcgccattctcggcatggacgaactgtccgacgaggacaagctgaccgtcgcccgcgcgcgccgcatccagcgcttcctctcgcagccgttccacgtcgcagaaaccttcaccggcacgcccggcgtgtacgtgaagcttgaagacaccatcaagggcttcatgggcatcctgaacggtgactacgaccacctcgcagaaggcgacttctacatggtgggcggcatcgaaatggctctggagaagtacaagaaacgccaggagcagtaa

SEQ ID NO: 43585 - protein, 470 aa, Desulfovibrio vulgaris
MSANIGKIVQVIGAVVDVEFPSGQLPNILNALDIKNPNNTDAPDLVCEVAQHLGDNIVRTIAMDATEGLVRGMEASDTGKPIMVPVGKASLGRIMNVVGRPVDELGPINADKSLPIHRAAPEFTEQNTKVELLETGIKVVDLLIPFPKGGKMGLFGGAGVGKTVILMEMINNIAKQHGGISVFAGVGERTREGNDLYHEMKDAGVLEKAALIYGQMNEPPGARARVALTALACAEYFRDVENQDVLLFVDNIFRFTQAGSEVSALLGRMPSAVGYQPTLGTDLGALQERITSTTKGSITSVQAVYVPADDLTDPAPATTFSHLDGTLVLSRQIAELGIYPAVDPLDSTSRILDPNVVGVEHYGVARQVQQVLQKYKDLQDIIAILGMDELSDEDKLTVARARRIQRFLSQPFHVAETFTGTPGVYVKLEDTIKGFMGILNGDYDHLAEGDFYMVGGIEMALEKYKKRQEQ

SEQ ID NO: 43586 - DNA, 1518 bp, Drosophila melanogaster
  CDS (1)..(1518)
atgttcgcgttacgtgctgcatctaaagccgataagaatttgctgccattcttggggcaattgtctcgtagccatgctgccaaggctgcaaaggctgcagctgccgcaaatggaaagattgtggccgtaattggtgcagtcgtcgatgtccagtttgatgataacttaccgcccattctgaatgccttggaagtagacaaccgttctcctcggctcgtgctagaggtggcccagcacttgggagaaaataccgtgcgcactatcgccatggatggtaccgaaggcttggttcgcggacagaaggttctcgatactgggtatcctatccgaattccagttggtgccgaaacactaggacgcatcattaatgttattggtgaacccattgatgagcgtggaccaattgatacagacaagaccgctgccattcatgctgaggctcctgaattcgttcagatgtctgttgagcaagagattcttgtcactggaatcaaagtcgtcgatctcctggctccatacgccaaaggtggtaaaattgggttgtttggaggtgccggtgtgggcaaaactgtgttgatcatggagctcattaacaacgtggctaaagctcatggtggatactcggttttcgcgggagttggtgaacgcactcgtgagggaaacgatttatacaatgagatgatcgagggtggtgttatttcactaaaggacaagacctcaaaggtggctctcgtatatgggcaaatgaacgagccgccaggtgctcgtgcccgtgttgctctaactggactgaccgttgcagagtacttccgtgatcaagaaggacaggatgtgttgctgtttatcgacaacattttccgatttactcaagctggctcagaagtgtccgctttgttgggtcgtattccctcagccgtcggttaccagccaaccttggctaccgacatgggttctatgcaggagcgtattaccaccaccaaaaagggatccattacttctgttcaggccatatatgtgcccgctgatgatttgaccgatcctgctcctgctactacattcgctcatttggatgccaccactgtactctcgcgtgcgattgccgaactgggtatttaccctgctgtggatccactggattcgacttctcgaatcatggatcccaacatcattggccaagaacactataacgttgcccgtggtgtgcagaaaatcttgcaagactacaaatcacttcaggatataatagccattctcggaatggatgagttgtctgaggaagataagctcacagtcgctcgtgctcgcaagattcagcgtttcttgtcgcagccattccaagttgctgaagtcttcaccgggcatgctggtaaactagtgcccctggagcaaactataaaaggtttctcagcaattctagctggggactacgaccatctacctgaagttgctttctacatggtcggcccaatcgaagaagttgtagaaaaggctgaccgcctggcaaaggaagctgcctag

SEQ ID NO: 43587 - protein, 505 aa, Drosophila melanogaster
MFALRAASKADKNLLPFLGQLSRSHAAKAAKAAAAANGKIVAVIGAVVDVQFDDNLPPILNALEVDNRSPRLVLEVAQHLGENTVRTIAMDGTEGLVRGQKVLDTGYPIRIPVGAETLGRIINVIGEPIDERGPIDTDKTAAIHAEAPEFVQMSVEQEILVTGIKVVDLLAPYAKGGKIGLFGGAGVGKTVLIMELINNVAKAHGGYSVFAGVGERTREGNDLYNEMIEGGVISLKDKTSKVALVYGQMNEPPGARARVALTGLTVAEYFRDQEGQDVLLFIDNIFRFTQAGSEVSALLGRIPSAVGYQPTLATDMGSMQERITTTKKGSITSVQAIYVPADDLTDPAPATTFAHLDATTVLSRAIAELGIYPAVDPLDSTSRIMDPNIIGQEHYNVARGVQKILQDYKSLQDIIAILGMDELSEEDKLTVARARKIQRFLSQPFQVAEVFTGHAGKLVPLEQTIKGFSAILAGDYDHLPEVAFYMVGPIEEVVEKADRLAKEAA

SEQ ID NO: 43588 - DNA, 1524 bp, Ehrlichia chaffeensis
  CDS (1)..(1524): transl_table=11
atgtcgggtttagctagtaaagcaaagagtagggttaagagtagcaaaggtaaaaatagcacaaatattcatgctgatgaattaaacgaagatgttggagtagtagttcgtgttatgacagcagtcgtagatgtaaagtttgctagtggtaaaataccaaaaatacttaatgcgttagaaagtaaagaaatttataatggtaagaaattagttcttgaagtgtctcagcatattagtgatagtattgtaaggtgtatagcacttgatggcactgatggtttgtctagaaatgataaatttattgatactggtgctcctatatcagttcctgtagggcgtggcacattaggacgagtttttgatgtactaggtaatacaatagatgaatgtggcccgttagaagaatcaagttactttattaagcaaatatattcagagattcctaagttaactgatcagaaaattgcaactgaaatattggtgactggtattaaagtaatagatttacttgctccataccttaaaggtggaaaagttggattgtttggtggtgctggtgtaggtaaaactgtattgattatggaattaatacataatattgcaaaagcacataaaggagtatcagtttttgctggtgttggggaacgtacacgtgaagggaatgatctttatcatgagatgatagaatctggtgtaataaatttagaaaataaggatcagtcacaggcggttttagtatatggtcaaatgaatgaacctcctggagcaaggttaagggttgcattatcagctttaactatggctgaatattttagggatgctgaaaatcaagatgtactattttttgtagataatattttcaggtttactcaatctggatcagaaatttcagctttgttagggagaataccttctgctgttggttatcagccaacattggcagcagaaatgggtgcaatgcaagaaagaattacttccactaatagtggatctattacctctgtacaagcaatatatgtaccagcagatgatttaacagatcctgctcctgctacttcttttgcacatcttgattcaactactgttttgtcaagacaaatatctgagctagggatatatccagctgttgatcctttagattcaacatctcaagctttatctgctgatgttgtaggtaaagagcattatgacgttgctaaggaagtacaacgtatattacagacatataagtctttacaagatattattgcaattcttggtatggatgaactttcagaggaagataagcttatagtggcaagggcaaggaaaattcaaaggtttttatcacaaccttttcatgttgctgaagtgtttacaggtgctcctggtaaatttgtatctcttgaagatactgttttaagttttaaaggattggtagaaggtaaatatgatcacttgcctgaagctgcattttatatggttggtagtatagatgatgtcataaaaaaagcagaattacttcaaaaggaaggtaaagtttaa

SEQ ID NO: 43589 - protein, 507 aa, Ehrlichia chaffeensis
MSGLASKAKSRVKSSKGKNSTNIHADELNEDVGVVVRVMTAVVDVKFASGKIPKILNALESKEIYNGKKLVLEVSQHISDSIVRCIALDGTDGLSRNDKFIDTGAPISVPVGRGTLGRVFDVLGNTIDECGPLEESSYFIKQIYSEIPKLTDQKIATEILVTGIKVIDLLAPYLKGGKVGLFGGAGVGKTVLIMELIHNIAKAHKGVSVFAGVGERTREGNDLYHEMIESGVINLENKDQSQAVLVYGQMNEPPGARLRVALSALTMAEYFRDAENQDVLFFVDNIFRFTQSGSEISALLGRIPSAVGYQPTLAAEMGAMQERITSTNSGSITSVQAIYVPADDLTDPAPATSFAHLDSTTVLSRQISELGIYPAVDPLDSTSQALSADVVGKEHYDVAKEVQRILQTYKSLQDIIAILGMDELSEEDKLIVARARKIQRFLSQPFHVAEVFTGAPGKFVSLEDTVLSFKGLVEGKYDHLPEAAFYMVGSIDDVIKKAELLQKEGKV

SEQ ID NO: 43590 - DNA, 1422 bp, Geobacillus kaustophilus
  CDS (1)..(1422): transl_table=11
atgacaagaggacgcgttatccaagtcatgggtccggttgtagacgtcaagtttgagaacggccacttgccggcgatctacaacgccctgaaaattcaacataaagcgcgcaacgaaaacgaagtcgacatcgacttgacattggaagtcgccttgcaccttggcgatgatacagtacggacgatcgcgatggcgtccacagacggcctcatccgcggcatggaagtcatcgataccggtgcaccgatttcggtgccggtcggcgaagtcacgcttggccgcgtgttcaacgtcttgggcgagccgatcgacttggaaggcgacattccggctgacgcccgccgcgacccgattcaccgtccggcgccaaaattcgaggaattggcgacggaagtcgaaattttggaaacggggattaaagtcgttgacttgcttgccccgtatattaaaggcggaaaaatcggtttgttcggcggcgctggcgtaggaaaaacggtcttgattcaagagctgatccacaacatcgcccaagagcacggcgggatttccgtctttgctggcgtcggcgaacggacgcgcgaaggaaacgacttgtaccatgagatgaaagattccggcgtcatcagcaaaacggccatggtgttcggacaaatgaatgagccgccgggggcgcggatgcgcgtcgccttgaccggcttgacgatggccgaatacttccgtgatgaacaaggccaagacgtgttgctctttatcgataacatcttccgtttcacgcaggccggttcggaagtgtcggcgctgttaggccgcatgccgtcggccgttggttaccaaccgacattggcgacggagatgggtcaattgcaagagcggatcacgtcgacggcgaaaggatcgatcacctcgattcaagcgatttacgtcccggccgacgactatacggacccggctccggccacgacgttctcgcacttggatgcgacgacgaacctggagcggaagctcgcggagatggggatttatccggccgttgacccgctcgcttcgacatcgcgtgcgttggcgccggaaatcgtcggcgaggagcactaccaagtcgcccgcaaagtgcagcaaacgctgcaacgttataaagaattgcaagacatcatcgccatcttggggatggatgaactgtcggatgaagacaaactcgtcgttcatcgcgcccgccgcatccagttcttcttgtcgcaaaacttccacgtggcggagcagttcacgggccaaccgggctcctacgtgccggtgaaagaaacagtgcgcggctttaaagaaattttggaaggcaaatacgaccatcttccggaagatgcgttccgcttagtcggccgcattgaagaagtcgttgaaaaagcgaaagcgatgggtgtcgaagtgtga

SEQ ID NO: 43591 - protein, 473 aa, Geobacillus kaustophilus
MTRGRVIQVMGPVVDVKFENGHLPAIYNALKIQHKARNENEVDIDLTLEVALHLGDDTVRTIAMASTDGLIRGMEVIDTGAPISVPVGEVTLGRVFNVLGEPIDLEGDIPADARRDPIHRPAPKFEELATEVEILETGIKVVDLLAPYIKGGKIGLFGGAGVGKTVLIQELIHNIAQEHGGISVFAGVGERTREGNDLYHEMKDSGVISKTAMVFGQMNEPPGARMRVALTGLTMAEYFRDEQGQDVLLFIDNIFRFTQAGSEVSALLGRMPSAVGYQPTLATEMGQLQERITSTAKGSITSIQAIYVPADDYTDPAPATTFSHLDATTNLERKLAEMGIYPAVDPLASTSRALAPEIVGEEHYQVARKVQQTLQRYKELQDIIAILGMDELSDEDKLVVHRARRIQFFLSQNFHVAEQFTGQPGSYVPVKETVRGFKEILEGKYDHLPEDAFRLVGRIEEVVEKAKAMGVEV

SEQ ID NO: 43592 - DNA, 1413 bp, Geobacter metallireducens
  CDS (1)..(1413): transl_table=11
atgagtcagaactttggtagaatttcgcaggttatcggcgcggttatcgacgtcgagttcgagccgggcaaactgcctcccatctacaacgccctccgggtcaccaacccggccattgacgataaagaatacaacctggtgctcgaagttgcccagcacctgggcgagaactccgtccggaccatcgccatggactccaccgacggtctcgttcggggccaggctgccctcgacaccggcaagcagatctccgtgccggtcggccgcaagaccctgggccgcatcctgaacgtcatcggcgagcccgttgacgagatgggtccggtcaatgcagagaaggagtacggcatccaccgcgaatccccttccttcgtggaccagtccaccaaggttgaagccttcaccaccggcatcaaggtcgtcgacctcctcgctccctatgcccgggggggcaagatcggcctcttcggcggcgccggcgtcggcaagactgttctcatcatggagctcatcaacaacatcgccaagcagcacggcggtttctccgtgttcgccggcgttggcgagcggacccgtgaaggaaacgacctctggatggagatgaaggagtccggcgttctcgataaggctgctcttgtctacggccagatgaacgagccgccgggagcccgtgcccgggtggcactctccgcgctttccattgcggagtacttccgtgacgaagaagggcagaacgtgctcctcttcatcgataacatcttccgtttcacccaggcgggttccgaggtttcggcgcttctcggccggatcccttctgccgttggttaccagcctactctggccactgagatgggtgagctccaggagcggatcacctccaccaccaaaggttccatcacttcggttcaggcgatctacgttccggctgacgaccttaccgaccctgcaccggcaacggccttcgcccacctggatgcaaccacggttctgtcccgtcagatcgccgagcttggcatctacccggccgttgaccccctcgactccacgtcgcggattctcgacccccaggtaatcggcgaagagcactacgccatcgcccgccaggttcagtacgtcctccagaagtacaaggacctccaggacatcatcgccattctcggcatggacgagctctccgaggaggacaagctggtggttgcccgcgcccggaagatccagcgcttcctctcccagcccttccacgtggcagaagccttcaccggcagccccggcaagtacgttgagctgaaggacaccatcaagggcttccaggagatcgttgccggcaagcacgacgacatccccgagcaggccttctacatggttggcaccatcgaagaggcactagaaaaagcgaagaagcttgctgcctaa

SEQ ID NO: 43593 - protein, 470 aa, Geobacter metallireducens
MSQNFGRISQVIGAVIDVEFEPGKLPPIYNALRVTNPAIDDKEYNLVLEVAQHLGENSVRTIAMDSTDGLVRGQAALDTGKQISVPVGRKTLGRILNVIGEPVDEMGPVNAEKEYGIHRESPSFVDQSTKVEAFTTGIKVVDLLAPYARGGKIGLFGGAGVGKTVLIMELINNIAKQHGGFSVFAGVGERTREGNDLWMEMKESGVLDKAALVYGQMNEPPGARARVALSALSIAEYFRDEEGQNVLLFIDNIFRFTQAGSEVSALLGRIPSAVGYQPTLATEMGELQERITSTTKGSITSVQAIYVPADDLTDPAPATAFAHLDATTVLSRQIAELGIYPAVDPLDSTSRILDPQVIGEEHYAIARQVQYVLQKYKDLQDIIAILGMDELSEEDKLVVARARKIQRFLSQPFHVAEAFTGSPGKYVELKDTIKGFQEIVAGKHDDIPEQAFYMVGTIEEALEKAKKLAA

SEQ ID NO: 43594 - DNA, 1413 bp, Geobacter sulfurreducens
  CDS (1)..(1413): transl_table=11
atgagtcagaacttcggtaaaatttcgcaggtcatcggcgcggttattgacgtcgagtttgagccgggcaaactgcctcccatctacaacgccctccgggtgaccaacccggccattgacgataaggaatacaacttggtgctcgaagtggcccagcacctgggtgaaaacgcggtccggaccatcgccatggattccaccgacggtcttgtccggggccaggcagtgctcgataccggtaagcagatttccgtgccggtgggccgcaagaccctgggtcgaatcctcaacgtcatcggcgagccggtggacgagatgggtccggtcaacgccgagaaagagtacggaatccaccgcgaagctcccgccttcgtggaccagtccaccaaggttgaagccttcaccaccgggatcaaggtcgtcgaccttctcgctccctacgctcggggcggcaagattggcctcttcggcggcgccggcgtcggcaagaccgttctcatcatggagctcatcaacaacatcgccaagcagcacggtggcttctccgtgtttgccggcgtcggtgagcggacccgcgaaggaaacgatctctggatggagatgaaggagtccggggttctcgacaaggccgccctcgtctacggccagatgaacgagccgccgggagcacgtgcccgggttgccctctccgccctttccatcgccgagtacttccgtgacgaagaaggtcagaacgtgcttctcttcgttgacaatatcttccgcttcacccaggcgggttccgaagtttccgcgctcctcggccggattccctccgccgttggttaccagcccacactggccacagagatgggagagcttcaggagcgaatcacctccaccaccaagggctccattacctcggttcaggcgatctacgttccggccgacgaccttaccgacccggctccggcaaccgccttcgcccacctggacgcaacgaccgttctttcccgtcagattgccgagctcggtatctacccggccgttgacccgctggactccacgtcgcggattctcgatccccaggtaatcggcgaggagcactactccattgcccggcaggtccagtacgtgctccagaagtacaaggatctccaggacatcatcgctattctcggtatggacgaactctccgaggaggacaagctggtcgttgcccgggcccggaagatccagcgtttcctctcccagccgttccacgttgccgaagccttcaccggcagccccggcaagtacgttgagctgaaggacaccatcaagggcttccaggagatcgtcgccggcaagcatgacgatgtccccgagcaggccttctacatggtcggaaccattgaagaggccctcgaaaaggccaagaagctcgctgcctaa

SEQ ID NO: 43595 - protein, 470 aa, Geobacter sulfurreducens
MSQNFGKISQVIGAVIDVEFEPGKLPPIYNALRVTNPAIDDKEYNLVLEVAQHLGENAVRTIAMDSTDGLVRGQAVLDTGKQISVPVGRKTLGRILNVIGEPVDEMGPVNAEKEYGIHREAPAFVDQSTKVEAFTTGIKVVDLLAPYARGGKIGLFGGAGVGKTVLIMELINNIAKQHGGFSVFAGVGERTREGNDLWMEMKESGVLDKAALVYGQMNEPPGARARVALSALSIAEYFRDEEGQNVLLFVDNIFRFTQAGSEVSALLGRIPSAVGYQPTLATEMGELQERITSTTKGSITSVQAIYVPADDLTDPAPATAFAHLDATTVLSRQIAELGIYPAVDPLDSTSRILDPQVIGEEHYSIARQVQYVLQKYKDLQDIIAILGMDELSEEDKLVVARARKIQRFLSQPFHVAEAFTGSPGKYVELKDTIKGFQEIVAGKHDDVPEQAFYMVGTIEEALEKAKKLAA

SEQ ID NO: 43596 - DNA, 1437 bp, Gloeobacter violaceus
  CDS (1)..(1437): transl_table=11
atggtaacaacgacggcaaaaaacgttggctatatcacccagatcattggtcctgtggtcgacgcagaattcccggaaggcgatttgcctgccatctacaacgccctacttatcgaaggcaagaccgactcggggctcgacatccgcctgacctgcgaagtgcagcagctgctcggtgacaagaaggtgcgggcggtctcgatgagcacgaccgacggcatggtgcggggcatgaaggcgatcgacaccggtgccccgatcacagttccggtgggcaagtcgactctgggccgcatcttcaacgtgctgggcgagccgatcgacgagttggggccggtcgagattgtcgataagttctcgatccaccgctccgctcccaaattcaccgacctggtgacccaaccggagattttcgaaacgggcatcaaggtcatcgacctgctggctccctaccgcaagggcggcaagatcggcctgttcggcggcgcgggtgtgggcaagacggtgctcattcaagaactcatccacaacatcgccaaagaacactcgggcgtgtcggtgttcggcggtgtgggcgagcggacccgcgagggcaacgacctctacaacgaatttaaagaatcgaacgtgctcgggcaggtggcgctggtctacggccagatgaacgagccgccgggggcgcgcatgcgcgtgggtctgacggccctcaccatggccgagtacttccgcgacgtgagcaagcaggacgtgctgttgtttatcgacaatatcttccgctttgtgcaggcgggttctgaagtatcggcgctcttgggccgcatgccctcggcggtcggctaccaaccgactttgggcaccgagatgggcgatttgcaggagcgcatcacctccaccaacgaaggctcgatcacctcggtgcaggcggtctacgtgccggcggacgacctgaccgaccccgcccccgccaccaccttcgcccacctcgacgccaccacggtactctcacggcagttggcctctttgggcatctacccggcggtggacccgctctcctccacctcgacgatgctgcaacccgccgtcgtcggcgaagagcactacaacatcgcccgcggcgtgcaatcgaccctgcagcgctacaaagatctccaggacatcatcgccattttgggcctcgacgaactctcgcccgaagacaagctggtggtcaaccgggcgcgcaaactgcagcgctttttgtcgcagccgttccacgtcgccgagatcttcaccggctcccccggcaagtacgtctccctggataaaacgatcgccggcttcaagcgcgtgctgcagggcgaattcgacgatctgcccgagcaggctttttacctggtgggcgacctcgacgaggcgctcgaaaaggccaaaaagctcaaagacgaaggtaagtcgtaa

SEQ ID NO: 43597 - protein, 478 aa, Gloeobacter violaceus
MVTTTAKNVGYITQIIGPVVDAEFPEGDLPAIYNALLIEGKTDSGLDIRLTCEVQQLLGDKKVRAVSMSTTDGMVRGMKAIDTGAPITVPVGKSTLGRIFNVLGEPIDELGPVEIVDKFSIHRSAPKFTDLVTQPEIFETGIKVIDLLAPYRKGGKIGLFGGAGVGKTVLIQELIHNIAKEHSGVSVFGGVGERTREGNDLYNEFKESNVLGQVALVYGQMNEPPGARMRVGLTALTMAEYFRDVSKQDVLLFIDNIFRFVQAGSEVSALLGRMPSAVGYQPTLGTEMGDLQERITSTNEGSITSVQAVYVPADDLTDPAPATTFAHLDATTVLSRQLASLGIYPAVDPLSSTSTMLQPAVVGEEHYNIARGVQSTLQRYKDLQDIIAILGLDELSPEDKLVVNRARKLQRFLSQPFHVAEIFTGSPGKYVSLDKTIAGFKRVLQGEFDDLPEQAFYLVGDLDEALEKAKKLKDEGKS

SEQ ID NO: 43598 - DNA, 1464 bp, Gluconobacter oxydans
  CDS (1)..(1464): transl_table=11
atgtccgaaactcttaccccttctgccggagctgccaacaacgtggtcggccgtgtcacccaggtgcgtggtccggtcgtggacgtgcagttcgaaggcgatcttcccttcattctgaacgctctgcacgtccagaacggcgaccatacgctggttctggaagtcgcccaggaaatcggcgagcgtcaggtccgctgcattgccatggacacgaccgacggtctggttcgcggaactgaagtccgtgacacgggcaagcagatcatggtgccggttggtccggcaacgctcggccgtatcctgaacgtcgttggcgaaccgatcgacgaacgcggtccgatcagcagcgaactgcgtttcccgattcaccgtccggctccgtccttcgaagagcaggctgctgcatccgagatcctcgtgaccggcatcaaggtcgtcgatctgctctgcccgtacctcaagggtggtaagatcggcctgttcggcggcgctggcgtcggcaagacggttatcattcaggaactcatcaacaacatcgcgaaggcccacggtggtgtgtccgttttcgcaggtgtcggtgagcgtacccgtgaaggtaacgacctgtatttcgaaatgcaggacgcaggcgtcatcaagatcgccgaagacggttcgaccgagggctccaaggttgcgctggtctatggccagatgaacgagccgccgggagcccgttcgcgcgtggctctgacgggtctgtcgctcgcggaatacttccgtgacgaagaaggccaggacgtcctgttcttcgtggacaacatcttccgcttcacgcaggccggttccgaagtctccgcacttctgggccgtatcccctccgcagtgggttaccagccgacgctggccaccgagatgggcgccctgcaggagcgtatcacctccaccaagaagggctccatcacgtccgttcaggccgtgtatgtccctgctgacgatctgaccgatccggctccggcggcaaccttcgcgcatcttgatgctacgacggttctaaaccgttcgatcgctgaaatgggcatctatccggctgtcgatccgctggattccacgtcccgttcgctcgatccgaagatcgttggcgaagagcactaccaggttgcccgtcaggttcagcagacgctccagacctacaagggcctgcaggacatcatcgcgattctcggcatggacgagctgtccgaggacgacaagaagatcgttggccgcgcccgtcgcatccagcgcttcctgtcccagcctttccatgtggctgaagtcttcacgggtgctcccggcaagctggtctcgctcgaagacacgatccgttccttcaaggctgtcgtggccggcgagtacgatcacctgccggaaggcgccttctacatggttggtgacatcgacgaggccattgcgaaggccgagaagatgaagcaggaggcctga

SEQ ID NO: 43599 - protein, 487 aa, Gluconobacter oxydans
MSETLTPSAGAANNVVGRVTQVRGPVVDVQFEGDLPFILNALHVQNGDHTLVLEVAQEIGERQVRCIAMDTTDGLVRGTEVRDTGKQIMVPVGPATLGRILNVVGEPIDERGPISSELRFPIHRPAPSFEEQAAASEILVTGIKVVDLLCPYLKGGKIGLFGGAGVGKTVIIQELINNIAKAHGGVSVFAGVGERTREGNDLYFEMQDAGVIKIAEDGSTEGSKVALVYGQMNEPPGARSRVALTGLSLAEYFRDEEGQDVLFFVDNIFRFTQAGSEVSALLGRIPSAVGYQPTLATEMGALQERITSTKKGSITSVQAVYVPADDLTDPAPAATFAHLDATTVLNRSIAEMGIYPAVDPLDSTSRSLDPKIVGEEHYQVARQVQQTLQTYKGLQDIIAILGMDELSEDDKKIVGRARRIQRFLSQPFHVAEVFTGAPGKLVSLEDTIRSFKAVVAGEYDHLPEGAFYMVGDIDEAIAKAEKMKQEA

SEQ ID NO: 43600 - DNA, 1374 bp, Haemophilus ducreyi
  CDS (1)..(1374): transl_table=11
atggcaacaggaaaaattgtacagattatcggtgcggtaatcgacgttgaattcccgcaagatgcagtaccaaaagtatatgatgctttaaaagttgaatcaggtttaaccttagaagttcaacaacaattaggtggtggtttagtacgttgtatcgcattaggtacctcagatggtttaaagcgtggcttaaaggttgaaaatacaggtaaccctattcaagttcctgtaggcactaaaacattaggtcgtattatgaatgtattaggcgaaccaattgatgaaaaaggacctattggcgaagaagcgcgctgggatattcatcgtgcggctccaagttatgaagaacagtcaaatagtactgaattacttgaaaccggtatcaaagttattgacttaatttgtccatttgcaaaaggtggtaaagttggcttatttggtggagctggtgtaggtaaaaccgttaatatgatggagttgatccgtaatattgctattgagcactcaggttattcggtttttgctggtgtaggtgagcgtactcgtgaaggtaatgatttttatcatgaaatgacggattctaatgtattagataaagtatcactagtatatggccaaatgaatgaaccaccaggtaaccgtttacgtgttgcgttaacaggtttaactatggctgaaaaattccgtgatgaaggtcgtgatgtattatttttcgtagataatatttatcgttatactttagccggtacagaagtttctgctttattaggccgtatgccatcagcggtaggttatcaaccaaccctagcagaagaaatgggtgtattacaagaacgtattacctcaactaaaacaggttcaatcacgtcagtacaagcggtttatgtgcctgcggatgacttaacagatccatcaccagcgacaacctttgctcatttagattcaacagtggtattaagccgtaacatagcctcattaggtatttacccagcggtagatcctcttgactctacttcccgtcaattagacccgcttgtagttggggaagaacattataatgtagcgcgtggtgtacaaggtacattacaacgttataaagagttaaaagacattattgcaattttaggtatggacgaactgtctgaagatgataagttagttgtttcccgtgcacgtaagatcgaacgtttcttatcacaaccattctttgttgctgaagtgtttacaggttcaccaggtaaatatgtatctctaaaagatactatccgcggttttaaaggaatcttagaaggtgaatttgatcatatcccagaacaggcgttctatatggcaggttcaatcgacgaagttgtggaaagagcgagcaagatgtaa

SEQ ID NO: 43601 - protein, 457 aa, Haemophilus ducreyi
MATGKIVQIIGAVIDVEFPQDAVPKVYDALKVESGLTLEVQQQLGGGLVRCIALGTSDGLKRGLKVENTGNPIQVPVGTKTLGRIMNVLGEPIDEKGPIGEEARWDIHRAAPSYEEQSNSTELLETGIKVIDLICPFAKGGKVGLFGGAGVGKTVNMMELIRNIAIEHSGYSVFAGVGERTREGNDFYHEMTDSNVLDKVSLVYGQMNEPPGNRLRVALTGLTMAEKFRDEGRDVLFFVDNIYRYTLAGTEVSALLGRMPSAVGYQPTLAEEMGVLQERITSTKTGSITSVQAVYVPADDLTDPSPATTFAHLDSTVVLSRNIASLGIYPAVDPLDSTSRQLDPLVVGEEHYNVARGVQGTLQRYKELKDIIAILGMDELSEDDKLVVSRARKIERFLSQPFFVAEVFTGSPGKYVSLKDTIRGFKGILEGEFDHIPEQAFYMAGSIDEVVERASKM

SEQ ID NO: 43602 - DNA, 1497 bp, Helianthus annuus
  CDS (1)..(1497)
atgagaatgaatcctactacttctagttctggggttgccacgcttgacaaaaagaacctggggcgtatcgcccaaatcattggtccggtactagatgtagcctttccgccaggcaaaatgcctaatatttataacgctttggtagttaagggtcgagatactgttggtcaaccaattaatgtgacttgtgaggtacagcaattattaggaaacaatcgagttagagccgtagctatgagtgctacagacggtctaacgagaggaatggacgtaattgatacgggagctccgctaagtgttccggtcggtggagcgactctcggacgaattttcaacgtgcttggggagcctattgataatttaggtcctgtagataatagcacaacatttcctattcatagatccgcgcctgcctttatacagttagatacaaaattatctatttttgaaaccggaattaaagtagtagatcttttagccccttatcgccgtggaggaaaaatcggactattcgggggagctggcgtgggtaaaacagtactcattatggaattgattaacaatattgccaaagctcacggaggcgtatctgtatttggcggagtcggtgaacggactcgtgaaggaaatgatctttacatggaaatgaaagaatctggagtcattaatgaacaaaatattgcagaatcaaaagtggctctagtttacggtcaaatgaacgaaccgccgggagctcgtatgagagttggtttgactgccctaactatggcggaatatttccgagatgttaatgaacaagacgttcttttatttgttgacaatatcttccgttttgtccaagcaggatctgaagtatccgccttgttgggtagaatgccttccgctgtgggttatcaacctacccttagtaccgaaatgggttctttacaagaaagaattacttctaccaaagaagggtccataacttctattcaagctgtttatgtacctgcagatgatttgaccgaccctgctcctgctacgacatttgcacatttagatgctacgaccgtattatcaagaggattggctgccaaaggtatctatccagcagtagatcctttagattcaacgtcaactatgctacaaccccggatcgttggtgacgaacattatgaaactgcacaacaggttaagcaaactttacaacgttacaaagaacttcaagatattatagctattcttggattagacgaattatccgaagaagatcgtttaaccgtagcaagagcgcgaaaaattgagcgtttcttatcacaaccttttttcgtagcagaagtatttacgggttctccgggaaaatatgttggtttagcagaaacaattagaggctttcaattaatcctttccggagaattagatggtcttcccgaacaggccttttatttggtaggtaacatcgatgaagctacggcgaaggctatgaacttagaaatggagagcaattcgaagaaatga

SEQ ID NO: 43603 - protein, 498 aa, Helianthus annuus
MRMNPTTSSSGVATLDKKNLGRIAQIIGPVLDVAFPPGKMPNIYNALVVKGRDTVGQPINVTCEVQQLLGNNRVRAVAMSATDGLTRGMDVIDTGAPLSVPVGGATLGRIFNVLGEPIDNLGPVDNSTTFPIHRSAPAFIQLDTKLSIFETGIKVVDLLAPYRRGGKIGLFGGAGVGKTVLIMELINNIAKAHGGVSVFGGVGERTREGNDLYMEMKESGVINEQNIAESKVALVYGQMNEPPGARMRVGLTALTMAEYFRDVNEQDVLLFVDNIFRFVQAGSEVSALLGRMPSAVGYQPTLSTEMGSLQERITSTKEGSITSIQAVYVPADDLTDPAPATTFAHLDATTVLSRGLAAKGIYPAVDPLDSTSTMLQPRIVGDEHYETAQQVKQTLQRYKELQDIIAILGLDELSEEDRLTVARARKIERFLSQPFFVAEVFTGSPGKYVGLAETIRGFQLILSGELDGLPEQAFYLVGNIDEATAKAMNLEMESNSKK

SEQ ID NO: 43604 - DNA, 1401 bp, Helicobacter hepaticus
  CDS (1)..(1401): transl_table=11
atgcaaggtaaaattacacaagtaatgggtccagtggtagatgttgagtttagctcctatttgccaatgattaatgaggctattgatgttaattttgacatagagggacgaaaaaataatctcgttctagaggttgcggcacatcttggagataatcgtgtaagaacaattgctatggatatgacagaagggcttatacgcggacaagaagttaaagcacgtggcaaacctattgaagtgcctgtaggggaagctgtcttgggaagaatttttaatgttactggtgatgtaattgatggaggtaaacctcttgaaagtgaccttaagtggcctattcaccgagaagctccaagctttgagaatcaaagtacaagaacagaaatgtttgaaacaggtattaaagtcgttgatcttatagctccttattctaaaggtggaaaagttggattatttggtggtgcaggtgtgggtaaaacggttgttattatggaactcattcataatgttgcctataagcatagtggttattctgtttttgccggtgtaggggaacgtacaagagaaggaaatgatttataccacgaaatgaaagaagggggggtattagacaaagttgctctctgctatgggcaaatgaatgaaccaccgggagcgagaaatcgtattgcttttacaggtttgacaatggcggaatatttccgtgatgaaaaaggactcgatgtacttatgtttattgataacattttcagatatgcacaatctggttctgaaatgtcagcacttcttgggcgtattccttcagcagtaggttatcaacctactcttgcaggtgaaatgggtaaacttcaagaacgtattacttcaaccaaaaaaggttcaattacttctgttcaagctgtatatgtgccagcagatgacttaactgacccagctccagcatctgtatttgcacaccttgatgcaacaacagtgcttgatagaaaaatttctgaaaagggaatctaccctgcagtagatcctcttggctcaacatcaagaatccttgaccctcaaattgtaggagaagaacatcataaagttgcaacaggtgtacaacaagtgctacaaaaatacaaagacttacaagatattatcgctattttaggtatggacgagctttcggaagaagataaacaagtagttgcccgagcaagaaaaattgaaagattcctttctcagcctttctttgttgcagaaatttttacaggtagtccaggcaaatatgtaacgcttgaggaaacacttgaaggctttaaaggtattttagaaggtaaatacgatgatattcctgaaaatgctttttatttggtaggcaatatccaagaagcattagaaaaagctcaaaagcttaaaaatgcctag

SEQ ID NO: 43605 - protein, 466 aa, Helicobacter hepaticus
MQGKITQVMGPVVDVEFSSYLPMINEAIDVNFDIEGRKNNLVLEVAAHLGDNRVRTIAMDMTEGLIRGQEVKARGKPIEVPVGEAVLGRIFNVTGDVIDGGKPLESDLKWPIHREAPSFENQSTRTEMFETGIKVVDLIAPYSKGGKVGLFGGAGVGKTVVIMELIHNVAYKHSGYSVFAGVGERTREGNDLYHEMKEGGVLDKVALCYGQMNEPPGARNRIAFTGLTMAEYFRDEKGLDVLMFIDNIFRYAQSGSEMSALLGRIPSAVGYQPTLAGEMGKLQERITSTKKGSITSVQAVYVPADDLTDPAPASVFAHLDATTVLDRKISEKGIYPAVDPLGSTSRILDPQIVGEEHHKVATGVQQVLQKYKDLQDIIAILGMDELSEEDKQVVARARKIERFLSQPFFVAEIFTGSPGKYVTLEETLEGFKGILEGKYDDIPENAFYLVGNIQEALEKAQKLKNA

SEQ ID NO: 43606 - DNA, 1572 bp, Hemicentrotus pulcherrimus
  CDS (1)..(1572)
atgtttagcagggttgcaaagacgagtttttcggccgtaagggctgcaaaatcacaattttcacactcattatcacaacagacgagtaaaacatgggtaccagcagcaacttgtagcaaaagatcatatgctgctgaggcaaagacgtcggcagccccagtttcgggtcagatcgtagctgtcattggagctgtcgtcgacgttcagttcgaggatgacctcccacccattctcaatgccttggaggttcagggaaggacatccaggctggtgttggaagttgcacagcatcttggtgagaacacagtcaggacaattgccatggacggtacagaaggtctgatccgaggccagaagtgcgttgacactggctcccccatcagcatccccgtcggccccgagacgctgggacgcatcatcaatgtcattggtgaacccattgacgagagaggaccaattggaacagacaggagatcagcaatccatgcagaagctccagagtttgtagagatgagtgtaaaccaggaaatccttgttactggaatcaaggttgtagatctactcgccccatacgccaagggaggaaagattggtctgtttggcggtgctggtgtaggaaagactgtactcatcatggagctgattaacaacgtagccaaggcccacggaggttactctgtgtttgccggtgtaggagagaggacccgtgagggtaacgatctttaccatgagatgattgaaggaggtgtcatctccctcaaggatgacacatcaaaggtagcgttggtgtacggacagatgaacgagcctcccggcgcccgtgcccgtgtcgccttgaccggactgaccgttgccgaatacttccgtgaccaagagggacaggatgtgctgctcttcattgacaacatcttccgcttcacacaggctggatcagaggtatctgctctgctgggacgtatcccatctgccgtaggataccagccaaccctggccactgacatgggtactatgcaggagcgtattaccaccaccaagaagggatccatcacttccgtacaggccatctacgtgcctgctgacgatctcactgaccctgcccctgccaccaccttcgcccatttggacgccaccactgtgctgtcccgtggtatcgctgagctgggtatctaccctgctgtggatcctctggattcctcctcccgtatcatggaccccaacgtcgtcggagagcgtcactacagcatcgctcgtggagtacagaaaatccttcaggacaacaagaccctgcaggacatcatcgccatcttgggtatggacgagttgtctgaggacgacaaactgaccgtgtcccgagccaggaagatccagaggttcttgtcccaacccttccaggttgccgaggtcttcaccggcagtccaggcaagctcgtctcaatggcggagaccatcgatggattcgagtccattatcaagggcgagtgcgaccatctaccagagattgctttctacatggtaggcaacattcaagatgtcaaggataaggccgacaggctcgcagaagaactatcataa

SEQ ID NO: 43607 - protein, 523 aa, Hemicentrotus pulcherrimus
MFSRVAKTSFSAVRAAKSQFSHSLSQQTSKTWVPAATCSKRSYAAEAKTSAAPVSGQIVAVIGAVVDVQFEDDLPPILNALEVQGRTSRLVLEVAQHLGENTVRTIAMDGTEGLIRGQKCVDTGSPISIPVGPETLGRIINVIGEPIDERGPIGTDRRSAIHAEAPEFVEMSVNQEILVTGIKVVDLLAPYAKGGKIGLFGGAGVGKTVLIMELINNVAKAHGGYSVFAGVGERTREGNDLYHEMIEGGVISLKDDTSKVALVYGQMNEPPGARARVALTGLTVAEYFRDQEGQDVLLFIDNIFRFTQAGSEVSALLGRIPSAVGYQPTLATDMGTMQERITTTKKGSITSVQAIYVPADDLTDPAPATTFAHLDATTVLSRGIAELGIYPAVDPLDSSSRIMDPNVVGERHYSIARGVQKILQDNKTLQDIIAILGMDELSEDDKLTVSRARKIQRFLSQPFQVAEVFTGSPGKLVSMAETIDGFESIIKGECDHLPEIAFYMVGNIQDVKDKADRLAEELS

SEQ ID NO: 43608 - DNA, 1416 bp, Herpetosiphon aurantiacus
  CDS (1)..(1416): transl_table=11
atggcaactggaaagattttacaaattactggcgtggttatcgacgcagaatttcctgccgatagcctgccacaaatttataacgcgttggaaattcccttgggccaaggccgaccatcgctgatctgcgaagtccaacaacagttgggcgatagcgtcgtgcgcgcggtcgcaatgtccaccaccgacggccttgtccgtgggatggacgttatcaacactggtgcaccaattagcgtgccagtcgggcccgaaaccttgggtcgggtgttcgacgttcaaggtcggccaatcgacggtgaaggcccagttggtacaaccaaaacgatgccaattcaccgcccagctccaaccttcgaagaacaatcaaaccgcgctgagttgttcgaaaccggcatcaaagtcatcgacttgatcgcgccctttaccaagggtggcaaaaccggcgtgttcggcggcgccggcgtgggcaagaccgttattatccaagagttgatctcgaatatcgctaaagaacaatccggttactcggtgttcgcaggcgtaggcgagcgctcacgcgaaggtaacgacttgatccacgaaatgaaggattcgaagattcctggcaccgaccaaaccgtattcgataaaacggtgatggtgttcggccaaatgaacgaaccaccaggagcacgcttgcgggtagcactttcagctttgaccatggctgaatacttccgcgaagaaggccgcgacgtgctgttgttcgtcgataacatcttccgctttacccaagcaggctcggaagtgtcggcgctcttgggccggatgccttcacaggtgggttaccaaccaactcttgggaccgagatgggtgagttgcaagaacgcatcacctcgaccaagactggctcgattacctcgttgcaagcagtctacgtgcctgctgacgactacaccgacccagctccagcaacaacctttgctcacttggatgcaacgatttcgctggaacgctcgatctcggaaaaaggtatctaccctgcggtggacccactggcttcgaccagccggattctcgaccccaacattgtgggcgaagaacactaccgcgtcgcgaccgaagtccaacggatgttgcaacgctacaaagacttgcaagatattattgcaatcttgggtgtcgaagaattgtcagacgacgacaaattgacagtttcccgcgcccgcaagctcgaacgcttcttctcacaaccattcggtgtggctgaagtgtttaccaacattcctggcaagtacgtcgccgttggcgatactgtcaagagctttgcccgcgttctcgctggcgagttcgaccacattcccgaaagcttcttctttatgaagggtcgcatcgacgatgtggtagccgccttcgacgcatcaaagcaataa

SEQ ID NO: 43609 - protein, 471 aa, Herpetosiphon aurantiacus
MATGKILQITGVVIDAEFPADSLPQIYNALEIPLGQGRPSLICEVQQQLGDSVVRAVAMSTTDGLVRGMDVINTGAPISVPVGPETLGRVFDVQGRPIDGEGPVGTTKTMPIHRPAPTFEEQSNRAELFETGIKVIDLIAPFTKGGKTGVFGGAGVGKTVIIQELISNIAKEQSGYSVFAGVGERSREGNDLIHEMKDSKIPGTDQTVFDKTVMVFGQMNEPPGARLRVALSALTMAEYFREEGRDVLLFVDNIFRFTQAGSEVSALLGRMPSQVGYQPTLGTEMGELQERITSTKTGSITSLQAVYVPADDYTDPAPATTFAHLDATISLERSISEKGIYPAVDPLASTSRILDPNIVGEEHYRVATEVQRMLQRYKDLQDIIAILGVEELSDDDKLTVSRARKLERFFSQPFGVAEVFTNIPGKYVAVGDTVKSFARVLAGEFDHIPESFFFMKGRIDDVVAAFDASKQ

SEQ ID NO: 43610 - DNA, 1497 bp, Hordeum vulgare
  CDS (1)..(1497)
atgagaaccaatcctactacttctcgtcccggggtttccacaagtgaagaaaaaagtacaggtcgtatcgatcaaattattggacccgtgctggatgtcacttttcccccgggcaagttaccttatatttataacgctttagtagtccagagtagagacactgccgataagcaaattaatgtgacttgtgaggtacaacaattattaggaaataatcgagttagagctgtagctatgagtgctacggacgggttgatgagaggaatggaagtgattgacacgggagctcctctcagtgttccggtcggtggagctactctcggacgaattttcaacgttcttggggagcctgttgacaatttgggtcctgtagatagtagtgcaacgttccctattcatagatctgcgcctgcctttatcgagttagatacgaaattatccatctttgaaacaggtattaaggtcgtcgatcttttagctccttatcgacgtggaggaaaaataggactatttgggggggctggagtaggtaaaacagtactgatcatggaattaatcaataacattgctaaagctcatgggggcgtatccgtattcggtggagtaggggaacggactcgtgaaggaaatgatctttatatggaaatgaaggaatccggagtaattaatgaaaaaaatattgaagaatcaaaggtagctctagtctatggccaaatgaatgaaccaccgggagctcgtatgagagttggtttaactgccctaactatggcagaatatttccgagatgttaataagcaagacgtgcttttatttatcgataatatctttcgttttgttcaagcaggatcagaggtatccgctttattagggagaatgccctccgcagtgggttatcaacctactcttagtacagaaatgggttctttgcaagaaagaattgcttctactaaaaagggatctataacttcgattcaagcagtttatgtacctgcggacgatttgaccgaccctgcccctgccacaacatttgcacatttggatgctactaccgtactttccagaggattagcttccaagggtatttatccagcagtagatcctttagattcaacatcaactatgttacagcctcggatcgttggcaacgaacattatgaaactgcgcaaagagttaaggaaactttacaacgttacaaagaacttcaggacattatcgcaattcttggcttggatgaattatcggaagaggatcgtttaactgtagcaagagcaagaaaaattgagcgtttcttatcacaaccgttctttgtggcagaagtttttactggttctccaggaaagtatgttgctcttgcggaaactattaggggatttcaactaatcctttccggagaattagacggcctacctgaacaggctttttatttggtgggtaacatcgatgaagctagcacgaaagctataaccttagaagaggagaacaaatcgcagaaatga

SEQ ID NO: 43611 - protein, 498 aa, Hordeum vulgare
MRTNPTTSRPGVSTSEEKSTGRIDQIIGPVLDVTFPPGKLPYIYNALVVQSRDTADKQINVTCEVQQLLGNNRVRAVAMSATDGLMRGMEVIDTGAPLSVPVGGATLGRIFNVLGEPVDNLGPVDSSATFPIHRSAPAFIELDTKLSIFETGIKVVDLLAPYRRGGKIGLFGGAGVGKTVLIMELINNIAKAHGGVSVFGGVGERTREGNDLYMEMKESGVINEKNIEESKVALVYGQMNEPPGARMRVGLTALTMAEYFRDVNKQDVLLFIDNIFRFVQAGSEVSALLGRMPSAVGYQPTLSTEMGSLQERIASTKKGSITSIQAVYVPADDLTDPAPATTFAHLDATTVLSRGLASKGIYPAVDPLDSTSTMLQPRIVGNEHYETAQRVKETLQRYKELQDIIAILGLDELSEEDRLTVARARKIERFLSQPFFVAEVFTGSPGKYVALAETIRGFQLILSGELDGLPEQAFYLVGNIDEASTKAITLEEENKSQK

SEQ ID NO: 43612 - DNA, 1386 bp, Idiomarina loihiensis
  CDS (1)..(1386): transl_table=11
atgagtcaaggtaaggtcgtacaaattatcggcgccgttgtggatttagaatttccacaagacgctgtaccaaaagtatacgacgcactgaaagtgaccgaaggtggcttagaaggtttggttctggaagttcagcagcagctgggcggcggaatcgtacgtgccatcgcaatgggtacaactgacggtctgcgtcgtggtatcaccgctaaaaataccggtgaatcaatcatggttccagtgggtaagaaaaccctgggccgtattatggatgtattgggtaacccaattgatgaagcgggccctatcggtgaagaagagaaaatgtctattcaccgtgcggcaccaagctacgaagaacagtcaaacactaacgaactgttagaaaccggtatcaaagtcatcgacttgatttgcccgtttgctaaaggtggtaaagttggtctgttcggtggtgctggtgttggtaaaaccgttaacatgatggagcttatccgtaacatcgctatcgagcacagcggctactcagtattcgctggtgttggtgagcgtactcgtgaaggtaacgacttctatcacgagatgaacgattcaaacgttctggataaagtatcactggtttatggtcagatgaacgagccaccgggtaaccgtttacgtgttgctctgactggtttgactatcgctgagaaattccgtgacgaaggtcgcgatgtacttttcttcgttgataacatctaccgttacaccttggccggtactgaggtatcagcactgttaggccgtatgccttcagcggttggttatcagcctaccctggccgaagaaatgggtgttctgcaggaacgtatcacctctactaagacaggttcaatcacgtctgtacaggccgtttatgtgccagcggatgacttgactgacccatctccggcaacaacctttgctcacttggatgcaaccgttgtacttaaccgtgacatcgcgtcgttgggtatctaccctgcggttgacccgctggactcaacgtcacgtcagttggatccacaggttatcggtgatgagcactacgacacagcaatgggtgttcaggaagtactgcaacgctataaagagctgaaagacatcattgcgattctgggtatggacgagctgtctgaagaagacaaattgtcagtatctcgtgctcgtaaaattcagcgcttcttgtcgcagcctttcttcgtagccgaagtattcactggtgcgccaggtaaatacgtatctttgaaagatactattgccggctttaaaggcattttggacggtgattacgacgatatgccagagcaggccttctacatggttggtaccatcgaagaagcggtagaaaaagccaaaaacctgtaa

SEQ ID NO: 43613 - protein, 461 aa, Idiomarina loihiensis
MSQGKVVQIIGAVVDLEFPQDAVPKVYDALKVTEGGLEGLVLEVQQQLGGGIVRAIAMGTTDGLRRGITAKNTGESIMVPVGKKTLGRIMDVLGNPIDEAGPIGEEEKMSIHRAAPSYEEQSNTNELLETGIKVIDLICPFAKGGKVGLFGGAGVGKTVNMMELIRNIAIEHSGYSVFAGVGERTREGNDFYHEMNDSNVLDKVSLVYGQMNEPPGNRLRVALTGLTIAEKFRDEGRDVLFFVDNIYRYTLAGTEVSALLGRMPSAVGYQPTLAEEMGVLQERITSTKTGSITSVQAVYVPADDLTDPSPATTFAHLDATVVLNRDIASLGIYPAVDPLDSTSRQLDPQVIGDEHYDTAMGVQEVLQRYKELKDIIAILGMDELSEEDKLSVSRARKIQRFLSQPFFVAEVFTGAPGKYVSLKDTIAGFKGILDGDYDDMPEQAFYMVGTIEEAVEKAKNL

SEQ ID NO: 43614 - DNA, 2007 bp, Ipomoea batatas
  CDS (65)..(1537)
gaattcatctctctaaagggtttaaaaaaaaaaaaagaaagaaaaaagattttttattattgttatgagaatcaatcctactacttctggttctgaagtttccacggttgaaaaaaaaaacctggggcgtatcgtcaaaatcattggtccggtattagatgtagcttttcctcccgggaagatgcctaatatttataatgctctggtcgttcaagggcgaggcaatgaacaaacgaacgtgacttgcgaggtacagcaattattgggaaataatcgagttagagctgtagctatgagtgatacagatggtctaatgagagggatggaagtgattgacacgggagctcctataagtgttccggtcggtggatcgactctgggacgaattttcaacgtgctcggacaacctgttgataatttaggtcctgtagatactaatacaacgtctcctattcatagatctgcgcccgcctttatacagttagatacaaaattatctatttttgaaacaggaattaaagtagtagatcttttagccccctatcgccgtgggggaaaaatcggactatttgggggagctggagtggggaaaacagtactcattatggaattgattaacaatattgccaaagctcacgggggagtatccgtatttggcggagtgggtgaacgtactcgtgaaggaaatgatctttacttggaaatgaaagaatccggagtgattaatgaagaaaatattcccgaatcaaaagtggccctagtttacggtcagatgaatgaaccgccgggagctcgtatgagagttggtttgactgccctaactatggcagaatatttccgagatgttaatgagcaagacgtacttctatttatcgacaatatctttcgtttcgtccaagcgggatcggaagtatcggccttactgggtagaatgccttctgctgtgggttatcaaccgaccctgagtaccgaaatgggttatttacaagaaagaattacttccaccaaagaaggttccataacctcgattcaagcagtttatgtacctgcagatgatttgaccgatcctgctcctgctacgacatttgcacatttagatgcgactaccgtactatcaagaggtttagctgccaagggtatctatccagcagtagatcctttagattcaacgtcaacgatgcttcaacctcggatcgttggtgaggaacattatgaaactgcgcggggagttaagcaaactttacaacgttacaaagaacttcaggacattatagctatccttgggttggacgaattatccgaagaggatcgtttaaccgtagcaagagcgcgaaaaattgagcgtttcttgtcacaaccctttttcgtagcagaagtatttactggttctccaggaaaatatgttggtctagcagaaacaattagaggatttcaattgatcctttccggcgaattagatggtcttcctgaacaggccttttatttggtaggtaatatcgatgaagctaccgcgaaggcgatgaacttaaaaacttagaaatggagagcgatttgaagaaatgaccttaaaactttgtgtactgacccctaatcgaattgtttgggattcagaagtgaaagaaatcattttatctactaatagtggtcaaattggaatattacccaatcacgcccctattgccacagctgtagatataggtatcttgagaatacgccttaacgaccaatgggtaacgatggctctgatgggggggtttgctagaataggcaataatgaaatcactgttttggtcaatgatgcagaaaagggtagtgacattgattcactagaagctcagcaaactcttgaaatagcagaagctaattttagaaaagctgaaggaaagagacaaacaattgaggcaaatctagctcttcgccgagctcgaacacgggtcgaggctattaatgcgatttcataataagtcaactgtgttgaaatattaaaaagaggttctaatcctatag

SEQ ID NO: 43615 - protein, 490 aa, Ipomoea batatas
MRINPTTSGSEVSTVEKKNLGRIVKIIGPVLDVAFPPGKMPNIYNALVVQGRGNEQTNVTCEVQQLLGNNRVRAVAMSDTDGLMRGMEVIDTGAPISVPVGGSTLGRIFNVLGQPVDNLGPVDTNTTSPIHRSAPAFIQLDTKLSIFETGIKVVDLLAPYRRGGKIGLFGGAGVGKTVLIMELINNIAKAHGGVSVFGGVGERTREGNDLYLEMKESGVINEENIPESKVALVYGQMNEPPGARMRVGLTALTMAEYFRDVNEQDVLLFIDNIFRFVQAGSEVSALLGRMPSAVGYQPTLSTEMGYLQERITSTKEGSITSIQAVYVPADDLTDPAPATTFAHLDATTVLSRGLAAKGIYPAVDPLDSTSTMLQPRIVGEEHYETARGVKQTLQRYKELQDIIAILGLDELSEEDRLTVARARKIERFLSQPFFVAEVFTGSPGKYVGLAETIRGFQLILSGELDGLPEQAFYLVGNIDEATAKAMNLKT

SEQ ID NO: 43616 - DNA, 1497 bp, Jasminum nudiflorum
  CDS (1)..(1497)
atgagaatgaatcctactacttctggttctggggtttccacgcttgaaaaaaaaaacctggggcgtatcgtccaaatcatcgggccggtcctagatgtatcctttccgtcgggcaaaatgcctaatatttataatgctctggtagttcaaggccgagatactgttggtcaagcaattaatgtgacttgtgaggtacagcaattattaggaaataatcgagttagagctgtagccatgagtgctacagatggtctgatgagaggaatggaagtgattgacacaggagctcctctaagtgttccggtcggtggagcgactctgggacgaattttcaacgtgcttggagagcctgttgatgaattaggtcctgtagatactcgtacaacatctcctattcatagatctgcgcctgcctttatacagttagatacaaaattatctatttttgaaacaggaattaaagtagtagatcttttagccccttatcgccgtgggggaaaaataggactatttggaggagctggagttggtaaaacggtactcattatggaattgattaacaatattgccaaagcccatgggggcgtatccgtatttggcggagtgggtgaacgtactcgtgaaggaaatgatctttacatggaaatgaaagaatctggagtgattaatgaagaaaatattgcagaatcaaaagtggctctagtttacggtcagatgaatgaaccgcctggagctcgtatgagagttggtttgactgccctaacgatggcggaatatttccgagatgttaatgaacaagacgtacttctatttatcgacaatatcttccgtttcgtacaagcaggatccgaagtgtcggccttattgggtagaatgccttctgctgtcggttatcaacctaccctgagtaccgaaatgggtactttacaagaaagaattacttctaccaaagaagggtccataacttcgatccaagcagtttatgtacctgcagacgatttgaccgaccctgctcctgctacgacatttgcacatttagatgctactaccgtactatcaagaggattagctgccaaagggatctatccagcagtagatcctttagattcaacgtcaaccatgcttcaaccccggatcgttggtgaggaacattacaaaattgcgcaaagagttaagcaaactttacaacgttacaaagagcttcaggacattatagctatccttgggttggacgaattatccgaagaggatcgtttaaccgtagcaagagcgcgaaaaattgagcgtttcttatcacaacccttttttgtagcagaagtatttaccggttctccaggaaaatatgttggtctagcagaaaccattagagggtttcaattgatcctttccggagaattagatggtcttcccgaacaggccttttatttggtaggtaatatcgatgaagctaccgccaaggctatgaacttagaaatggagagcaatttgaagaaatga

SEQ ID NO: 43617 - protein, 498 aa, Jasminum nudiflorum
MRMNPTTSGSGVSTLEKKNLGRIVQIIGPVLDVSFPSGKMPNIYNALVVQGRDTVGQAINVTCEVQQLLGNNRVRAVAMSATDGLMRGMEVIDTGAPLSVPVGGATLGRIFNVLGEPVDELGPVDTRTTSPIHRSAPAFIQLDTKLSIFETGIKVVDLLAPYRRGGKIGLFGGAGVGKTVLIMELINNIAKAHGGVSVFGGVGERTREGNDLYMEMKESGVINEENIAESKVALVYGQMNEPPGARMRVGLTALTMAEYFRDVNEQDVLLFIDNIFRFVQAGSEVSALLGRMPSAVGYQPTLSTEMGTLQERITSTKEGSITSIQAVYVPADDLTDPAPATTFAHLDATTVLSRGLAAKGIYPAVDPLDSTSTMLQPRIVGEEHYKIAQRVKQTLQRYKELQDIIAILGLDELSEEDRLTVARARKIERFLSQPFFVAEVFTGSPGKYVGLAETIRGFQLILSGELDGLPEQAFYLVGNIDEATAKAMNLEMESNLKK

SEQ ID NO: 43618 - DNA, 1518 bp, Kluyveromyces lactis
  CDS (1)..(1518)
atggtcttgccaagattttatgctgcttcatctcgtgcagctttgcaagctgcgagacgtgctgttcccttcaccggtgtgagaggttatgctgctgctgcctcttctcaaggtaaggttagagccgttattggtgctattgttgatgttcaatttgaacaaggtcaattgccagctattttgaacgctttggaaatcgacactccagaaggaaagttggttttggaagtcgctcaacatttgggtgaaaacactgtcagaaccattgctatggatggtactgaaggtttagtccgtggtgaaaacgtttctgacactggtgctccaatttccgtcccagttggtagagaaaccttgggtagaattatcaacgttattggtgagccaattgacgaaagaggtccaatcaactccaagatgagaaagccaattcatgctgatcctccattattcgttgaacaatccactgctgctgaagttttggaaactggtatcaaggttgtcgacttgttggccccatacgccagaggtggtaagattggtttgttcggtggtgccggtgtcggtaagaccgttttcatccaagaattgattaacaacattgccaaggctcatggtggtttctctgtcttcactggtgtcggtgaaagaaccagagaaggtaacgatttgtaccgtgaaatgaaggaaactggtgttatcaacttggaaggtgattctaaggtcgcgttggttttcggtcaaatgaacgaacctcctggagctagagctagagtcgccttgactggtttgaccatcgctgaatacttcagagatgaagaaggtcaagatgtcttgttgtttatcgacaacattttcagattcacacaagccggttccgaagtgtccgctttgttgggtcgtattccatccgctgtcggttatcaaccaactttggccaccgatatgggtttgttgcaagaaagaattactaccaccaagaagggttccgtcacttctgtccaagccgtttacgtgccagctgatgatttgactgatcctgctccagctaccactttcgcgcatttggatgccaccactgtgttgtccagagggatctctgaattgggtatctacccagctgtcgatcctttggattccaaatctagattgttggatgctgccgtcgttggtcaagaacattacgatgtcgctactcaagttcaacaaactttgcaagcttacaagtctttgcaagatatcattgccattttgggtatggatgaattgtccgaacaagataagttgaccgtcgaaagagctagaaagattcaaagattcttgtctcaacctttcgctgtcgctgaagtcttcactggtatcccaggtagattggtcagattaaaggacaccatctcttctttcaaggctgtcttggacggtaagtacgatcacttgccagaaaacgccttctacatggttggtggtattgaagatgttgttgctaaggctgaaaagttggctgctgaagctaattaa

SEQ ID NO: 43619 - protein, 505 aa, Kluyveromyces lactis
MVLPRFYAASSRAALQAARRAVPFTGVRGYAAAASSQGKVRAVIGAIVDVQFEQGQLPAILNALEIDTPEGKLVLEVAQHLGENTVRTIAMDGTEGLVRGENVSDTGAPISVPVGRETLGRIINVIGEPIDERGPINSKMRKPIHADPPLFVEQSTAAEVLETGIKVVDLLAPYARGGKIGLFGGAGVGKTVFIQELINNIAKAHGGFSVFTGVGERTREGNDLYREMKETGVINLEGDSKVALVFGQMNEPPGARARVALTGLTIAEYFRDEEGQDVLLFIDNIFRFTQAGSEVSALLGRIPSAVGYQPTLATDMGLLQERITTTKKGSVTSVQAVYVPADDLTDPAPATTFAHLDATTVLSRGISELGIYPAVDPLDSKSRLLDAAVVGQEHYDVATQVQQTLQAYKSLQDIIAILGMDELSEQDKLTVERARKIQRFLSQPFAVAEVFTGIPGRLVRLKDTISSFKAVLDGKYDHLPENAFYMVGGIEDVVAKAEKLAAEAN

SEQ ID NO: 43620 - DNA, 1497 bp, Lactuca sativa
  CDS (1)..(1497)
atgagaatgaatcctactacttctggttctggggttaccacgcttgacaaaaagacactggggcgtatcgcccaaatcattggtccggtactagatgtagcctttccgccaggcaaaatgcctaatatttataacgctctggtagttaagggtcgagatactgctggtcaaccaattaatgtgacttgtgaggtacagcaattattaggaaacaatcgagttagggccgtagctatgagtgctacagatggtctaacgagagggatggacgtaattgatacgggagctccactaagtgttccggtcggtggagcgactctcggacgaattttcaacgtgcttggcgagcctgttgataatttaggtcctgtagatactagtacaacatttcctattcatagatctgcgcctgcctttatacagttagatacaaaattatctatttttgaaaccggaattaaagtagtagatcttttagccccttatcgccgtggaggaaaaatcggactattcgggggagctggcgtgggtaaaacagtactcattatggaattgattaacaatattgccaaagctcacggaggcgtatctgtatttggcggagtcggtgaacggactcgtgaaggaaatgatctttacatggaaatgaaagaatctggagtaattaatgaaaaaaatattccagaatcaaaagtagctctagtttacggtcagatgaatgaaccgccgggagctcgtatgagagttggtttgactgccctaactatggcggaatatttccgagatgttaatgaacaagatgtacttttatttattgacaatatcttccgttttgtccaagcaggatctgaagtatccgccttgttgggtagaatgccttccgctgtgggttatcaacctacccttagtaccgaaatgggttctttacaagaaagaattacttctaccaaagaagggtccataacttctattcaagctgtttatgtacctgcagatgatttgaccgaccctgctcctgctacgacatttgcacatttagatgctactaccgtactatcaaggggattagccgccaaaggtatctatccagcagtagatcctttagattcaacgtcaactatgctacaaccccggatcgttggtgaagaacattatgacactgcacaagaggttaagcaaactttacaacgttacaaagaacttcaagatattatagctattcttggattggacgaattatccgaagaggatcgtttaaccgtagcaagagcgcgaaaaattgagcgtttcttatcacaacctttttttgtagcagaagtatttacgggttctccgggaaaatatgttggtttagcagaaacaattagaggctttcaattaatcctttccggagaattagatggtcttcctgaacaggctttttatttggtaggtaacatcgatgaagctacggcgaaggctatgaacttagaaatggagagcaatttgaagaaatga

SEQ ID NO: 43621 - protein, 498 aa, Lactuca sativa
MRMNPTTSGSGVTTLDKKTLGRIAQIIGPVLDVAFPPGKMPNIYNALVVKGRDTAGQPINVTCEVQQLLGNNRVRAVAMSATDGLTRGMDVIDTGAPLSVPVGGATLGRIFNVLGEPVDNLGPVDTSTTFPIHRSAPAFIQLDTKLSIFETGIKVVDLLAPYRRGGKIGLFGGAGVGKTVLIMELINNIAKAHGGVSVFGGVGERTREGNDLYMEMKESGVINEKNIPESKVALVYGQMNEPPGARMRVGLTALTMAEYFRDVNEQDVLLFIDNIFRFVQAGSEVSALLGRMPSAVGYQPTLSTEMGSLQERITSTKEGSITSIQAVYVPADDLTDPAPATTFAHLDATTVLSRGLAAKGIYPAVDPLDSTSTMLQPRIVGEEHYDTAQEVKQTLQRYKELQDIIAILGLDELSEEDRLTVARARKIERFLSQPFFVAEVFTGSPGKYVGLAETIRGFQLILSGELDGLPEQAFYLVGNIDEATAKAMNLEMESNLKK

SEQ ID NO: 43622 - DNA, 1404 bp, Leptospira interrogans
  CDS (1)..(1404): transl_table=11
atgaataaaggtaaaatcaagcagatcatcggttccgttttggatatcgaatttgaaaacggagaacttccagaaatttataacgcattggaaatcgaaacgaacgttttcggaaaaaaggaaacgattatcgccgaggttcaaacccatatcggaggaaaagcggtgcgtgcgattgcactttcttctacagatggtttgatccgaggacaagaagtttccaatacaggaaaaccgatcagtgttcctgtaggagacgcaacactcggaagaatttttaacgttctaggtaaaaccatcgacgaaggtcccgcgattaccgtaaaggaaacccgtccgattcacagagccgctccttctttcgacgagctcacttctaaaaccgaagtatttgaaaccggaattaaggtgatcgatcttctcgctccttatatcaagggtggaaagacagggctcttcggaggtgctggagtaggtaagacagttctcattcaggaactcatcaacaatatcgccaaacaacacggtggattttccgtgtttgctggagtaggagaaagaacccgcgaaggaaacgatctctggagagagatgaaggaatctggagtaattgataaaacagttctttgttacggtcagatgaacgaacctcctggtgctcgtttaagagttgcgttatccgctcttacaatggcggaacattttcgtgattctattggaaccgacgttcttcttttcgtagataatatatttcgtttttcgcaagctggttcggaagtttctgcgcttctcggaagaatgccttctgccgtgggttaccaacctacactttctaccgaaatgggtgcgcttcaagaaagaattacatctactaaaaaaggatcaatcacttctgttcaggcgatttacgttcctgcagacgacttgaccgacccggctcctgcaaacgcgtttgctcacttggacgcaaccacggttctttctcgtgctatttccgataaaggaatttatcctgcagtggatcctctggattctacttccagagtaatgaatgctcaggttctgggagaagaacactatttagtcgctcgggaagttcagagaattctgcaaagatataaagacttacaagatattattgccattttgggaatggatgaactttctgaagacgataaagtgctcgtagctagagcgcgaaaaatagaaaaattcctttctcaaccttttcatgtggcggaagtttttacaggagctcctggaaaatacgtaaaacttgcggatacggttcgttcttttaaagaagtgatttctggaaactatgatcaccttccagaacaagctttttatatggttggttctatagacgatgccatcgaaaaagcaaaaggttacaaaggataa

SEQ ID NO: 43623 - protein, 467 aa, Leptospira interrogans
MNKGKIKQIIGSVLDIEFENGELPEIYNALEIETNVFGKKETIIAEVQTHIGGKAVRAIALSSTDGLIRGQEVSNTGKPISVPVGDATLGRIFNVLGKTIDEGPAITVKETRPIHRAAPSFDELTSKTEVFETGIKVIDLLAPYIKGGKTGLFGGAGVGKTVLIQELINNIAKQHGGFSVFAGVGERTREGNDLWREMKESGVIDKTVLCYGQMNEPPGARLRVALSALTMAEHFRDSIGTDVLLFVDNIFRFSQAGSEVSALLGRMPSAVGYQPTLSTEMGALQERITSTKKGSITSVQAIYVPADDLTDPAPANAFAHLDATTVLSRAISDKGIYPAVDPLDSTSRVMNAQVLGEEHYLVAREVQRILQRYKDLQDIIAILGMDELSEDDKVLVARARKIEKFLSQPFHVAEVFTGAPGKYVKLADTVRSFKEVISGNYDHLPEQAFYMVGSIDDAIEKAKGYKG

SEQ ID NO: 43624 - DNA, 1377 bp, Mannheimia succiniciproducens
  CDS (1)..(1377): transl_table=11
atgtcagcaggaaaaattgtacagattatcggtgcggtaatcgacgttgaattcccagaaaatgcagtaccaaaagtttacgacgcattaaaagttgcggaaggcggtttaacccttgaagtgcaacaacaattaggtggcggtatcgttcgttgtatcgcaatgggttcttccgacggtttaaaacgcggtttaagtgtcagtaatacggggaaacctatttccgtacccgtaggaactaaaactttgggccgtattatgaatgtacttggagaaccggtagacgaacaaggtccaatcggcgcagaagaagaatgggctatccatcgtgaagcgccaagttacgaagaacaatcaaacagtactgaacttttggaaacgggtattaaagttatcgacttgatctgtccgttcgctaagggtggtaaagtaggtctgttcggtggtgcgggtgttggtaaaaccgttaacatgatggaattaatccgtaacatcgcaatcgaacactcgggtttctccgtatttgccggtgtaggcgaacgtactcgtgaaggtaacgacttctaccatgaaatgacggattctaacgtattggataaagtatcactggtgtatggtcagatgaatgagccgccgggtaaccgtctacgcgtggctttaacaggcttaactatggcggaaaaattccgtgatgaaggccgtgatgtattgttcttcgtggataatatttatcgttatactcttgccggtacagaagtatccgcattgttgggccgtatgccttctgcggttggttatcagccgacgttagcggaagaaatgggggtattacaagaacgtattacatccaccaaaaccggttccattacttctgtgcaggcggtttacgtgccggcggacgacttaaccgacccgtctcctgcaacaacttttgctcacttggactcaaccgtagtattaagccgtaatatcgcatctttaggtatttatccggctgttgacccgttagattccacttcacgtcagcttgatccgcaagtagttggtcaagaacattacgatgtggcgcgcggtgtacagggtattctacagcgttacaaagaattgaaagatattattgcgattcttggtatggacgagctttcggaagacgataaattagtggtagcgcgtgcgcgtaaaattgaacgtttcttatcacaaccgttcttcgttgctgaagtatttaccggttcaccgggtaaatacgtatcattgaaagataccattcgtggttttaaaggtattcttgaaggcgaatacgaccatattccggaacaggcgttctatatggtaggttcaatcgaagaagttgttgaaaaagcgaaaaatatgtaa

SEQ ID NO: 43625 - protein, 458 aa, Mannheimia succiniciproducens
MSAGKIVQIIGAVIDVEFPENAVPKVYDALKVAEGGLTLEVQQQLGGGIVRCIAMGSSDGLKRGLSVSNTGKPISVPVGTKTLGRIMNVLGEPVDEQGPIGAEEEWAIHREAPSYEEQSNSTELLETGIKVIDLICPFAKGGKVGLFGGAGVGKTVNMMELIRNIAIEHSGFSVFAGVGERTREGNDFYHEMTDSNVLDKVSLVYGQMNEPPGNRLRVALTGLTMAEKFRDEGRDVLFFVDNIYRYTLAGTEVSALLGRMPSAVGYQPTLAEEMGVLQERITSTKTGSITSVQAVYVPADDLTDPSPATTFAHLDSTVVLSRNIASLGIYPAVDPLDSTSRQLDPQVVGQEHYDVARGVQGILQRYKELKDIIAILGMDELSEDDKLVVARARKIERFLSQPFFVAEVFTGSPGKYVSLKDTIRGFKGILEGEYDHIPEQAFYMVGSIEEVVEKAKNM

SEQ ID NO: 43626 - DNA, 1479 bp, Marchantia polymorpha
  CDS (1)..(1479)
atgaaaacaaattttttagcttttggaatgtctacacttgttgctaaaaatataggaagtattactcaagttattggtcccgtattagatgttgccttttctccagggaaaatgcctaatatttataactctttaattgttaaagatcaaaattcagctggtgaagaaattaatgttacttgtgaagttcaacaattgttaggaaataacaaagtaagagctgttgctatgagtgcgacagatggaatgatgcggggtatgaaagttattgatactggtgctcctttaacagttcctgtaggagaagcgactcttggacgaatttttaatgttttaggagaacctgtagataacttaggacctgtagaagttactacaacatttcctattcatagagctgctcctgcttttactcaattagataccaaattatctatttttgaaacaggaattaaagtagtagatcttttagctccttatcgtcgtggaggaaaaattggattatttggaggagctggtgtaggaaaaacagttcttattatggaattaattaataacatcttgaaagcacatggaggtgtttcagtatttggaggagtaggggaaagaactcgtgaaggaaatgatctttacatggaaatgaaagaatctaaagtaataaatgaacaaaatatttcagaatcaaaagttgctttagtttatggtcaaatgaatgaaccaccaggcgctcgtatgagagttgggttaacagctttaactatggctgagtattttcgtgatgttaataaacaagatgtacttttatttattgataatatttttcgttttgttcaagcaggttcagaagtttctgctttattaggtagaatgccgtctgcagtaggatatcaaccaactttaagtacagaaatgggaactttacaagaaagaataacttctacaaaagaaggatcaattacttctattcaagctgtttatgtacctgcggatgatttaacagatccggctcctgcaacaacttttgctcatttagatgccactactgtattatctagaggtttagcagctaaaggaatttatcctgctgtagatcctttagattcaacttctacaatgttacaaccttggattgtaggtgaagaacattatgaaactgcgcaaggagtaaaacagactttacaacgatacaaagaattacaagatattattgctattcttggtttagatgaattatctgaagaagatcgtttaactgtagcaagagcacgcaaaatagaaagatttttatcacaacctttctttgtagcagaagtttttacaggttcgccaggaaaatatgtaagtcttagagaaactataaaaggatttcaaatgattctttcgggagaattagatagccttcctgaacaagcattttatttagtaggaaatatagatgaagctactgcaaaagcagctactttacaagtggagagttaa

SEQ ID NO: 43627 - protein, 492 aa, Marchantia polymorpha
MKTNFLAFGMSTLVAKNIGSITQVIGPVLDVAFSPGKMPNIYNSLIVKDQNSAGEEINVTCEVQQLLGNNKVRAVAMSATDGMMRGMKVIDTGAPLTVPVGEATLGRIFNVLGEPVDNLGPVEVTTTFPIHRAAPAFTQLDTKLSIFETGIKVVDLLAPYRRGGKIGLFGGAGVGKTVLIMELINNILKAHGGVSVFGGVGERTREGNDLYMEMKESKVINEQNISESKVALVYGQMNEPPGARMRVGLTALTMAEYFRDVNKQDVLLFIDNIFRFVQAGSEVSALLGRMPSAVGYQPTLSTEMGTLQERITSTKEGSITSIQAVYVPADDLTDPAPATTFAHLDATTVLSRGLAAKGIYPAVDPLDSTSTMLQPWIVGEEHYETAQGVKQTLQRYKELQDIIAILGLDELSEEDRLTVARARKIERFLSQPFFVAEVFTGSPGKYVSLRETIKGFQMILSGELDSLPEQAFYLVGNIDEATAKAATLQVES

SEQ ID NO: 43628 - DNA, 2444 bp, Medicago sativa
  CDS (538)..(2010)
gagcctcttatttttttaatttttgatttttttattctcaataataaaaaatttactcttgaccttgacagtgatatatgttgtatatgtaaatcctagatgaaaaaatgggcagaattcgcccacgaaaagaaaaataggtaaaaaaattggctaagtataaatcctatgtatgctgaggaaataaaaaatgagatagaaaaactgaatcgtaaacaaagtttaggttcgaattccatagataatatagatagtattgtctataatctataatgataaacaaatgaaagactttcaaaagatttcatccaattcaaattttcataatgactgggttgactttgaaaatgcattcattgaaattgaattggttgggtggtaccaagaaaatcgattattaacttacatttcttattaaatattaattaatattaaatattaattaaattaactgatcaacttgctttgttatcaaacatttttttcttgatttcaatttttttttttgaaaaaaaaaaaaaacggatatattttaatatgagactaactcctaccacttcggatactgaggtttctggacttgaaaaaaaaaatctaggacgtatcacgcaaataattggtccggtactcgatgtagttttttcaccagggaagatgcctaatatttacaacgctctgatagttcaaggtcgagatactgttggacaagaaattaacgtaacttgtgaagtacagcaattattaggaaataatagagttagagctgtagctatgagtgctacagatggtctaaagagaggaatggatgtgattgacacgggagctcccctaagtgttccagtcggcggagcaaccctaggtcgaattttcaacgtgcttggagagcctattgataatttaggtcctgtagatactggcacaacatctcctattcatagatccgcgcctgcctttatacagttagatacaaaattatccatttttgaaacaggaattaaagtagtagatcttttagctccttatcgccgtggcggaaaaataggacttttcggtggagctggggtaggtaaaacagtactgattatggaattgatcaataacattgccaaagctcatggaggtgtatccgtatttggcggagtaggtgagcgtactcgtgagggaaatgatctttatatggaaatgaaagaatccggagtcattaatgaaaaaaatattgcggaatcaaaagtagctctagtctacgggcaaatgaatgaaccccccggagctcgtatgagagttggtttaactgccctaactatggcagaatatttccgagatgtcaatgaacaggacgtccttctatttatcgacaatatcttccgttttgtccaagccggatccgaagtatctgccctattgggccgaatgccttccgctgtgggttatcaacccaccctgggtactgaaatgggtactttacaagaacgaattacttctaccaaagaagggtctataacttctattcaagcagtttatgtacctgcagacgatttgaccgatcctgctcctgccacgacatttgcacatttggatgctactactgtactatcaagaggattagcttccaaaggtatctatccagcagtcgatcctttagattcaacgtcaaccatgctccaacctcggatcgttggtgaagaacattatgaaactgcgcaaagggttaaacaaacgttacaacgttacaaagaacttcaggacattatagctattcttgggttggacgaattatccgaagaggatcgtttaaccgtagcaagagcacgaaaaattgaacgtttcttatcccaaccttttttcgtagcagaagtatttacaggttccccagggaaatatgttggtctagcagaaacaattagagggtttaaattgattctttctggagaattagatagtcttcctgaacaagccttttatttggtgggtaatatcgatgaagctactgcgaaggctgcgaacttgtaaatggagaacaaattcaagaaatgactttaaatctttgtgtactgacccccaatcgaactgtttgggattcagaagtgaaggaaattattttatctactaatagtggacaaattggggtattaaaaaatcatgcgcctattgccacagctttagatataggtattttgaaaatacgccttaccaaccaacaatgggtaacgatggctctgatgggcggttttgctagaataggcaataatgagatcactattttagtaaatgatgcggaaaagagcattgacattgatccacaagaagcacaacaaactctaaaaatagcagaagctaacttgaataaggctgaagggaaaagacaaacaattgaggcaaatctagctctccgacgagctaggacacgagtagagactatactagagtctatcaataggttctag

SEQ ID NO: 43629 - protein, 490 aa, Medicago sativa
MRLTPTTSDTEVSGLEKKNLGRITQIIGPVLDVVFSPGKMPNIYNALIVQGRDTVGQEINVTCEVQQLLGNNRVRAVAMSATDGLKRGMDVIDTGAPLSVPVGGATLGRIFNVLGEPIDNLGPVDTGTTSPIHRSAPAFIQLDTKLSIFETGIKVVDLLAPYRRGGKIGLFGGAGVGKTVLIMELINNIAKAHGGVSVFGGVGERTREGNDLYMEMKESGVINEKNIAESKVALVYGQMNEPPGARMRVGLTALTMAEYFRDVNEQDVLLFIDNIFRFVQAGSEVSALLGRMPSAVGYQPTLGTEMGTLQERITSTKEGSITSIQAVYVPADDLTDPAPATTFAHLDATTVLSRGLASKGIYPAVDPLDSTSTMLQPRIVGEEHYETAQRVKQTLQRYKELQDIIAILGLDELSEEDRLTVARARKIERFLSQPFFVAEVFTGSPGKYVGLAETIRGFKLILSGELDSLPEQAFYLVGNIDEATAKAANL

SEQ ID NO: 43630 - DNA, 1440 bp, Mesoplasma florum
  CDS (1)..(1440): transl_table=4
atggcagcaaaaaaaacgacaagtaaaaatactgttaattcagcaaatggttttgtattccaaattttaggaccagttgttgatgttaaatttagcgaagataatattcctatgatctatgatgctttagttgtagataataacggagttgaattagttttagaagttgaacaacacatgggtgatgaagttgttagaacaattgcaatgggaccaactgaaggattagcaaaaggtcttccagttattaatacaaacgctccaatattagcaccagttggtgatgatgttttaggacgtatgtttaatgttacagggcatgcaattgatgaaaaaccagaattcacaggtaaaagaatgcctatccaccgtgatgcaccagcttatgaagaattaattactaatgctgaaattttagaaacaggaattaaagttatagacttaatgattccatttgctaaaggtggaaaaattggattattcggtggagccggagttggtaaaacagttttaattcaagaattaattaacaatattgctaaagctcacagtggggtttcagttttcgctggtgttggtgaaagaactcgtgaaggaaatgacctttatcatgaattcatcgaagctggagttttagataaaacaagtttagtattcggacaaatgaatgaaccaccaggtgcacgtatgcgtgttgcattaacaggtttaacaattgctgaacactttagagatgaaaaaaacatggacgtattattattcattgataatattttcagatttacacaagcaggtagtgaagttagtgccttattaggacgtatgccttcagctgttggatatcaaccaactttatctacagaaatgggttcactacaagaacgtattacttcaactaataaaggatcaattacatcagttcaagcagtttatgttccagctgatgacttaactgacccagcacctgcaacaacatttacacacttagatgcaaaaattgttcttgaccgttcaattgcaagtttaggaatctatcctgcagttgatccactttcatcttcatcaagaatgttagatccagaaattattggagaagaacattacaatgtagctttaggtgttcaaggaactctacaaaaataccaagatttacaatcaatcattgcaattttaggtatggatgaattaagtgcagaagataaattaattgtccaaagagcacgtaaaataagaaacttcttatcacaatcattctacgtaggagaaaaatttacaggtcgtcctggacaatatgtaaaagtatctgacacagtaagatcatttaaaatgattcttgacggtgaaatggatgacattccagaaatcttgttcttatacaaaggaacagctgaagatgttattcaagcatataacgaaacaaaagttaaaaataaaaagtag

SEQ ID NO: 43631 - protein, 479 aa, Mesoplasma florum
MAAKKTTSKNTVNSANGFVFQILGPVVDVKFSEDNIPMIYDALVVDNNGVELVLEVEQHMGDEVVRTIAMGPTEGLAKGLPVINTNAPILAPVGDDVLGRMFNVTGHAIDEKPEFTGKRMPIHRDAPAYEELITNAEILETGIKVIDLMIPFAKGGKIGLFGGAGVGKTVLIQELINNIAKAHSGVSVFAGVGERTREGNDLYHEFIEAGVLDKTSLVFGQMNEPPGARMRVALTGLTIAEHFRDEKNMDVLLFIDNIFRFTQAGSEVSALLGRMPSAVGYQPTLSTEMGSLQERITSTNKGSITSVQAVYVPADDLTDPAPATTFTHLDAKIVLDRSIASLGIYPAVDPLSSSSRMLDPEIIGEEHYNVALGVQGTLQKYQDLQSIIAILGMDELSAEDKLIVQRARKIRNFLSQSFYVGEKFTGRPGQYVKVSDTVRSFKMILDGEMDDIPEILFLYKGTAEDVIQAYNETKVKNKK

SEQ ID NO: 43632 - DNA, 1446 bp, Mesostigma viride
  CDS (1)..(1446)
atgacagcaatagaaaccaaacgtataggatctattacacaaattattggtcctgtattggatgcaaagtttcctcctggccaaatgcctaatatctataacgcattaatagtaaaagcaaaaaatgaagcaggcgaagaccttagtgttacctgtgaagttcaacaactattaggcgacaatcaagtaagagctgttgcaatgagtgctacagatggtcttatgagaggattagaaattcttgatacaggagctcctttaagcgttccagtaggagaaattactttaggacgtatttttaatgtacttggcgaaccagtagatggtttaggcgatgttgtagcaaaaacaaaatctcctattcatagaaattctccaacttttattgaattagatactaaattatctatttttgaaacaggtattaaagtagttgatcttttagctccttatcgtcgtggaggaaaaatcggtctttttggtggtgctggtgttggcaaaacagtattaattatggaattaattaataatattgctaaagcacatggtggtgtttcagtatttggtggcgtaggtgaacgtaccagagaaggaaacgatttatatatggagatgaaagaatccaaagtaattaacgaagaaaatctttcctcctctaaagttgctttagtatacggtcaaatgaatgagcctccaggagctcgtatgagagtaggcttaactgcattgacaatggctgaatattttagagatgtaaataatcaagacgtattattatttattgataatatttttagatttgtacaagcaggttctgaagtatctgcattacttggaagaatgccttctgctgtaggttatcaaccaactttaagcagagaaatgggtaccttacaagaacgtattacatctactaaacaaggatcaatcacttctattcaagcagtttatgtacctgcagatgatttgactgaccctgcaccagcaacaacattcgcacatttagatgcaacaactgtactttctagaaacttagctgcaaaaggtatttatccagcagtagatcctctagattctacttctactatgttacaaccatggattgttggtgaagaacattatggtacagctcaaagagtaaaacaaacattacaacgttataaagaattacaagatattattgcaattctaggcttagatgaattatctgaagaagatcgtttagttgtagctagagctcgtaaaattgaacgtttcttatctcaacctttctttgtagcagaagtattcactggatctcctggtaaatatgtaagtttagcagattctatcaaaggatttacaatgattcttaatggtgaattagatagtcttcctgaacaagcattttatttagtaggaaatatcgaagaagcgattgcaaaagcagctacacttaaagaataa

SEQ ID NO: 43633 - protein, 481 aa, Mesostigma viride
MTAIETKRIGSITQIIGPVLDAKFPPGQMPNIYNALIVKAKNEAGEDLSVTCEVQQLLGDNQVRAVAMSATDGLMRGLEILDTGAPLSVPVGEITLGRIFNVLGEPVDGLGDVVAKTKSPIHRNSPTFIELDTKLSIFETGIKVVDLLAPYRRGGKIGLFGGAGVGKTVLIMELINNIAKAHGGVSVFGGVGERTREGNDLYMEMKESKVINEENLSSSKVALVYGQMNEPPGARMRVGLTALTMAEYFRDVNNQDVLLFIDNIFRFVQAGSEVSALLGRMPSAVGYQPTLSREMGTLQERITSTKQGSITSIQAVYVPADDLTDPAPATTFAHLDATTVLSRNLAAKGIYPAVDPLDSTSTMLQPWIVGEEHYGTAQRVKQTLQRYKELQDIIAILGLDELSEEDRLVVARARKIERFLSQPFFVAEVFTGSPGKYVSLADSIKGFTMILNGELDSLPEQAFYLVGNIEEAIAKAATLKE

SEQ ID NO: 43634 - DNA, 1383 bp, Methylococcus capsulatus
  CDS (1)..(1383): transl_table=11
atgagttctgggaaaatcgtacagatcatcggcgcggtggtcgacgcggaatttccgcgcgaatccttaccgaagatttacgacgcattgcgcgtcgacgaggtcggcctcgtcctggaagtccagcagcagctgggcgacggtgtggtgcgctgcatcgccatgggttccaccgacggggtccggcgcggcgtcacggtgaccaacaccggtgcgccgatctcggtaccggtgggcacggagaccttgggtcgcatcatgaacgtgctgggcgatcccatcgacgagaagggaccgatcggcgagaaggaacgctggggcatccaccgcaaggcgccttcctatcaggaccaggcggccgccaacgaattgctggagaccggcatcaaggtgatcgacctgatctgcccgttcgccaaaggcggcaaagtcgggctgttcggtggcgccggcgtgggcaagaccgtcaacatgatggagctgatccgcaacatcgccatcgaacacagcggctactcggtgttcgcgggcgtaggcgaacgtacccgtgagggtaacgacttctaccacgaaatgaaggaatccaacgttctcgacaaggtgtcgctggtttacggccagatgaacgaaccgccgggcaaccgtctgcgcgtggctctgaccggcctgaccatcgccgagaagttccgcgacgaaggccgtgacgtgctgctgttcatcgacaacatttaccgctacaccctggcgggtacggaagtgtcggccctgctcgggcgcatgccttcggccgtgggttaccagcccaacctggcggaggaaatgggtattctgcaggagcgcatcacctccaccaagaccggttccatcacgtctatccaggccgtgtacgttccggccgacgacttgaccgacccgtctccggcgaccaccttcgcgcatctcgacgccaccgtcgtgctgtcgcgccagatcgccgagctgggtatctacccggcggtcgatccgctggattccaccagccgccagctcgatccgctggtaatcgggcacgagcattacgagacgacccgccgggtgcagagcactctgcagcgctacaaggagctgcgcgacatcatcgccatcctcggcatggacgagctgtcggaaaacgacaagctgatcgtctcgcgcgcccgcaagatccagcgcttcctgtcgcagccgttcttcgtggccgaggtgttcaccggctcgcccggcaagtacgttcccctcaaggacacgatcgccggtttcaaggggatcgtcgacggagactacgacgacgtgccggagcaggcgttctacatggtcggttcgatcgacgaggcgctggagaaagccaaacgcctggccgcttga

SEQ ID NO: 43635 - protein, 460 aa, Methylococcus capsulatus
MSSGKIVQIIGAVVDAEFPRESLPKIYDALRVDEVGLVLEVQQQLGDGVVRCIAMGSTDGVRRGVTVTNTGAPISVPVGTETLGRIMNVLGDPIDEKGPIGEKERWGIHRKAPSYQDQAAANELLETGIKVIDLICPFAKGGKVGLFGGAGVGKTVNMMELIRNIAIEHSGYSVFAGVGERTREGNDFYHEMKESNVLDKVSLVYGQMNEPPGNRLRVALTGLTIAEKFRDEGRDVLLFIDNIYRYTLAGTEVSALLGRMPSAVGYQPNLAEEMGILQERITSTKTGSITSIQAVYVPADDLTDPSPATTFAHLDATVVLSRQIAELGIYPAVDPLDSTSRQLDPLVIGHEHYETTRRVQSTLQRYKELRDIIAILGMDELSENDKLIVSRARKIQRFLSQPFFVAEVFTGSPGKYVPLKDTIAGFKGIVDGDYDDVPEQAFYMVGSIDEALEKAKRLAA

SEQ ID NO: 43636 - DNA, 1398 bp, Methylobacillus flagellatus
  CDS (1)..(1398): transl_table=11
atgagtcaaggtaaggttgttcaatgtattggtgccgtggttgacgtagagttcccacgtgaccagatgcccaaagtatatgacgcactgattctggatgaagattcacccacagtggaagcgggcctgaccctggaagtgcaacagcaattaggcgatggcgtggtacgtaccattgccatgggctccagcgatggcttgtcccgcggcatgaaggtaaagaacaccggcagtcagattcaagttcccgtaggtcatggcacactgggccgtatcatggacgtactgggtcgccctattgatgaggctggccctatcgaggctgacgaaaagcgttccatccatcagaaggcaccgaccttcgaagagctctctccttccgttgacctgttggaaaccggcatcaaggtgattgacctggtctgtccgtttgcaaagggtggtaaggttggcctgttcggtggcgcgggtgtgggcaagaccgtgaacatgatggaactgatcaataacatcgccaagcagcacagcggtttgtccgtattcgccggtgtaggtgagcgtactcgtgaaggtaacgacttctaccatgaaatgaaggactccaacgttctggacaaggtaggcatggtgttcggtcaaatgaacgaacctccaggcaaccgcctgcgggtagcgttgaccggcctgaccatggctgaacggttccgcgacgaaggccgtgacatcctgttcttcgttgacaacatctatcgttataccctggcaggtaccgaagtatccgcattgctgggccgtatgccttcggccgtgggttatcagcctaccctggcggaagaaatgggccgcctgcaggaacgtattacttccaccaaggtgggttccatcacttccattcaggccgtttacgtgcctgcggatgacttgaccgacccatccccagccaccacgttcttgcacttggactctaccgtcgtgctgtcgcgtgacatcgcagcattgggtatctaccctgctgttgacccattggattccacttcccgtcagctggatccgcaaatcgtcggcgaagagcattacagtgtggcgcgcgcagtacaatccacattgcagcgctataaggaattgcgtgacattatcgcgattctgggcatggacgaactgtctccagaagacaagctcgctgtggcccgtgcgcgtaagatccagcgcttcctgtcccagcctttccacgtggctgaagtctttactggtgcgcccggcaagtatgtgccactgaaggacaccatcaagggcttcaaggccatcgtcaacggtgaatacgatcacctgccggaacaagcgttctacatggtaggctcgatcgaagaagcggttgagaaggccaagaccctcaactaa

SEQ ID NO: 43637 - protein, 465 aa, Methylobacillus flagellatus
MSQGKVVQCIGAVVDVEFPRDQMPKVYDALILDEDSPTVEAGLTLEVQQQLGDGVVRTIAMGSSDGLSRGMKVKNTGSQIQVPVGHGTLGRIMDVLGRPIDEAGPIEADEKRSIHQKAPTFEELSPSVDLLETGIKVIDLVCPFAKGGKVGLFGGAGVGKTVNMMELINNIAKQHSGLSVFAGVGERTREGNDFYHEMKDSNVLDKVGMVFGQMNEPPGNRLRVALTGLTMAERFRDEGRDILFFVDNIYRYTLAGTEVSALLGRMPSAVGYQPTLAEEMGRLQERITSTKVGSITSIQAVYVPADDLTDPSPATTFLHLDSTVVLSRDIAALGIYPAVDPLDSTSRQLDPQIVGEEHYSVARAVQSTLQRYKELRDIIAILGMDELSPEDKLAVARARKIQRFLSQPFHVAEVFTGAPGKYVPLKDTIKGFKAIVNGEYDHLPEQAFYMVGSIEEAVEKAKTLN

SEQ ID NO: 43638 - DNA, 1497 bp, Morus indica
  CDS (1)..(1497)
atgagaataaatcctactacttctagtcctggggttcccgcgcttgaaaaaaaaaacctggggcgtattgctcaaatcattggtccggtactagatgtagcttttccgccgggcaagatgcctaatatttacaacgctctggtagttaagggtcgagatactgttggtcaacaaattaatgtgacttgtgaagtacagcaattattaggaaataatcgagttagagctgtagctatgagtgctacagatggtctaatgagaggaatggaagtgattgacacaggagctcctttaagtgttccagtcggcggagcgacgctaggacgaattttcaacgtgcttggagagcccattgataatttaggtcctgtagatactcgcacaacatctcctattcatagatctgcgcctgcctttatacaattagatacaaaattatctatttttgaaacaggaattaaagtagtagatcttttagccccttatcgccgtggaggaaaaataggactattcgggggggctggagtaggtaaaactgtactcattatggaattgatcaacaacattgccaaagctcatggaggtgtatccgtatttggcggagtaggtgagcgtacccgtgaaggaaatgatctttacatggaaatgaaagaatccggcgtaattaatgaacaaaatattgcagaatcaaaagtggctctagtctacggtcagatgaatgaaccgccgggggctcgtatgagagttggtttaactgccctaactatggcggagtattttagagatgttaatgaacaagacgtacttctatttatcgacaatatctttcgttttgtccaagcgggatccgaagtatccgccttattgggtagaatgccttctgctgtgggttatcaacccactcttagtaccgaaatgggttctttacaagaaagaattacttctaccaaagaggggtccataacttctattcaagcagtttatgtacctgcggacgatttgaccgatccagctccggccacgacatttgcacatttagatgctactaccgtactatcaagaggattggccgccaaaggcatctatccagcagtagatcctttagattcaacgtcaactatgctccaacctcggattgttggtgaagaacattatgaaactgcgcaaagagttagacaaactttacaacgttacaaagaacttcaggacattatagctatccttgggttggacgaattatccgaagaagatcgcttaaccgtagcaagagcacgaaaaattgagcgtttcctgtcacaacctttttttgtagcagaagtatttaccggttccccagggaaatatgttggtctagcagaaacaattagagggtttaaattgatcctttctggagaattagatggtcttcctgaacaggctttttatttggtaggtaacatcgatgaagctaccgcgaaggctatgaacttagaaatggagaacaaattgaagaaatga

SEQ ID NO: 43639 - protein, 498 aa, Morus indica
MRINPTTSSPGVPALEKKNLGRIAQIIGPVLDVAFPPGKMPNIYNALVVKGRDTVGQQINVTCEVQQLLGNNRVRAVAMSATDGLMRGMEVIDTGAPLSVPVGGATLGRIFNVLGEPIDNLGPVDTRTTSPIHRSAPAFIQLDTKLSIFETGIKVVDLLAPYRRGGKIGLFGGAGVGKTVLIMELINNIAKAHGGVSVFGGVGERTREGNDLYMEMKESGVINEQNIAESKVALVYGQMNEPPGARMRVGLTALTMAEYFRDVNEQDVLLFIDNIFRFVQAGSEVSALLGRMPSAVGYQPTLSTEMGSLQERITSTKEGSITSIQAVYVPADDLTDPAPATTFAHLDATTVLSRGLAAKGIYPAVDPLDSTSTMLQPRIVGEEHYETAQRVRQTLQRYKELQDIIAILGLDELSEEDRLTVARARKIERFLSQPFFVAEVFTGSPGKYVGLAETIRGFKLILSGELDGLPEQAFYLVGNIDEATAKAMNLEMENKLKK

SEQ ID NO: 43640 - DNA, 1416 bp, Mycoplasma gallisepticum
  CDS (1)..(1416): transl_table=4
atgaatacaaaatatagttatggtaaggtttaccaagtagttggtccagttgtggatgttgtttttgaaaaacaagatgacctacctaagatctatgattgtttaatcatcgatgaaccaaatatgaaacttcatctagaagttgctcagttaattggtgatgatattgcaagatgtattgcgatgggtcctactgaagggttagctagaaatgtgaaagtaacttcaactaaccaaccgatttcagtacctgtagggactgaagtattaggccggatgtttaatgtgatcggtgaaccgatcgatgagaaaaaaccgatcgatgcatcagtaaaaagaatgtcaattcaccgacctgctccgagttttgctgaccaatctaacgagttagagatctttgaaaccgggatcaaagtgatcgatcttttaatcccttatgcaaaaggtggtaagatcggtctatttggtggtgctggtgttggtaaaacggtattagtacaagaattaatccataatattgcaactggtcacggtggtttatctgtctttgctggtgttggtgaaagaactcgtgaaggaaacgatctttattatgaaatgatcgaaggtggggtgattgataagaccgcattagtttttggtcagatgaatgaacctcccggtgccagaatgcgtgtggcgcttaccggattaacgatggctgaatatttcagagatgttaataaccaagatgtcttattattcattgataatatcttcagattcacccaagctggttcagaagtatcagcactattaggtcggatgccttcagctgtaggttatcaacctactttagctgaagagatgggttcattacaagaacggattacttcaactaaatctggttcaatcacttcagttcaagcgatctatgtgcctgcagatgacttaactgaccctgcaccatcaacaacgtttacacaccttgatgctaaaacagttttagaccgtaatattgcttcactagggatctttcctgcagttaacccccttgattcaacatcaagattactggacccaagtgtagtgggaattcaacactaccaaactgctcgtaaggtacagatgatcttacaaaaattcttagaattacaagatattattgcgatccttggaattgatgaactatctgaagaagataaattaactgtttcaagagcacgtaagattagaaacttcttatcacaaccgttctttgttgctgaaaaattcagcggtaataaaggcaaatacgtaccgatcagtgaaacaataaaagggttcagtgagatcgttgaaggaaaacatgacgatcttcctgaacaagcattcttctatgttggttcgatcgatgaagcaatcgaaagagctaaaacattaacacgtaatggttaa

SEQ ID NO: 43641 - protein, 471 aa, Mycoplasma gallisepticum
MNTKYSYGKVYQVVGPVVDVVFEKQDDLPKIYDCLIIDEPNMKLHLEVAQLIGDDIARCIAMGPTEGLARNVKVTSTNQPISVPVGTEVLGRMFNVIGEPIDEKKPIDASVKRMSIHRPAPSFADQSNELEIFETGIKVIDLLIPYAKGGKIGLFGGAGVGKTVLVQELIHNIATGHGGLSVFAGVGERTREGNDLYYEMIEGGVIDKTALVFGQMNEPPGARMRVALTGLTMAEYFRDVNNQDVLLFIDNIFRFTQAGSEVSALLGRMPSAVGYQPTLAEEMGSLQERITSTKSGSITSVQAIYVPADDLTDPAPSTTFTHLDAKTVLDRNIASLGIFPAVNPLDSTSRLLDPSVVGIQHYQTARKVQMILQKFLELQDIIAILGIDELSEEDKLTVSRARKIRNFLSQPFFVAEKFSGNKGKYVPISETIKGFSEIVEGKHDDLPEQAFFYVGSIDEAIERAKTLTRNG

SEQ ID NO: 43642 - DNA, 1446 bp, Myxococcus xanthus
  CDS (1)..(1446): transl_table=11
atgagcgctcaagttccgacggcaggcagaatcatccaggtcctcggccccgtggtcgacgtcgagttcccgcccggcggtctccccgaggtctacacggccctcaaggtcaccaacgcgaacctgagcgccgccgctgacaacctcaccctcgaggtggcgcagcacctgggcgagaacaccgtccgcaccatcgccatggactccacggagggcctgggccgcggcatggccgtcacgaacacgggcgcccccatccaggtgccggtgggcaaggccaccctgggccgcatcctgaacgtcaccggtgagccggtggacgagatgggccccgtgaaggcgcaggagtactggtccatccaccgcgcgccgccgcccttcacggagcaggacgtgcgcgtgcagatgttcgagacgggcatcaaggtcatcgacctgctcgccccgtacacccgcggtggcaagattggcctcttcggcggcgccggcgtgggcaagacggtgctcctgcaggagctcatccgcaacgtggccgtggagcgcggtggcttctcggtgttcgccggcgttggtgagcgcacccgcgagggcaacgacctctaccacgagatgcaggacacgaaggtcatccagacggacaacctggaggccagccaggccgtgctggtgtacggccagatgaacgagccgcccggcgcccgcgcccgcgtggccctgtccgcgctgaccatggccgagtacttccgcgacgtggaaggccgcgacgtgctcctcttcgtggacaacatcttccgcttcacccaggccggctccgaagtgtccgccctcctgggccgcatccccagcgccgtgggttaccagcccacgctggccacggagatgggcggtctgcaggagcgcatcacctccaccacgaagggttccatcacctccgtgcaggccatctacgtccccgccgacgacctcacggacccggcgcccgcgacggccttcgcccacctcgacgcgacgacggtgctcaaccgctccatcgccgagctcgccatcttccccgccgtggacccgctggactccaccagccgcatcctggacccggccgtcatcggcgcggagcactacggcgtggcccgcaaggtccagggcatcctccagcggtacaaggagctgcaggacatcatcgccatcctcggcatggacgagctctccgaggatgacaagctggtggtggcccgcgcccgcaagattcagcgcttcctgtcgcagcccttcttcgtggccaaggtcttcacgggcaaggacggccgctacgtgaagctccaggacaccatccagggcttcaaggagatcgccgagggcaagcacgacgacatccccgagggcgccttctacatgacgggcagcatcgacgaggtggtcgagaacgcgcggaagctcgcggcgagctaa

SEQ ID NO: 43643 - protein, 481 aa, Myxococcus xanthus
MSAQVPTAGRIIQVLGPVVDVEFPPGGLPEVYTALKVTNANLSAAADNLTLEVAQHLGENTVRTIAMDSTEGLGRGMAVTNTGAPIQVPVGKATLGRILNVTGEPVDEMGPVKAQEYWSIHRAPPPFTEQDVRVQMFETGIKVIDLLAPYTRGGKIGLFGGAGVGKTVLLQELIRNVAVERGGFSVFAGVGERTREGNDLYHEMQDTKVIQTDNLEASQAVLVYGQMNEPPGARARVALSALTMAEYFRDVEGRDVLLFVDNIFRFTQAGSEVSALLGRIPSAVGYQPTLATEMGGLQERITSTTKGSITSVQAIYVPADDLTDPAPATAFAHLDATTVLNRSIAELAIFPAVDPLDSTSRILDPAVIGAEHYGVARKVQGILQRYKELQDIIAILGMDELSEDDKLVVARARKIQRFLSQPFFVAKVFTGKDGRYVKLQDTIQGFKEIAEGKHDDIPEGAFYMTGSIDEVVENARKLAAS

SEQ ID NO: 43644 - DNA, 1425 bp, Neorickettsia sennetsu
  CDS (1)..(1425): transl_table=11
atgccagtaagtataggaaaaatagttcgagtcgttggtccgacagttgatgtaaagttcgaagacggcacattgccaaaaatagagaatgctcttacctgtgacaataatggaaagatcctatacttagaagttgcacagcaattgggagatggaatagtccgcgctgtagcaatggattcgacggatggtttgacaagagataaagtcgttaaagatactgggaaaccgatctgtgtgccagtcggtagacagactcttgggcgaatctttaatgtagttggggaaatcatagatggtggtggccctgtaccagaacctaataaagtttcttcgatatatgcagagcctcctaggtttgatatgcagagtacctcctctgaaattttggagacggggatcaaagtaatcgacctacttgcaccctattccaagggaggtaaggttggtctctttggtggtgcaggagttggaaagactgtccttattatggaacttatcaacaatatcgctaaggcctatggaggtttctcagtctttgcaggtgttggtgagcgaaccagagaggggaatgatctttacagcgaaatggttgagtctggggtgatcgacaaggaacatcctgagaaatctaaggttgtcctggtttatggtcagatgaacgagcctcctggtgcacgtgcgaaggttgctatgagtgctcttaccatggctgaatattttcgtgacaaagaggggcaggatgtgcttttctttgtggataatatctttagattcactcaagcgggcgcagaactttctactttgttgggaagaatcccgtcggcggtaggctatcagccaacccttgcaacggatatgggaaggcttcaggagcgtattacctccactaaaaacggttctattacttctgttcaggcaatatatgttcctgctgatgacattaccgacccggctccggctacctcttttgctcacctagattctacaactgttctgtcaagacaagttgctgaagccggtatatatcctgcagttgatgcgcttgcttctagtgcacagattctttctccggaagtgttaggtcaagaacattacgaagttgcacaaaaggtgaagggaattcttcaaagttataaatcccttcaagatatcattgcgattttgggcatggaagagctttctgaggaagataagcttacggtttatagggcaagaaaaattgagaaatttttatctcagccgtttcatgtagcagaggtctttacaggtcagccaggcaaattcgtgagccttaaagatacaatcgccggtttcaaggagttagttgagggcaaatgtgatgatatgcctgaagctgctttttatatggttggtaacatgaacgaggcgagagaaaaggccattagtctaagggagaaatag

SEQ ID NO: 43645 - protein, 474 aa, Neorickettsia sennetsu
MPVSIGKIVRVVGPTVDVKFEDGTLPKIENALTCDNNGKILYLEVAQQLGDGIVRAVAMDSTDGLTRDKVVKDTGKPICVPVGRQTLGRIFNVVGEIIDGGGPVPEPNKVSSIYAEPPRFDMQSTSSEILETGIKVIDLLAPYSKGGKVGLFGGAGVGKTVLIMELINNIAKAYGGFSVFAGVGERTREGNDLYSEMVESGVIDKEHPEKSKVVLVYGQMNEPPGARAKVAMSALTMAEYFRDKEGQDVLFFVDNIFRFTQAGAELSTLLGRIPSAVGYQPTLATDMGRLQERITSTKNGSITSVQAIYVPADDITDPAPATSFAHLDSTTVLSRQVAEAGIYPAVDALASSAQILSPEVLGQEHYEVAQKVKGILQSYKSLQDIIAILGMEELSEEDKLTVYRARKIEKFLSQPFHVAEVFTGQPGKFVSLKDTIAGFKELVEGKCDDMPEAAFYMVGNMNEAREKAISLREK

SEQ ID NO: 43646 - DNA, 1476 bp, Nephroselmis olivacea
  CDS (1)..(1476)
atgagccaagctggagtcaaaacgaaacaggctgggaaaattgttcaaattgttggtcctgttatggacgtggcattccagccaggaagtatgccaaatatttacaatgctttaatcgtcaaaggacgcaatggtgcaggtcaagaggttagtgtcgtttgtgaagtacaacaactacttggagatggacttgtacgcgctgtttcgatgagcgcaactgatggtctgatgcgtggaatggaagtaactgatactgggcgtgcactgagcgttcctgtaggcccaactacattaggccgtatctttaatgtactaggtgaacctgtcgataatatgggacctgtagggaacgaaaaaaccctcccaattcaccgtgaggcgcctgcattcgtagatcttgataccaaactatctatttttgaaacagggattaaagtagttgatcttcttgcaccatatcgccgtggtggaaaaattggtctctttggaggcgctggagttggcaaaacagttttgatcatggaactgatcaataatattgctaaagcacatggaggcgtatctgtattcggtggtgtaggtgaacgtactcgtgaggggaatgacctctacatggaaatgtgtgaatcgaaagtaattaataaagctgatgtcaaatcttccaaggttgctctagtatacggtcaaatgaatgaaccgccaggggcacgcatgcgcgtaggattaacagccttgacaatggcggaatatttccgtgatgttaataaccaagacgtcctactatttattgataacattttccgatttgtacaagctgggtcagaagtatccgcgttattaggacgtatgccgtctgctgtaggataccaaccaactcttgccacagaaatgggtggacttcaagaacgtattacatctacaaaagatggatcgattacttcgatccaagctgtatatgtaccagcagatgacttaactgaccctgctccagcaactacatttgctcacctagatgcaacgactgtattgtctcgtaacttagctgctaaaggaatttatccagcggtagatccacttgactctacttcgactatgttacaaccatggattctaggagatgatcactacgggactgcacaacgtgtgaaacaaacccttcaacgttataaagagttacaagatatcatcgccatccttggattagatgaattatcggaagaggaccgtatgatcgtagcacgtgcacgtaaaattgaacgtttcctttctcaacctttctttgttgcagaagtatttactggagctcctggaaaatatgtacctctggctgaatcgattcaaggcttcaaactgattttgtccggtgaattagatagcttaccagagtctgcattctatcttgtcggaaacattgaagaagcgattgcgaaagccgctagtattcaagccgcagcagcagctgctgccgcagcttaa

SEQ ID NO: 43647 - protein, 491 aa, Nephroselmis olivacea
MSQAGVKTKQAGKIVQIVGPVMDVAFQPGSMPNIYNALIVKGRNGAGQEVSVVCEVQQLLGDGLVRAVSMSATDGLMRGMEVTDTGRALSVPVGPTTLGRIFNVLGEPVDNMGPVGNEKTLPIHREAPAFVDLDTKLSIFETGIKVVDLLAPYRRGGKIGLFGGAGVGKTVLIMELINNIAKAHGGVSVFGGVGERTREGNDLYMEMCESKVINKADVKSSKVALVYGQMNEPPGARMRVGLTALTMAEYFRDVNNQDVLLFIDNIFRFVQAGSEVSALLGRMPSAVGYQPTLATEMGGLQERITSTKDGSITSIQAVYVPADDLTDPAPATTFAHLDATTVLSRNLAAKGIYPAVDPLDSTSTMLQPWILGDDHYGTAQRVKQTLQRYKELQDIIAILGLDELSEEDRMIVARARKIERFLSQPFFVAEVFTGAPGKYVPLAESIQGFKLILSGELDSLPESAFYLVGNIEEAIAKAASIQAAAAAAAAA

SEQ ID NO: 43648 - DNA, 1722 bp, Neurospora crassa
  CDS (31)..(1590)
ccaccatcgtcgcgcttaatcatcgtcaagatgttcaagagcggcatttccgccttcgcccggactgcccgtccctcctttgcggcggcgtcccgtcgcgccgtccgcccggctgccctcaacctccgtgcccctgccctcagcagattcgccagctccgccggtgttggtgatggcaagatctaccaggtcattggtgccgtcgtcgatgtcaagttcgataccgacaagctccctcccattctcaacgcccttgagacccagaacaatggccagaagctcgtcctcgaggtctcgcaacatctcggcgagaacgtcgtgagatgcattgccatggacggtactgagggtctcgttcgtggtgccaaggcctccgacactggtgctcccatcaccatccctgtcggccctgccacccttggccgtatcatcaacgtcactggtgaccccatcgacgagcgcggtcccatcaagaccgacaagttccgccctatccacgccgaggctcccgagttcgttgagcagtccaccactgccgagattctcgtcactggtatcaaggtcgtcgatctcctcgccccctacgctcgtggtggaaagattggtctcttcggtggtgctggtgtcggcaagaccgtcttcattcaggagctcatcaacaacatcgccaaggctcacggtggttactccgtcttcaccggtgtcggtgagcgtacccgtgagggtaacgatctgtaccacgaaatgcaggagacctccgtcattcagctcgatggtgactccaaggtcgctcttgtcttcggtcagatgaacgagccccccggagctcgtgcccgtgtcgcccttactggtcttaccattgccgagtacttccgtgatgaggagggtcaggatgtgttgctcttcattgacaacattttccgtttcacccaggccggttctgaggtgtccgctcttctcggtcgtattccctctgccgtcggttaccagcccactctcgccgtcgacatgggtcagatgcaggagcgtattaccaccaccaccaagggttccattacctccgtccaggccgtctacgtccccgctgacgatttgactgatcctgcccccgccaccactttcgcccatcttgacgccaccactgtcttgtcccgtggtatctctgagttgggtatctaccccgctgtcgatccccttgactccaagtcccgtatgctcgacccccgtattgtcggccaggagcactacgagaccgccacccgcgtccagcagatcctccaggagtacaagtccctccaggatatcattgccattcttggtatggacgaactttccgaggccgacaagctcaccgtcgagcgtgcccgtaagatccagcgtttcctcagccagcctttcactgtcgctcaggtcttcactggtatcgagggtaagctcgttgaccttaaggacaccattgcctccttcaaggctattctcgctggtgagggtgatgacctccccgagggtgccttctacatggttggcgacttcgcctctgctcgcgccaagggtgagaagattcttgctgagcttgagggccaggcttaagcgattaatgcgggagttcaaaatcgggacggaaacgatggcctgtgtatagagtaaagaaagggtttttcgggacgttcctcctatgagctgtgtatcaaatgaagttcctttttttttctctatatacct

SEQ ID NO: 43649 - protein, 519 aa, Neurospora crassa
MFKSGISAFARTARPSFAAASRRAVRPAALNLRAPALSRFASSAGVGDGKIYQVIGAVVDVKFDTDKLPPILNALETQNNGQKLVLEVSQHLGENVVRCIAMDGTEGLVRGAKASDTGAPITIPVGPATLGRIINVTGDPIDERGPIKTDKFRPIHAEAPEFVEQSTTAEILVTGIKVVDLLAPYARGGKIGLFGGAGVGKTVFIQELINNIAKAHGGYSVFTGVGERTREGNDLYHEMQETSVIQLDGDSKVALVFGQMNEPPGARARVALTGLTIAEYFRDEEGQDVLLFIDNIFRFTQAGSEVSALLGRIPSAVGYQPTLAVDMGQMQERITTTTKGSITSVQAVYVPADDLTDPAPATTFAHLDATTVLSRGISELGIYPAVDPLDSKSRMLDPRIVGQEHYETATRVQQILQEYKSLQDIIAILGMDELSEADKLTVERARKIQRFLSQPFTVAQVFTGIEGKLVDLKDTIASFKAILAGEGDDLPEGAFYMVGDFASARAKGEKILAELEGQA

SEQ ID NO: 43650 - DNA, 1500 bp, Nicotiana bigelovii
  CDS (1)..(1497)
atgcgaatcaatcctactacttctggttctggggtttccacgcttgaaaaaaaaaacccggggcgtgtcgtccaaatcatcggtccggtactagatgtagcctttcccccgggcaagatgccgaatatttataacgctctggtagttcaaggtcgagatagtgttggtcaaccaattaatgtggcttgtgaggtacagcaattattaggaaataatcgagttagggctgtagctatgagtgctacagacggtctaacgagaggaatggaagtgattgacacaggagctcctataagtgttccggtcgggggagcgactctgggacgaatttttaacgtgctcggagaacctgttgataatttagggcctgtagatactagtacaacgtctcctattcatagatctgcgcccgcctttatacagttggatacaaaattatctatttttgaaacaggaattaaagtagtagatcttttagccccttatcgccgtggaggaaaaatcggactattcgggggagctggagtgggtaaaacagtacttattatggaattgattaacaatattgctaaagctcacgggggcgtatccgtatttggcggagtgggtgaacgtactcgggaaggaaatgatctttacatggaaatgaaagaatctggagtaattaatgaagaaaatattgcagaatcaaaagtggccctagtttacggtcagatgaatgaaccgccgggagctcgtatgagagttggtttgactgccctaactatggcagaatatttccgagatgttaatgaacaagacgtacttctttttattgacaatatcttccgtttcgtccaagcaggatccgaagtatcggccttattaggtagaatgccttccgctgtgggttatcaacccaccctgagtaccgaaatgggttctttacaagaaagaattacttctaccaaagaagggtccataacctctattcaagcagtttatgtacccgcagacgatttgaccgaccctgctcctgctacgacatttgcacatttagatgctactaccgtactatcaagaggattggctgccaaaggtatttatccagcagtagatcctttagattcaacgtcaaccatgcttcaacctcggatcgttggtgaggaacattacgaaaccgcccaaagagttaagcaaactttacaacgttacaaagaacttcaggacattatagctatccttggattggacgaattatccgaagaggatcgtttactcgtagcaagagcgcgaaaaattgagcgtttcttatcacaaccctttttcgtagcagaagtatttaccggttctccagggaaatatgttggtctagcagaaacaattcgaggatttcaattgatcctttccggagaattagatggtcttcctgaacaggccttttatttggtaggtaatatcgatgaagctaccgcgaaggctatgaacttagaaatggagagcaatttgaagaaatgacct

SEQ ID NO: 43651 - protein, 498 aa, Nicotiana bigelovii
MRINPTTSGSGVSTLEKKNPGRVVQIIGPVLDVAFPPGKMPNIYNALVVQGRDSVGQPINVACEVQQLLGNNRVRAVAMSATDGLTRGMEVIDTGAPISVPVGGATLGRIFNVLGEPVDNLGPVDTSTTSPIHRSAPAFIQLDTKLSIFETGIKVVDLLAPYRRGGKIGLFGGAGVGKTVLIMELINNIAKAHGGVSVFGGVGERTREGNDLYMEMKESGVINEENIAESKVALVYGQMNEPPGARMRVGLTALTMAEYFRDVNEQDVLLFIDNIFRFVQAGSEVSALLGRMPSAVGYQPTLSTEMGSLQERITSTKEGSITSIQAVYVPADDLTDPAPATTFAHLDATTVLSRGLAAKGIYPAVDPLDSTSTMLQPRIVGEEHYETAQRVKQTLQRYKELQDIIAILGLDELSEEDRLLVARARKIERFLSQPFFVAEVFTGSPGKYVGLAETIRGFQLILSGELDGLPEQAFYLVGNIDEATAKAMNLEMESNLKK

SEQ ID NO: 43652 - DNA, 1383 bp, Nitrosomonas europaea
  CDS (1)..(1383): transl_table=11
atgagccatcaaggaaagatcgttcagtgcattggcgcagtaatcgatgtggagtttacgccgggggaaataccaaaagtatatgatgccctggtaatggaaggatcggagttgacgctggaagtgcagcaacagctcggagatggggtcgtcaggactattgctcttgggtcgtccgatggtctgcgacgtggaatgatggttactaatacccaaaaacagatttcggttcctgtaggtactaaaacacttggccgtattatggacgtccttggcagacccattgatgaaatgggagaaatcggcgcgaattccttaatgcctatccatcgggctgctcctgcttttgatgagctgtcggcatccacggagttattggaaaccgggattaaagtgatcgatttggtttgcccctttgcgaaaggaggcaagatcgggcttttcggtggtgccggtgtaggtaaaaccgtaaatatgatggagcttattcgtaatattgcaatcgagcatagtggctactcggtttttgctggcgtgggtgaaaggacacgtgagggtaatgatttctaccatgaaatgaaagactctaacgtactggataaggtagctttggtttatggccagatgaatgagccgcctggtaaccgtttacgtgtagcacttaccggtctgacgatggctgaggcatttcgtgacgaagggcgtgatgtattgttctttgtggataatatttatcgttataccttggcaggtactgaagtttccgcactgttagggcgtatgccatcagcagtagggtatcagccaacacttgcagaagaaatgggccggctgcaagaaaggattacttcttccaagacagggtcgattacatccattcaggccgtttatgttccggcggatgacttgactgacccatctcctgcaacgacattcggtcaccttgatgctacagtggtactttccagggatattgcttcactcgggatttatccggctgttgatccacttgattcgacttcgcgccagctggatcctttgattattggtgaggatcattacaataccgcacgtgaagttcagcaaacattgcagcgatataaagaattacgcgatatcattgctattttgggtatggatgagctgtcccctgaggataagttgtcagttagtcgtgcccgtaaaatacaaagatttctctctcagccattcttcgttgctgaagtctttacaggatcgccgggtaaatatgtaccattgaaagaaaccatcaagggattcaagggtattgtcagtggtgagtatgacgatattcctgaacaggctttctacatggtaggtggtattgaggaagtgcttgagaaagccaaatcaattcaataa

SEQ ID NO: 43653 - protein, 460 aa, Nitrosomonas europaea
MSHQGKIVQCIGAVIDVEFTPGEIPKVYDALVMEGSELTLEVQQQLGDGVVRTIALGSSDGLRRGMMVTNTQKQISVPVGTKTLGRIMDVLGRPIDEMGEIGANSLMPIHRAAPAFDELSASTELLETGIKVIDLVCPFAKGGKIGLFGGAGVGKTVNMMELIRNIAIEHSGYSVFAGVGERTREGNDFYHEMKDSNVLDKVALVYGQMNEPPGNRLRVALTGLTMAEAFRDEGRDVLFFVDNIYRYTLAGTEVSALLGRMPSAVGYQPTLAEEMGRLQERITSSKTGSITSIQAVYVPADDLTDPSPATTFGHLDATVVLSRDIASLGIYPAVDPLDSTSRQLDPLIIGEDHYNTAREVQQTLQRYKELRDIIAILGMDELSPEDKLSVSRARKIQRFLSQPFFVAEVFTGSPGKYVPLKETIKGFKGIVSGEYDDIPEQAFYMVGGIEEVLEKAKSIQ

SEQ ID NO: 43654 - DNA, 1449 bp, Nocardia farcinica
  CDS (1)..(1449): transl_table=11
atgaccgcagctgtcactcaagacaacacgagccggaccggcgccgccgcaggccgcgtcgtccgggtcatcggccccgtcgtggacgtcgagttcccgcgtggcgcgattcctgagctgttcaacgctctgcacgccgacatcacgctgacctcggtggccaagacgctgaccctcgaggtcgcccagcacctcggcgacaacatcgtccgcaccatctccatgcagccgaccgacggcctggtccgcggcgcgaccgtcaccgacaccggcaagccgatctcggtgcccgtcggcgacgtcgtcaagggccacgtcttcaacgccctcggcgactgcctggacacccccggcctgggccgcgacggcgagcagtggggcatccaccgcaagccgccgagcttcgatcagctcgagggcaagaccgagctgctcgagaccggcatcaaggtcatcgacctgctgaccccgtacgtgaagggcggcaagatcggtctgttcggtggcgccggtgtcggcaagaccgttctgatccaggagatgatcacccgtatcgcgcgggagttctccggcacctcggtgttcgccggcgtcggcgagcgcacccgtgagggcaccgacctgcacctggagatggaggagatgggcgtcctccaggacaccgccctcgtcttcggccagatggacgagccgccgggcacccgtatgcgcgtggcgctgtccgcgctgacgatggcggagtacttccgcgacgtccagcaccaggacgtgctgctgttcatcgacaacatcttccggttcacccaggccggttccgaggtctcgaccctgctgggccgcatgccctcggccgtcggttaccagccgaccctggccgacgagatgggtgagctgcaggagcgcatcacctcgacccgtggccggtccatcacctcgctgcaggccatctacgtgcccgccgacgactacaccgacccggcgccggcgaccaccttcgcccacctggacgcgacgaccgagctctcccgcccgatttcgcagaagggcatctaccccgccgtcgacccgctgacctcgacctcgcgcatcctcgaggcctcgatcgtcggcgaccggcacttcgcggtggccaacgaggtgaagcggatcctgcagaagtacaaggagctgcaggacatcatcgccatcctcggcatggacgagctctccgaggaggacaaggtcctcgtcggccgcgcccgtcgcctggagaagttcctcggccagaacttcatcgtggccgagaagttcaccggtcagccgggttcggtcgtgccgctcgagcagaccatcgacgacttcgatcgcgtctgcaagggcgagttcgaccactaccccgagcaggcgttcaactcctgcggtggtctcgacgacgtcgagaaggccgccaagaagatcgccggaaagtag

SEQ ID NO: 43655 - protein, 482 aa, Nocardia farcinica
MTAAVTQDNTSRTGAAAGRVVRVIGPVVDVEFPRGAIPELFNALHADITLTSVAKTLTLEVAQHLGDNIVRTISMQPTDGLVRGATVTDTGKPISVPVGDVVKGHVFNALGDCLDTPGLGRDGEQWGIHRKPPSFDQLEGKTELLETGIKVIDLLTPYVKGGKIGLFGGAGVGKTVLIQEMITRIAREFSGTSVFAGVGERTREGTDLHLEMEEMGVLQDTALVFGQMDEPPGTRMRVALSALTMAEYFRDVQHQDVLLFIDNIFRFTQAGSEVSTLLGRMPSAVGYQPTLADEMGELQERITSTRGRSITSLQAIYVPADDYTDPAPATTFAHLDATTELSRPISQKGIYPAVDPLTSTSRILEASIVGDRHFAVANEVKRILQKYKELQDIIAILGMDELSEEDKVLVGRARRLEKFLGQNFIVAEKFTGQPGSVVPLEQTIDDFDRVCKGEFDHYPEQAFNSCGGLDDVEKAAKKIAGK

SEQ ID NO: 43656 - DNA, 1446 bp, Novosphingobium aromaticivorans
  CDS (1)..(1446): transl_table=11
atggccaccgtgctctcctctaccggcaagatcagccaggtcatcggcgccgtcgtcgacgtgaccttcgacggcgaactgcccgcgattctctcggcgctcgaaaccgacaacaacggcaaccgcctcgttctcgaagtcgcacagcacctcggcgagaacaccgttcgcaccatcgcgatggactcgaccgacggcctgacccgcggccagccggtgaccaacaccggcgcgcagatctcggtgccggtcggccccaagaccctcggccgcatcatgaacgtcatcggcgagccgatcgacgagcgtggcccggtcggcgcggaacagaccgccccgattcacgccaaggctccggaattcatcgagcagtcgaccgaagccgcgatcctcgtgaccggcatcaaggtcatcgaccttctcgctccctatgcgcgcggcggcaagatcggcctgttcggcggcgccggcgtgggcaagaccgtgctcatccaggagctgatcaacaacatcgccaagggccacggcggcgtgtcggtcttcgcgggcgtcggcgaacgcacccgtgaaggcaacgacctctatcacgagttcctcgacgccggcgttatcgccaaggacgccgacggcaacccgaccccggacggctcgaaggtcgccctcgtgttcggccagatgaacgaaccgccgggcgcccgtgctcgcgtcgcgctctcgggcctgaccatggcagaatacttccgcgaccaggaaggccaggacgttctgttcttcgtcgacaacatcttccgcttcacccaggcgggttcggaagtgtcggctctgctcggccgtattccttcggcggtgggctaccagccgacgctggccaccgacatgggccagctgcaggaacgcatcacctcgaccaccaagggctcgatcacctcggtgcaggcgatctacgtccccgcggacgaccttaccgacccggcgccggccacctcgttcgcccacttggacgcaacgaccacgctgaaccgcgcaatctcggaactcggcatctacccggcggtcgacccgctcgactcgacctcgcgcgttctcacccccgccgtcgtcggacaggagcactacgagaccgcccgccgcgttcaggaaacgctgcagaagtacaagtcgctgcaggacatcatcgcgatcctcggcatggacgagctttctgaagaagataagctcaccgtcgcccgcgcccgcaagatccagcgcttcctgtcgcagccgttccacgtcgccgaagtgttcaccggcatccccggcaagttcgtccaggtcgaagacaccgtccgctcgttcaaggcggttgtcgacggcgagtacgaccaccttccggaagccgcgttctacatggtcggcggcatcgacgaagcggtcgagaaggccaagaagctggctgccgaagcctga

SEQ ID NO: 43657 - protein, 481 aa, Novosphingobium aromaticivorans
MATVLSSTGKISQVIGAVVDVTFDGELPAILSALETDNNGNRLVLEVAQHLGENTVRTIAMDSTDGLTRGQPVTNTGAQISVPVGPKTLGRIMNVIGEPIDERGPVGAEQTAPIHAKAPEFIEQSTEAAILVTGIKVIDLLAPYARGGKIGLFGGAGVGKTVLIQELINNIAKGHGGVSVFAGVGERTREGNDLYHEFLDAGVIAKDADGNPTPDGSKVALVFGQMNEPPGARARVALSGLTMAEYFRDQEGQDVLFFVDNIFRFTQAGSEVSALLGRIPSAVGYQPTLATDMGQLQERITSTTKGSITSVQAIYVPADDLTDPAPATSFAHLDATTTLNRAISELGIYPAVDPLDSTSRVLTPAVVGQEHYETARRVQETLQKYKSLQDIIAILGMDELSEEDKLTVARARKIQRFLSQPFHVAEVFTGIPGKFVQVEDTVRSFKAVVDGEYDHLPEAAFYMVGGIDEAVEKAKKLAAEA

SEQ ID NO: 43658 - DNA, 1497 bp, Nymphaea alba
  CDS (1)..(1497)
atgagaataaatcctactacttctggtctcggagtttcaacacttgtggaaaaaaatcagggacgtatcgctcaaatcatcggtccagtactggatgtagcttttcccccggggaagatgcctaatatttacaactctttggtagttaagggtcgagataccgcaggtcaggaaattaatgtgacttgtgaggtacagcaattattaggaaataatcgagttagagctgtagctatgagtgctacagatgggctgacgagaggaatggaagtgattgacacgggagctcctctaagtgttccagtcggtggagccactctaggacgaattttcaatgttcttggagaacctgttgataatttaggtcctgtagatactcgcacaacatctcctattcatagagccgcacccgcttttacacaattagataccaaattatcaatctttgaaacgggcattaaagtggtggatcttttagcgccttatcggcgtgggggaaaaatcggactattcgggggagccggagtggggaaaacagtactcatcatggaattaatcaacaacattgccaaagctcatgggggtgtatccgtattcggcggagtaggagaacgcactcgtgaaggaaatgatctttacatggaaatgaaagaatccggggtgattaatgaagaaaatattgcagaatctaaagtagctctagtatatggacagatgaatgaaccgccgggagctcgtatgagagtcggtttgactgccctaaccatggcggaatatttccgtgatgttaatgaacaagacgtacttctatttattgacaatatctttcgcttcgttcaagcggggtcagaagtatctgccttattaggtagaatgccttccgccgtgggttatcagcctacccttagtacagaaatgggttctttgcaagaaagaatcacttctactaaagagggatctataacttccattcaagcagtttatgtacctgcggacgatttgactgatcctgctcctgccacgacatttgcacatttagatgctactaccgtactatcaagaggattagctgccaaaggtatctatccagcagtagatcctttagattcaacgtcaactatgctccaacctcggattgttggcgaagaacattacgaaactgcgcaaagagttaagcaaactttacaacgttacaaagaacttcaggacattatagctattcttggactggacgaattatccgaagaggatcgtttaaccgtagcaagagcgcgaaaaattgaacgtttcttatcacaacccttcttcgtagcagaagtatttactggttctccagggaaatatgttggtctcgcagaaacaattagggggtttcaactgatcctttccggagaattagatagttttcccgagcaggccttttatttggtaggtaatatcgatgaagctaccgcgaaggctatgaacttagaagtagagagcaaattgaagaaatga

SEQ ID NO: 43659 - protein, 498 aa, Nymphaea alba
MRINPTTSGLGVSTLVEKNQGRIAQIIGPVLDVAFPPGKMPNIYNSLVVKGRDTAGQEINVTCEVQQLLGNNRVRAVAMSATDGLTRGMEVIDTGAPLSVPVGGATLGRIFNVLGEPVDNLGPVDTRTTSPIHRAAPAFTQLDTKLSIFETGIKVVDLLAPYRRGGKIGLFGGAGVGKTVLIMELINNIAKAHGGVSVFGGVGERTREGNDLYMEMKESGVINEENIAESKVALVYGQMNEPPGARMRVGLTALTMAEYFRDVNEQDVLLFIDNIFRFVQAGSEVSALLGRMPSAVGYQPTLSTEMGSLQERITSTKEGSITSIQAVYVPADDLTDPAPATTFAHLDATTVLSRGLAAKGIYPAVDPLDSTSTMLQPRIVGEEHYETAQRVKQTLQRYKELQDIIAILGLDELSEEDRLTVARARKIERFLSQPFFVAEVFTGSPGKYVGLAETIRGFQLILSGELDSFPEQAFYLVGNIDEATAKAMNLEVESKLKK

SEQ ID NO: 43660 - DNA, 1395 bp, Oceanobacillus iheyensis
  CDS (1)..(1395): transl_table=11
atgagcaaaggacgcgttacacaattaatgggaccagtagtcgatgtacgttttgaagacgctgaactcccagcagtaaataatgctttagttgtccgtagtgacagtggtgaagaactaacactagaagtagctcttcatttaggtgacaatagtgtacgtaccatcgctatgtcttcaacagatggtttcaaacgtggtgcagaggtggaaaaccttggtcgtccaatctcagtaccagttggtgacgtaacactaggccgtgtatttaacgtattaggtgaaaaaatcgatttagacgaacctttagaagagggagttcgtcgcgatccgattcaccgtgaagcaccagactttgaaaacttatctacagaaacagaaattttagagacaggtattaaagtagttgacctgttagcaccatatatcaaaggtggtaaaattggactgtttggtggagctggtgtaggtaaaaccgtattaatccaggaattaattaataatatcgcacaagaacatggtggtatttctgtattcgcgggtgttggtgaacgtactcgtgaagggaatgacctttactatgaaatgagcgattctggagttattgctaaaacagcgatggtatttggacaaatgaacgagccacctggtgcacgtatgcgtgtagcattaactggcttaaccatggcagaatacttccgtgatgagcaaggacaggatgtattattgttcgttgataatatcttccgtttcacacaagcaggttctgaggtatccgcactacttggtcgtatgccatcagcggtaggttatcaacctactctagctacagaaatgggacaattacaagagcgtattacatctacagacaaaggttctgtaacatctattcaagcaatttatgtaccagcggatgactatacggatccggcgcctgctacaacatttgctcacttagatgcaacaacaaaccttgatcgtaaattatctgagcaaggtatctaccctgcggtggatcctttagagtctacctcacgtgcactcgatccagaagtagttggaaaagagcactatgaagtagcaactgaggtacagcaaacactacaaaaatatcgtgaacttcaagatattatcgcaatattaggtatggatgagttaagtgatgaagataaattagtcgttgctcgtgcgcgtcgaattcagttcttcctatcacaaaacttccacgtagcggagcaatttactggacaacctggatcttatgttcctgttcaagagactgtaaaaggatttaaagagattcttgaaggtaaatatgacgatcttccagaggatgctttccgtctagttggacgtattgaagaagtagtagaaaaagcaaaaggaatggaataa

SEQ ID NO: 43661 - protein, 464 aa, Oceanobacillus iheyensis
MSKGRVTQLMGPVVDVRFEDAELPAVNNALVVRSDSGEELTLEVALHLGDNSVRTIAMSSTDGFKRGAEVENLGRPISVPVGDVTLGRVFNVLGEKIDLDEPLEEGVRRDPIHREAPDFENLSTETEILETGIKVVDLLAPYIKGGKIGLFGGAGVGKTVLIQELINNIAQEHGGISVFAGVGERTREGNDLYYEMSDSGVIAKTAMVFGQMNEPPGARMRVALTGLTMAEYFRDEQGQDVLLFVDNIFRFTQAGSEVSALLGRMPSAVGYQPTLATEMGQLQERITSTDKGSVTSIQAIYVPADDYTDPAPATTFAHLDATTNLDRKLSEQGIYPAVDPLESTSRALDPEVVGKEHYEVATEVQQTLQKYRELQDIIAILGMDELSDEDKLVVARARRIQFFLSQNFHVAEQFTGQPGSYVPVQETVKGFKEILEGKYDDLPEDAFRLVGRIEEVVEKAKGME

SEQ ID NO: 43662 - DNA, 1446 bp, Oltmannsiellopsis viridis
  CDS (1)..(1446)
atgaacgtttctgtagaagcaaaaaacattggtaaagtagtacaaattattggaccggttcttgacgttgaattctcagcggatcaaatgccaaacatttacaacgcaattgttgttgaaggtgaaaacttagcaggtacaaaagtttctgttacttgtgaagttcaacaattattaggtgaccactgtgttcgtgccgtttctatgagtgctacagatggtttaatgcgtggtatggacgtagtagacactggtgcgccattaactgttccagttggtacaagtacattaggtcgtattttcaatgttttaggtgagcctgttgacaacttaggtgacgtttcaaatgaaggtggtttaccaattcaccgtcccgctccattatttgttgatcttgacacacaactttcaatttttaaaacaggtattaaggttgtagaccttttagctccataccgtcgtggtggtaaaattggtttatttggtggtgccggtgtaggtaaaactgttctaattatggaacttatcaacaacattgcaaaagcacacggtggtgtttctgtatttggtggtgtaggtgaacgtactcgtgaaggtaatgacctttacgctgaaatgaaagaatctaaagttattaacgaagataacttatcagaatctaaagtagccttagtatacggtcaaatgaacgaaccacctggtgctcgtatgcgtgtaggtttaacagctttaacaatggctgaatacttccgtgacattaataaacaagacgttttattattcattgataacattttccgtttcgtacaagcgggttctgaagtatctgcacttcttggtcgtatgccatctgctgtaggttaccaaccaacattagcaactgaaatgggtggtttacaagaacgtattacttctactaaggacggttcaattacgtcaattcaagctgtttacgtaccagcagatgacttaactgacccagcgccagcaacaacattcgctcacttagacgctactactgtactttcacgtaacttagcagcgaaaggtatttaccctgctgtagaccctcttgacagtacaagtactatgcttcaaccacaaactttaggtgaagaacactacggttgtgctcaagcagttaaaacaactcttcaacgttacaaagaattacaagatattattgcaattcttggtttagatgaattatctgatgaagaccgtttagttgtagcacgtgctcgtaaaattgaacgtttcttatcacaaccattcttcgttgctgaagtattcactggttctccaggtaaatacgtaagcttaagtgaaactatccaaggtttctcacaaattcttactggtgaattagatgacttaccagaacaaagtttctacttagtaggtaaccttgacgaagctattgctaaagcagcaactttaggttaa

SEQ ID NO: 43663 - protein, 481 aa, Oltmannsiellopsis viridis
MNVSVEAKNIGKVVQIIGPVLDVEFSADQMPNIYNAIVVEGENLAGTKVSVTCEVQQLLGDHCVRAVSMSATDGLMRGMDVVDTGAPLTVPVGTSTLGRIFNVLGEPVDNLGDVSNEGGLPIHRPAPLFVDLDTQLSIFKTGIKVVDLLAPYRRGGKIGLFGGAGVGKTVLIMELINNIAKAHGGVSVFGGVGERTREGNDLYAEMKESKVINEDNLSESKVALVYGQMNEPPGARMRVGLTALTMAEYFRDINKQDVLLFIDNIFRFVQAGSEVSALLGRMPSAVGYQPTLATEMGGLQERITSTKDGSITSIQAVYVPADDLTDPAPATTFAHLDATTVLSRNLAAKGIYPAVDPLDSTSTMLQPQTLGEEHYGCAQAVKTTLQRYKELQDIIAILGLDELSDEDRLVVARARKIERFLSQPFFVAEVFTGSPGKYVSLSETIQGFSQILTGELDDLPEQSFYLVGNLDEAIAKAATLG

SEQ ID NO: 43664 - DNA, 1497 bp, Oryza nivara
  CDS (1)..(1497)
atgagaaccaatcctactacttctcgtcccggggtttctacaattgaagaaaaaagtacagggcggatcgatcaaattattggacccgtgctggatgtcacttttcccccgggcaagttaccttatatttataatgctttggtagtcaagagtcgagacactgacggtaagcaaattaatgtaacttgtgaggtacaacaattattaggaaataatcgagttagagctgtagctatgagtgctacagatgggttgatgagaggaatggaagtgattgacacgggagctcctctcagtgttcctgtcggtggagctactcttggacgaattttcaacgttcttggggagcctgttgacaatttgggtcctgtagatactagtgcaacattccctattcatagatccgcgcccgcctttatcgagttagatacgaaattatccatctttgaaactggtattaaggtggtcgatcttttagctccttatcggcgtggaggaaaaatcggactatttgggggagctggagtaggtaaaacagtactcatcatggaattaatcaacaatattgctaaagctcacgggggcgtatccgtatttggcggagtaggggaacggactcgtgaaggaaatgatctttatatggaaatgaaggaatctggagtaattaatgaaaaaaatcttgaggaatcaaaggtagctctagtctatggccaaatgaatgaaccgccaggagctcgtatgagagttggtttgactgccctaactatggcagaatatttccgagatgttaataagcaagacgtgcttctattcatcgataatatctttcgttttgttcaagcaggatcggaggtatctgccttattagggagaatgccctctgcagtgggttatcaacctactcttagtacagaaatgggttctttgcaagaaagaattacttctactaaaaagggatctataacttcgatccaagcggtttatgtacctgcggacgatttgaccgaccctgctcctgctacaacatttgcacatttggatgctactaccgtactttccagaggattagcttccaaagggatttatcctgcagtagatcctttagattcaacctcaactatgttacaacctcggatcgttggcaacgaacattatgaaactgcgcaaagagttaagcaaactttacaacgttacaaagaacttcaggacattatcgcaattcttgggttggatgaattatcggaggaggatcgtttaactgtagcaagagcacgaaaaattgagcgcttcttatcacaaccgttttttgtggcagaagtttttaccggttctccgggaaagtatgttggtcttgcagaaactattaggggatttcaactaatcctttccggagaattagacggcctacccgaacaggctttttatttggtgggtaacatcgatgaagctagcacgaaagctataaacttagaagaggagaacaaattgaagaaatga

SEQ ID NO: 43665 - protein, 498 aa, Oryza nivara
MRTNPTTSRPGVSTIEEKSTGRIDQIIGPVLDVTFPPGKLPYIYNALVVKSRDTDGKQINVTCEVQQLLGNNRVRAVAMSATDGLMRGMEVIDTGAPLSVPVGGATLGRIFNVLGEPVDNLGPVDTSATFPIHRSAPAFIELDTKLSIFETGIKVVDLLAPYRRGGKIGLFGGAGVGKTVLIMELINNIAKAHGGVSVFGGVGERTREGNDLYMEMKESGVINEKNLEESKVALVYGQMNEPPGARMRVGLTALTMAEYFRDVNKQDVLLFIDNIFRFVQAGSEVSALLGRMPSAVGYQPTLSTEMGSLQERITSTKKGSITSIQAVYVPADDLTDPAPATTFAHLDATTVLSRGLASKGIYPAVDPLDSTSTMLQPRIVGNEHYETAQRVKQTLQRYKELQDIIAILGLDELSEEDRLTVARARKIERFLSQPFFVAEVFTGSPGKYVGLAETIRGFQLILSGELDGLPEQAFYLVGNIDEASTKAINLEEENKLKK

SEQ ID NO: 43666 - DNA, 1374 bp, Pasteurella multocida
  CDS (1)..(1374): transl_table=11
atggcaactggaaaaattgtacaaatcatcggtgcggttattgacgttgaattcccacaagatgcagtaccaaaagtatatgatgccttaaatgttgaaacaggtttagtgcttgaagttcaacaacaattaggtggtggtgtagttcgctgtatcgcaatgggatcatctgatggattaaaacgcggtttaagcgtaacaaatacgaataacccaatttctgttccagtgggaacgaaaacattgggtcgtatcatgaacgtattgggtgaaccaatcgatgagcaaggtgaaatcggtgcagaagagaattggtctattcaccgtgcgccaccaagttatgaagaacaatctaacagtactgaacttttagaaacgggaattaaagttatcgacttagtttgtccgtttgcgaaagggggtaaagtaggtttattcggtggtgcgggtgttggtaaaaccgtcaatatgatggaattaatccgtaacatcgcaattgagcactcaggttactctgtctttgcgggggtaggtgagcgtacgcgtgaaggtaacgacttctatcatgagatgaaagactctaacgtattagataaagtgtctcttgtttatggtcaaatgaacgagccaccaggtaaccgtttacgtgtggcattaacaggcttaaccatggcggaaaaattccgtgatgaaggtcgtgatgtcttattcttcgttgataatatttatcgttatacccttgctggtacagaagtttctgcattattaggtcgtatgccatctgcggtaggttatcaaccaacccttgcagaagaaatgggtgttctgcaagagcgtattacctcaaccaaaacaggttctattacttctgttcaagccgtttacgtgcctgccgatgacttaactgacccatcgccagcaaccacgtttgcgcacttagactcaacagttgtattaagccgtcaaatcgcgtcattaggtatttatcctgcagtggatccattagaatcaacttctcgtcagttagatccattagtcgtgggtgaagaacactacaacgttgcacgtggtgtacaaacaaccttacaacgttataaagaattgaaagatattattgcaattcttggtatggatgagttatctgaagaagataaattagtggttgcacgtgcacgtaagatcgaacgtttcttatcacaaccgttcttcgttgcggaagtatttaatggtacgccaggtaaatatgttccattaaaagaaacaattcgtggctttaaaggtattttagacggtgaatatgaccatatcccagaacaagcgttctatatggcgggtaccatcgacgaagtattagaaaaagcgaaaaaattgtaa

SEQ ID NO: 43667 - protein, 457 aa, Pasteurella multocida
MATGKIVQIIGAVIDVEFPQDAVPKVYDALNVETGLVLEVQQQLGGGVVRCIAMGSSDGLKRGLSVTNTNNPISVPVGTKTLGRIMNVLGEPIDEQGEIGAEENWSIHRAPPSYEEQSNSTELLETGIKVIDLVCPFAKGGKVGLFGGAGVGKTVNMMELIRNIAIEHSGYSVFAGVGERTREGNDFYHEMKDSNVLDKVSLVYGQMNEPPGNRLRVALTGLTMAEKFRDEGRDVLFFVDNIYRYTLAGTEVSALLGRMPSAVGYQPTLAEEMGVLQERITSTKTGSITSVQAVYVPADDLTDPSPATTFAHLDSTVVLSRQIASLGIYPAVDPLESTSRQLDPLVVGEEHYNVARGVQTTLQRYKELKDIIAILGMDELSEEDKLVVARARKIERFLSQPFFVAEVFNGTPGKYVPLKETIRGFKGILDGEYDHIPEQAFYMAGTIDEVLEKAKKL

SEQ ID NO: 43668 - DNA, 1485 bp, Physcomitrella patens
  CDS (1)..(1485)
atgaaaaatgattcccgtacttttggagcttcaacagttctaactaaaactcaaaatataggacgtattagtcaaattattggtcctgtattagacgttacttttcctcctggtaaaatgcctaatatctataattctttaatagttaaaggtcaaaatacagcaggtcaagaaattaacgttacgtgtgaagtacaacaattattaggaaataataaagttcgagctgtagcaatgagtgcgacagatggcttgatgagaggaatggatgttgttgatacaggagctgctttaagtgttccagttggtgaagctactcttggacgtatttttaatgttttaggagaacctgttgataacctgggtcctgtagatgctagtacaacttttcctattcatagatctgctcctgcttttacacaattagatactaaattatccatttttgaaacaggaattaaagtggtagatcttttagctccatatcgacgtggtggaaaaattggattatttggaggagctggagtagggaaaaccgtacttatcatggaattaattaataacattgctaaagcgcacggtggtgtatctgtatttggtggagtaggagaacgtactcgtgaagggaatgacctttacatggaaatgaaagaatccaaagttattaatgaagaaaatatttcagaatcaaaagtagcactagtttatggtcaaatgaatgagccgcctggagctcgtatgagagtagggttaactgctttaacaatggctgaatattttagagatgttaataaacaagatgtacttttatttattgataatattttccgttttgttcaagccggttcagaagtttctgctttattaggtagaatgccatctgctgtaggttatcagccaacgttaagtacagaaatgggtactttacaagaaagaattacttcaacaaaagaaggatctattacgtcaattcaagctgtttatgtacctgcagatgacttaactgacccagctcctgctacaacctttgcacatttagatgcaactaccgtattatccagagggctagcagcgaaaggtatctatccagcagtagatcctttagattcaacttctactatgcttcaaccttggattgtaggtgaagagcattatgaaacagctcaaggagtaaaagaaacattacaacgctataaagaattacaagatattattgctattcttggccttgatgaattgtcagaagaagatagattggttgtagcaagagcaagaaaaatcgaacgtttcttatctcaaccattttttgtagcagaagtatctacaggttctccaggaaaatatgttagtctagctgaaaccatcaaaggttttcaaatgattctttctggagaattagactctttccctgagcaagctttttatttagttggtaatattgacgaggctacagccaaagcagcaaatctacaaatggagaattaa

SEQ ID NO: 43669 - protein, 494 aa, Physcomitrella patens
MKNDSRTFGASTVLTKTQNIGRISQIIGPVLDVTFPPGKMPNIYNSLIVKGQNTAGQEINVTCEVQQLLGNNKVRAVAMSATDGLMRGMDVVDTGAALSVPVGEATLGRIFNVLGEPVDNLGPVDASTTFPIHRSAPAFTQLDTKLSIFETGIKVVDLLAPYRRGGKIGLFGGAGVGKTVLIMELINNIAKAHGGVSVFGGVGERTREGNDLYMEMKESKVINEENISESKVALVYGQMNEPPGARMRVGLTALTMAEYFRDVNKQDVLLFIDNIFRFVQAGSEVSALLGRMPSAVGYQPTLSTEMGTLQERITSTKEGSITSIQAVYVPADDLTDPAPATTFAHLDATTVLSRGLAAKGIYPAVDPLDSTSTMLQPWIVGEEHYETAQGVKETLQRYKELQDIIAILGLDELSEEDRLVVARARKIERFLSQPFFVAEVSTGSPGKYVSLAETIKGFQMILSGELDSFPEQAFYLVGNIDEATAKAANLQMEN

SEQ ID NO: 43670 - DNA, 1497 bp, Populus alba
  CDS (1)..(1497)
atgagaatcaatcctactacttctggtcctggagtttccgcgcttgaaaaaaagaacctgggacatatcgctcaaatcattggcccagtgctagatgtagtttttcccccgggcaagatgcctaatatttacaacgctctggtagttaagggtcgagatactgtcagtcaacaaattaatgtcacttgtgaagtacagcaattattaggaaataatcgagttcgagctgtagctatgagtgctacagatggtctaatgagaggaatggaagtgattgacacgggagctcccctaagtgttccagtcggcggggcgactctaggacgaattttcaacgtgcttggagaacctgttgatgatttaggtcctgtagatactgggacaacatcccctattcatagatctgcgcctgcctttatacagttagatacaaaattatctatttttgaaacaggaattaaagtcgtagatcttttagccccttatcgccgtggaggaaaaatcggactatttgggggcgctggagtaggtaaaacagtactaattatggaattaatcaacaacattgcgaaagctcatgggggtgtatccgtatttggcggagtaggtgaacgtactcgtgaaggaaacgatctttacatggaaatgaaagaatccggagtaattaatgaagaaaatattgcagaatcaaaagtggctctagtttatggtcagatgaacgaaccaccgggagctcgtatgagagttggtttgactgccctaactatggcggaatatttccgagatgttaatgaacaagacgtacttctatttatcgacaatatctttcgtttcgtccaagcaggatccgaagtatccgccttattgggtagaatgccctctgctgtgggttatcaacccacccttagtaccgaaatgggtactttacaagaaagaattacttctaccaaagaagggtccataacttctattcaagcagtttatgtacctgcggacgatttaaccgaccctgctcctgccacgacatttgcgcatttagatgctactactgtactatcaagaggattagctgctaaaggtatctatccagcagtcgaccctttagattcaacatcaactatgctccaacctcagatcgttggtgaggaacattatgaaactgcgcaaagagttaagcaaactttacaacgttacaaagaacttcaagacattatagctatccttgggttggacgaattatccgaagaggatcgcttaactgtagcaagagcacgaaaaattgagcgtttcttatcacaaccctttttcgtagccgaagtatttaccggttccccgggaaaatatgtcggtctagcagaaacaattagagggtttaaattgatcctttccggagaattagatagtcttcctgagcaggccttttatttggtaggtaacattgatgaagctactgcgaaggctacgaacttagaaatggagaacaacttgaagaaatga

SEQ ID NO: 43671 - protein, 498 aa, Populus alba
MRINPTTSGPGVSALEKKNLGHIAQIIGPVLDVVFPPGKMPNIYNALVVKGRDTVSQQINVTCEVQQLLGNNRVRAVAMSATDGLMRGMEVIDTGAPLSVPVGGATLGRIFNVLGEPVDDLGPVDTGTTSPIHRSAPAFIQLDTKLSIFETGIKVVDLLAPYRRGGKIGLFGGAGVGKTVLIMELINNIAKAHGGVSVFGGVGERTREGNDLYMEMKESGVINEENIAESKVALVYGQMNEPPGARMRVGLTALTMAEYFRDVNEQDVLLFIDNIFRFVQAGSEVSALLGRMPSAVGYQPTLSTEMGTLQERITSTKEGSITSIQAVYVPADDLTDPAPATTFAHLDATTVLSRGLAAKGIYPAVDPLDSTSTMLQPQIVGEEHYETAQRVKQTLQRYKELQDIIAILGLDELSEEDRLTVARARKIERFLSQPFFVAEVFTGSPGKYVGLAETIRGFKLILSGELDSLPEQAFYLVGNIDEATAKATNLEMENNLKK

SEQ ID NO: 43672 - DNA, 1455 bp, Propionibacterium acnes
  CDS (1)..(1455): transl_table=11
atgactgcgacaacaattacccccgagacgaaggacgaggtggtcggcgttgggcgagtcgtccgcgttatcggccccgtcgtcgacgtcgagtttccggccggtcagctgccggagattctcaacgccctgcacgtcgatgctgaggtgatgggagagactcatgccatcaccctcgaggtggccttgcacattggcgagaatgtcgtgcgagccatctccctcaaaccgactgacggtatgcgccgcggcactgaggtgcgcgacaccggtgccccgattagcgtgccagtgggtgacgtcactaagggtcacgtctggaatgtgacaggtgacgttcttaacgccgatccctccacaatcgaggtgactgagcgttggccgatccaccgggatcccccggccttcgatgaccttgagcccgagaccgagatgctggagaccggtattaaggtccttgacttgctgactccttacgtcaagggcggcaagattggcctctttggcggcgctggtgtgggtaagacggtgctcattcaggagatgatttaccgtatcgcccacaacttcggcggtacctcggttttcgccggtgtcggtgaacgtacccgtgagggtaacgacctcatcaacgagatggacgaggccggtgtgctcaaggacaccgctctggtattcggccagatggacgagcccccgggcacgcgtttgcgcatcgctttgaccggtttgacgatggctgagtacttccgcgatgttcagaaccaggacgtgctgttgttcatcgacaacatcttccggttctcccaggctggttctgaggtttcaaccctgctaggtcgtatgccctcggcggtgggctaccagcccaacttggccgacgagatgggccaattgcaggagcgaatcacctcgacccgtggccactccatcacctcgatgcaggccgtctacgtccccgctgacgattacaccgacccggctccggcgacgaccttcgcccatctggatgccaccacggagctttctcgtgagattgcctctcgtggcctgtacccggctgtggacccactgacgtcgacctctcgtatcctcgacccgctgtacgtaggccaggagcattacgacaccgctactcaggtcaaacagattctgcagcgcaacaaggagcttcaggacatcatcgctattctcggtgtggatgagctgagcgaagaggacaaggtcactgtggcgagggcccgccgcatccagcagttcctgtcccagaacacgtacactgccgagaaattcactggcgtcgctggatcgacggttccgattgccgacacagttgagggattccagatgatctgccgtggcgacgttgaccacattcccgagcaggccttcttcaacgttggcagcatggacatggtgatggagaactgggacaagatgaagaaggagggctga

SEQ ID NO: 43673 - protein, 484 aa, Propionibacterium acnes
MTATTITPETKDEVVGVGRVVRVIGPVVDVEFPAGQLPEILNALHVDAEVMGETHAITLEVALHIGENVVRAISLKPTDGMRRGTEVRDTGAPISVPVGDVTKGHVWNVTGDVLNADPSTIEVTERWPIHRDPPAFDDLEPETEMLETGIKVLDLLTPYVKGGKIGLFGGAGVGKTVLIQEMIYRIAHNFGGTSVFAGVGERTREGNDLINEMDEAGVLKDTALVFGQMDEPPGTRLRIALTGLTMAEYFRDVQNQDVLLFIDNIFRFSQAGSEVSTLLGRMPSAVGYQPNLADEMGQLQERITSTRGHSITSMQAVYVPADDYTDPAPATTFAHLDATTELSREIASRGLYPAVDPLTSTSRILDPLYVGQEHYDTATQVKQILQRNKELQDIIAILGVDELSEEDKVTVARARRIQQFLSQNTYTAEKFTGVAGSTVPIADTVEGFQMICRGDVDHIPEQAFFNVGSMDMVMENWDKMKKEG

SEQ ID NO: 43674 - DNA, 2050 bp, Prochloron didemni
  CDS (1)..(1452): transl_table=11
atggtagcgacaacagaaacaacaaacattggtaaaattacccaaatcatcggccctgtagtggatgcggagtttccatctggcaaaatgccccgaatctacaatgccttgagagttgaaggcaaaaatgccgccggacaagatgtagccgtaacctgcgaggtgcagcagttgctgggagacaaccaagtacgggctgtttccatgagcagcacggacggtctggtgcggggaatggaaattaccgatactggcgcacccattaacgttcctgtgggcaaggctaccctgggtcggattttcaatatcttgggggaaccagtagataatcagggtcctgtgtatactgctgaaacttctcctattcaccgagctgcccctaaatttaccgatttagacaccaagcccactgtatttgagactgggatcaaggttatcgacttgctgactccctatcgtcgcggcggtaaaatcggcctgtttggcggtgctggtgtgggcaaaaccgttatcatgatggagctaatcaacaatattgccatcaaccacggtggagtctccgtcttcggcggtgtgggagagcgcactcgtgaagggaatgacctttacaatgaaatgattgaatcgaaggttattaacgctgataacctcaacgagtctaaaattgctctagtttacggtcagatgaatgaaccccctggtgcgagaatgcgggtaggtctatctgctctgactatggctgagtatttccgggatgtgaacaagcaagatgtgttgctgttcatcgacaatatttttcgctttgttcaagctggttctgaggtatctgccctgttaggtcgcatgccttctgctgtgggttaccagcctactctgggtactgacgtgggagatttgcaagagcggattacttctactaaggaaggttctattacctctattcaagcggtttacgttcctgcggacgatttaaccgaccccgctcctgctactacttttgctcacttagacggtactacggtgctgtctcggggtttggcttctaagggtatttatcctgctgtagatcctttagactccaccagcaccatgttacaggcgggaattgtgggtgaagaccactacaataccgctcgtgcagtgcagtctaccttgcagcgctataaagaactgcaagatattattgccattttgggtctggatgaattgtcggaagaagaccgcttgatagtagatcgggctcggaaggtggagcgtttcttgtctcagcctttctttgtggcggaagtatttactggcgcacctggcaagtacgtttctctggaagatactatcaaaggcttcaagatgattctgtctggggaattagatgacctgccagaacaggcattctacttggtaggagatattcaggaagctaaggctaaagctgaaaaactcaagcaagattaagatccccctatccccccttgatccccccttggtcccccccagtgggggggaaacaggggggagaaaacaaccccccttatttaaggggggagaagaggttggtttgtcagttactgcttggtaaaaacaaacaacaaacaaccaataacaaaaaacaaacaacaaataacaaacaaccaaaaatgactttaactttgcgggtaattaccccagataagacagtttgggacgatagtgtagaagaaattgtcctgcccagtactacgggacaggtaggggttttgacaggtcacgctcctctgttaacggctttggatactggggtgatgcgagttcgtcctggcaaagattggcaggcgatcgccctcatgggtggatttgctgaagtagagaacaacgaggtgaaagttctagtgaatggtgcggaagtgggagatagtatcgataaagaaactgctcgcactgagttccaacaagcggaacaaaatctcgctcgagccaatcaaggagacaaccgccaagagctaattcaagcaacccaagagttcaagaaagcaagagcccgctttcaagctgctgggggcatgacttaaggcaa

SEQ ID NO: 43675 - protein, 483 aa, Prochloron didemni
MVATTETTNIGKITQIIGPVVDAEFPSGKMPRIYNALRVEGKNAAGQDVAVTCEVQQLLGDNQVRAVSMSSTDGLVRGMEITDTGAPINVPVGKATLGRIFNILGEPVDNQGPVYTAETSPIHRAAPKFTDLDTKPTVFETGIKVIDLLTPYRRGGKIGLFGGAGVGKTVIMMELINNIAINHGGVSVFGGVGERTREGNDLYNEMIESKVINADNLNESKIALVYGQMNEPPGARMRVGLSALTMAEYFRDVNKQDVLLFIDNIFRFVQAGSEVSALLGRMPSAVGYQPTLGTDVGDLQERITSTKEGSITSIQAVYVPADDLTDPAPATTFAHLDGTTVLSRGLASKGIYPAVDPLDSTSTMLQAGIVGEDHYNTARAVQSTLQRYKELQDIIAILGLDELSEEDRLIVDRARKVERFLSQPFFVAEVFTGAPGKYVSLEDTIKGFKMILSGELDDLPEQAFYLVGDIQEAKAKAEKLKQD

SEQ ID NO: 43676 - DNA, 1377 bp, Pseudomonas aeruginosa
  CDS (1)..(1377): transl_table=11
atgagtagcggacgtatcgttcaaatcatcggcgccgtgatcgacgtggaattcccgcgcgatgccgtgccgagcatctatgaagccctgaaggttcagggcgttgaaaccaccctggaagtccagcagcagctgggcgacggcgtggttcgttccattgcgatgggttccaccgaaggcctcaagcgtggcctgaacgtggacagcactggtgctgccatctccgtgccggtcggtaaagcgaccctgggccggatcatggacgtactgggtaacccgatcgacgaagccggtcccatcggcgaagaagagcgctggggcatccaccgcgaagctccgtcctatgccgaccaggctggcggcaacgagctgctggaaaccggcatcaaggtgatcgacctggtctgcccgttcgccaagggcggcaaggtaggcctgttcggcggcgccggcgtgggcaagaccgtcaacatgatggaactgatccgtaacatcgccatcgagcacagcggttattccgtgttcgcgggtgtgggcgagcgtactcgtgagggtaacgacttctaccacgagatgaaggactccaacgtactggacaaggtagccctggtatacggccagatgaacgagccgccgggcaaccgtctgcgcgtcgcactgaccggcctgaccatggccgagaagttccgtgacgaaggccgtgacgttctgttgttcatcgacaacatctaccgttacaccctcgccggtaccgaagtatccgcactgctgggccgtatgccgtccgcggtgggctatcagccgaccctggccgaagagatgggcgttctgcaggagcgcatcacctccaccaagaaaggctcgatcacctcgatccaggccgtatacgttcccgcggacgacctcaccgacccgtccccggcgaccaccttcgcccacctggacgcgaccgtcgtactgtcccgtgacatcgcctcgctgggtatctaccccgcggtcgacccgctggactccacctctcgccagctcgatccgctggtgatcggccaggatcactacgacaccgctcgcggcgtccagtatgttctgcagcgctacaaggagctgaaggacatcatcgcgatcctgggcatggacgaactgtccgaagccgacaagctgctggtggcgcgcgctcgtaagatccagcgcttcctgtcccagccgttcttcgtagcggaagtcttcaccggctcgccgggcaagtacgtttccctgaaggacaccatcgctggcttcaagggcattctcaacggcgactacgatcacctgccggagcaggcgttctacatggtcggcggtatcgaagaagcagtcgagaaagccaaaaaactgtaa

SEQ ID NO: 43677 - protein, 458 aa, Pseudomonas aeruginosa
MSSGRIVQIIGAVIDVEFPRDAVPSIYEALKVQGVETTLEVQQQLGDGVVRSIAMGSTEGLKRGLNVDSTGAAISVPVGKATLGRIMDVLGNPIDEAGPIGEEERWGIHREAPSYADQAGGNELLETGIKVIDLVCPFAKGGKVGLFGGAGVGKTVNMMELIRNIAIEHSGYSVFAGVGERTREGNDFYHEMKDSNVLDKVALVYGQMNEPPGNRLRVALTGLTMAEKFRDEGRDVLLFIDNIYRYTLAGTEVSALLGRMPSAVGYQPTLAEEMGVLQERITSTKKGSITSIQAVYVPADDLTDPSPATTFAHLDATVVLSRDIASLGIYPAVDPLDSTSRQLDPLVIGQDHYDTARGVQYVLQRYKELKDIIAILGMDELSEADKLLVARARKIQRFLSQPFFVAEVFTGSPGKYVSLKDTIAGFKGILNGDYDHLPEQAFYMVGGIEEAVEKAKKL

SEQ ID NO: 43678 - DNA, 1377 bp, Pseudomonas fluorescens
  CDS (1)..(1377): transl_table=11
atgagtagcggacgtatcgttcaaatcatcggcgccgttatcgacgtggaatttccacgcgacagcgtaccgagcatctacgacgccttgaaggttcaaggcgccgaaaccactctggaagttcagcagcagctgggcgacggcgtggtgcgtaccattgcgatgggctccaccgaaggcttgaagcgcggtctggacgtcaacaacactggcgcagccatctccgtaccggtcggtaaagcgaccctgggccggatcatggacgtactgggcaacccaatcgacgaagccggtcctatcggtgaagaagagcgttggggcatccaccgtccagcaccttccttcgcagaacaggcaggcggcaacgacctgctggaaaccgggatcaaggtaattgacctggtttgcccgttcgccaagggcggtaaagtcggtctgttcggtggtgccggtgtaggcaagaccgtaaacatgatggaactgatccgtaacatcgccatcgagcacagcggttattccgtgttcgccggtgtgggtgagcgtactcgtgagggtaacgacttctaccacgagatgaaggactccaacgttctggacaaagtggcactggtctacggccagatgaacgagccgccgggaaaccgtctgcgcgtagccctgaccggcctgaccatggccgagaagttccgtgacgaaggtaacgacgttctgctgttcgtcgacaacatctaccgttacaccctggccggtaccgaagtatccgcactgctgggccgtatgccttccgcagtaggctaccagccgaccctggctgaagagatgggcgttctgcaagaacgtatcacttcgaccaagcaaggctcgatcacctcgatccaagcggtatacgtacctgcggacgacttgaccgacccgtcgccagcgaccaccttcgcccacttggacgccaccgtcgttctgtcccgtgacatcgcttccctgggtatctacccagcggtagacccactggactcgacctcccgtcagctggacccgaacgtgatcggcaacgaacactacgagaccgctcgcggcgttcagtacgtactgcagcgttacaaagagctgaaggacatcattgcgatcctgggtatggacgagctgtcggaaaccgacaagcagttggtatcccgcgctcgtaagatccagcgcttcttgtcgcagccgttcttcgtggctgaagtcttcactggttctccaggcaaatacgtttccctgaaagacaccatcgctggcttcaaaggcatcctcaacggtgactacgaccacctgccagaacaagcgttctacatggtcggcggcatcgacgaagcgatcgagaaagccaagaaactgtaa

SEQ ID NO: 43679 - protein, 458 aa, Pseudomonas fluorescens
MSSGRIVQIIGAVIDVEFPRDSVPSIYDALKVQGAETTLEVQQQLGDGVVRTIAMGSTEGLKRGLDVNNTGAAISVPVGKATLGRIMDVLGNPIDEAGPIGEEERWGIHRPAPSFAEQAGGNDLLETGIKVIDLVCPFAKGGKVGLFGGAGVGKTVNMMELIRNIAIEHSGYSVFAGVGERTREGNDFYHEMKDSNVLDKVALVYGQMNEPPGNRLRVALTGLTMAEKFRDEGNDVLLFVDNIYRYTLAGTEVSALLGRMPSAVGYQPTLAEEMGVLQERITSTKQGSITSIQAVYVPADDLTDPSPATTFAHLDATVVLSRDIASLGIYPAVDPLDSTSRQLDPNVIGNEHYETARGVQYVLQRYKELKDIIAILGMDELSETDKQLVSRARKIQRFLSQPFFVAEVFTGSPGKYVSLKDTIAGFKGILNGDYDHLPEQAFYMVGGIDEAIEKAKKL

SEQ ID NO: 43680 - DNA, 1377 bp, Pseudomonas putida
  CDS (1)..(1377): transl_table=11
atgagtagcggacgtatcgttcaaatcatcggcgccgtcatcgacgtggaattcccacgtgacgtcgtgccgagtgtatacaacgcgcttaaagtacaaggcgcggaaaccaccctggaagttcagcagcagctgggcgacggcgtggttcgtaccattgcgatgggctcgaccgaaggcctgaagcgcggtctggatgtcgtcgacaccggcgctgccatttccgttccagttggtaaggccaccctgggccgtatcatggacgtactgggcaacccgatcgacgaagccggcccgatcggcgaagaagagcgtcgcggtatccaccagccagcgccttcgttcgctgaccaggcaggcggcaacgacctgctggaaaccggcatcaaggttatcgacctggtttgcccgttcgccaagggtggtaaggttggtctgttcggtggtgccggtgtcggcaagaccgtaaacatgatggaactgatccgtaacatcgccatggaacacagcggttactccgtgttcgctggtgtgggtgagcgtactcgtgagggtaacgacttctaccacgagatgaaggactccaacgttctcgacaaagtagcgctggtctacggtcagatgaacgagccaccaggaaaccgtctgcgtgtagcgctgaccggcctgaccatggccgagaagttccgtgacgaaggtaacgacgttctgctgttcgtcgacaacatctatcgttacaccctggccggtaccgaagtatccgcactgctgggccgtatgccttcggcagtaggttaccagccgaccctggctgaagagatgggcgttctgcaagagcgcatcacctccaccaaggaaggttcgatcacctccgtacaggccgtatacgtacctgcggacgacttgaccgacccgtcgccagcgaccaccttcgcccacttggacgccaccgtcgttctgtcccgtgacatcgcctccctgggtatctacccagcggtcgacccactggactcgacttcgcgccagctggacccgaacgtgatcggcaacgagcactacgagaccgctcgtggcgttcagtatgttctgcagcgctataaagagctgaaggacatcattgcgatcctgggtatggacgaactgtccgaagccgacaagcaactggtagcccgcgctcgtaagatccagcgcttcctgtcgcagccgttcttcgtggcagaagtcttcaccggttcgccaggcaagtacgtttccctgaaagacaccatcgctggcttcagcggcatcctcaaaggtgactacgaccacctgccagaacaagcgttctacatggtcggcagcatcgacgaagcgatcgagaaagccaagaaactgtaa

SEQ ID NO: 43681 - protein, 458 aa, Pseudomonas putida
MSSGRIVQIIGAVIDVEFPRDVVPSVYNALKVQGAETTLEVQQQLGDGVVRTIAMGSTEGLKRGLDVVDTGAAISVPVGKATLGRIMDVLGNPIDEAGPIGEEERRGIHQPAPSFADQAGGNDLLETGIKVIDLVCPFAKGGKVGLFGGAGVGKTVNMMELIRNIAMEHSGYSVFAGVGERTREGNDFYHEMKDSNVLDKVALVYGQMNEPPGNRLRVALTGLTMAEKFRDEGNDVLLFVDNIYRYTLAGTEVSALLGRMPSAVGYQPTLAEEMGVLQERITSTKEGSITSVQAVYVPADDLTDPSPATTFAHLDATVVLSRDIASLGIYPAVDPLDSTSRQLDPNVIGNEHYETARGVQYVLQRYKELKDIIAILGMDELSEADKQLVARARKIQRFLSQPFFVAEVFTGSPGKYVSLKDTIAGFSGILKGDYDHLPEQAFYMVGSIDEAIEKAKKL

SEQ ID NO: 43682 - DNA, 1479 bp, Psilotum nudum
  CDS (1)..(1479)
atgaaaataaatcttcttacttttggagtttctacgttggtagaacgtaatataggttatatcactcaaattattggtcccgtattagatgcagcgtttcctccgggtaagatgcctaatatttataattccttgatagtcaagggacaaaatcccgcgggtcaacagatcaatgttacttgtgaagtacaacaattattgggaaataataaggttagagccatagcgatgagtgccacagatggtctaaccagaggtatggaggtcattgatacaggagctcctcttagtgttcctgtcggtcaagcaactctcggacgaatcttcaatgttctaggagaacctgtggataatctaggtcctataaatgcggacaaaaaatcttccattcatgaacctgctcctgcttttacacagctagataccaaattatcaatatttgaaaccggaattaaagtagtcgatcttttggctccctatcgccgtggaggaaagattggattgtttggaggagctggagttggaaaaacagttcttattatggaattgattaataacattgctaaagctcatgggggtgtatctgtctttggtggcgtaggagaacgtacgcgcgaaggaaatgatctttacacagaaatgaaggaatcaaaagtcattaatgaacaaaatctatctgaatcaaaagtggctttagtttatggtcaaatgaatgaaccgccgggcgctcgtatgagagttggactaactgccctaacaatagcggaatatttccgggacgttaataaacaagatgtacttttattcattgataatatcttccgttttgttcaagcgggatccgaagtttctgctctattaggtagaatgccttctgccgtaggttatcaaccaacccttagtacagaaatgggttctttacaggaaaggattacctctactaaggaaggctctataacttccattcaagcagtttatgtacctgctgacgatttgaccgatccggctcctgctacaacatttgcacatttggatgcgactactgtactttcaagaggattagctgcaaagggcatttatccagccgtagatcctttggattcaacttcaactatgctgcagccctggatagtaggcgaagaacattacgaaactgcacagggagtaaaacaaactttacaacgttacaaggaacttcaagacattatagctattcttggactggatgagttatcggaagaggaccgtttaacagtagctagagcgcggaaaattgaacgtttcttatcacaacccttctttgtagcagaagtctttacgggctctccgggaaaatatgttagtcttgcagaaaccattaaaggttttcaaatgattctttccggggaattagatagtctccccgaacaagccttctatttggtgggaaatattgaggaagcgactgcaaaagctggaatctcacaaatggaggattaa

SEQ ID NO: 43683 - protein, 492 aa, Psilotum nudum
MKINLLTFGVSTLVERNIGYITQIIGPVLDAAFPPGKMPNIYNSLIVKGQNPAGQQINVTCEVQQLLGNNKVRAIAMSATDGLTRGMEVIDTGAPLSVPVGQATLGRIFNVLGEPVDNLGPINADKKSSIHEPAPAFTQLDTKLSIFETGIKVVDLLAPYRRGGKIGLFGGAGVGKTVLIMELINNIAKAHGGVSVFGGVGERTREGNDLYTEMKESKVINEQNLSESKVALVYGQMNEPPGARMRVGLTALTIAEYFRDVNKQDVLLFIDNIFRFVQAGSEVSALLGRMPSAVGYQPTLSTEMGSLQERITSTKEGSITSIQAVYVPADDLTDPAPATTFAHLDATTVLSRGLAAKGIYPAVDPLDSTSTMLQPWIVGEEHYETAQGVKQTLQRYKELQDIIAILGLDELSEEDRLTVARARKIERFLSQPFFVAEVFTGSPGKYVSLAETIKGFQMILSGELDSLPEQAFYLVGNIEEATAKAGISQMED

SEQ ID NO: 43684 - DNA, 1404 bp, Ralstonia eutropha
  CDS (1)..(1404): transl_table=11
atgagtatcggaaatattgtgcagtgcattggcgccgtggtggacatcgagttcccgcgcaacgcaatgccgaaggtgtacgacgcgctggtgctggaagacagcagcgaaacgtcgtttgccgaaaagggcctgacgttcgaagtccagcagcagctgggcgacggcgtggtgcgtaccattgccctcggttcgtcggacggcctgcgccgcggcatggccgtgaagaacaccgaagcgccgatctcggtgccggtgggtcagggcacgctgggccgcatcatggacgtgctgggtcgccccatcgacgaagctggcccgatcgcttcggacgagcgccgcgcgattcaccagaaggcaccgaagttcgacgaactgtcgccttcgaccgacctgctcgaaaccggcatcaaggtgatcgacctgatctgcccgttcgcaaagggcggtaaggttggcctgttcggtggtgctggcgtgggcaagaccgtcaacatgatggagctcatcaacaacatcgccaagcagcacagcggtctgtcggtgttcgccggcgtgggcgagcgtacccgtgaagggaacgacttctaccacgaaatgaaggactccaacgtgctcgacaaggtggccatggtgttcggccagatgaacgagccgccgggcaaccgtctgcgcgtggcactctccggcctgaccatggccgagaagttccgcgacgaaggccgcgacatcctgttcttcgtcgacaacatctaccgctacacgctggccggtaccgaagtgtcggcactgctgggccgtatgccttccgccgtgggctaccagccgacgctggctgaagaaatgggcaagctgcaggaacgtattacgtcgaccaagactggctcgatcacgtcgatccaggccgtgtacgtgcctgcggatgacttgaccgacccgtcgccggcaaccaccttcctgcacctggactcgaccctcgtgctgtcgcgtgacatcgctgcgctcggtatctaccccgcagtggatccgctggactcgacctcgcgccagatggacccgcaggttgtgggccaggagcactacaatgtcgcgcgtgccgttcagcagacgctgcagcgctacaaggaactgcgcgacatcatcgcgattctgggcatggacgaactgtcgccggaagacaagatggccgtgaaccgcgcgcgtaagatccagcgtttcctgtcgcagccgttccacgtggccgaagtgttcacgggttcgccgggcaagtacgtgccgctgaaggaaaccatccgtggtttcaagatgctggtggatggcgagtgcgatcacctgcccgagcaggcgttctacatggtcggctcgatcgacgaagccttcgagaaggccaagaagctccagtaa

SEQ ID NO: 43685 - protein, 467 aa, Ralstonia eutropha
MSIGNIVQCIGAVVDIEFPRNAMPKVYDALVLEDSSETSFAEKGLTFEVQQQLGDGVVRTIALGSSDGLRRGMAVKNTEAPISVPVGQGTLGRIMDVLGRPIDEAGPIASDERRAIHQKAPKFDELSPSTDLLETGIKVIDLICPFAKGGKVGLFGGAGVGKTVNMMELINNIAKQHSGLSVFAGVGERTREGNDFYHEMKDSNVLDKVAMVFGQMNEPPGNRLRVALSGLTMAEKFRDEGRDILFFVDNIYRYTLAGTEVSALLGRMPSAVGYQPTLAEEMGKLQERITSTKTGSITSIQAVYVPADDLTDPSPATTFLHLDSTLVLSRDIAALGIYPAVDPLDSTSRQMDPQVVGQEHYNVARAVQQTLQRYKELRDIIAILGMDELSPEDKMAVNRARKIQRFLSQPFHVAEVFTGSPGKYVPLKETIRGFKMLVDGECDHLPEQAFYMVGSIDEAFEKAKKLQ

SEQ ID NO: 43686 - DNA, 1404 bp, Ralstonia metallidurans
  CDS (1)..(1404): transl_table=11
atgagtatcggaaatattgtgcagtgcattggcgccgtggtggacatcgagttcccgcgcgacgcaatgccgaaggtgtacgacgcactcgtgctcgaagagggcaacgacaagtcgttcgccgagaagggtctgaccttcgaagtgcagcaacagctcggcgacggcgtggtgcgtaccattgccctgggctcgtcggacggcctgcgccgtggcatgtcggtgatgagcaccggcgcccccatctccgtgccggtgggccacggcacgctgggccgcatcatggacgtgctgggtcgcccgatcgacgaagctggtccgatcgaagctgacgaaaagcgcgcgattcaccagaaggcaccgaagttcgacgaactgtcgccatcggttgacctgctggaaacgggcatcaaggttatcgacctggtgtgcccgttcgcgaagggcggtaaggtgggtctgttcggtggcgccggtgtgggcaagaccgtgaacatgatggaactcatcaacaacatcgccaagcagcacagcggtctgtcggtgtttgccggcgtgggcgagcgtacccgtgaagggaacgacttctaccacgaaatgaaggactcgaacgtgctcgacaaggtggccatggtgttcggccagatgaacgagccgccgggcaaccgtctgcgcgtggcgctgaccggcctgacgatggccgagcgcttccgtgacgaaggccgcgacatcctgttcttcgtcgacaacatctaccgctacacgctggccggtaccgaagtgtcggcactgctgggccgtatgccttccgccgtgggctatcagccgacgctggctgaagaaatgggcaagctgcaggagcgtattacgtcgaccaagactggctcgatcacgtcgatccaggccgtgtacgtgcctgcggatgacttgaccgacccgtcgccggctaccaccttcctgcacctggactcgaccgtcgtgctgtcgcgtgacatcgccgcgctgggtatctaccccgccgtcgacccgctcgactcgacctcgcgccagctggatccgcaagtcgtgggtacggaacactatgaagtggcccgccgcgttcagcagaccctgcagcgctacaaggaactgcgcgacatcatcgcgattctgggcatggacgaactgtcgccggaagacaagctcgccgtgtcgcgtgcgcgtaagatccagcgtttcctgtcccagccgttccacgtggccgaagtgttcacgggttcgccgggcaagtacgtgccgctgaaggaaaccatccgtggtttcaagatgctggtggatggcgagtgcgatcacctgcccgagcaggcgttctacatggttggctcgatcgacgaagccttcgagaaggccaagaagcttcagtaa

SEQ ID NO: 43687 - protein, 467 aa, Ralstonia metallidurans
MSIGNIVQCIGAVVDIEFPRDAMPKVYDALVLEEGNDKSFAEKGLTFEVQQQLGDGVVRTIALGSSDGLRRGMSVMSTGAPISVPVGHGTLGRIMDVLGRPIDEAGPIEADEKRAIHQKAPKFDELSPSVDLLETGIKVIDLVCPFAKGGKVGLFGGAGVGKTVNMMELINNIAKQHSGLSVFAGVGERTREGNDFYHEMKDSNVLDKVAMVFGQMNEPPGNRLRVALTGLTMAERFRDEGRDILFFVDNIYRYTLAGTEVSALLGRMPSAVGYQPTLAEEMGKLQERITSTKTGSITSIQAVYVPADDLTDPSPATTFLHLDSTVVLSRDIAALGIYPAVDPLDSTSRQLDPQVVGTEHYEVARRVQQTLQRYKELRDIIAILGMDELSPEDKLAVSRARKIQRFLSQPFHVAEVFTGSPGKYVPLKETIRGFKMLVDGECDHLPEQAFYMVGSIDEAFEKAKKLQ

SEQ ID NO: 43688 - DNA, 1404 bp, Ralstonia solanacearum
  CDS (1)..(1404): transl_table=11
atgagtatcggaacgattgtgcagtgcatcggcgccgtggtggacatccagttcccgcgcgacgcgatgcccaaggtctacgacgcgctcgtgctgcaggacagcggcgaagcgtcgttcgccgagaagggcctgagcttcgaagtgcaacaacagctgggcgacggcgtggtgcgtaccattgcgctgggttcgtcggacggcctgcgccgcggcatgccggtgtcgaacactggcgcgccgatctcggtgcccgtcggccacggcacgctgggccgcatcatggacgtgctgggtcgcccgatcgacgaagccggtccgatcgccgccgatgaaaagcgcgcgattcaccagaaggccccgaagttcgacgaactgtcgccgtcggtggacctgctggaaaccggcatcaaggtgatcgacctggtttgcccgttcgccaagggcggcaaggtgggtctgttcggtggcgccggcgtcggcaagaccgtgaacatgatggagctgatcaacaacatcgccaagcagcactcgggcttgtcggtgtttgctggcgtgggcgagcgtacccgtgagggcaacgacttctaccacgaaatgaaggactccaacgtgctcgacaaggtggccatggtgttcggccagatgaacgagccgccgggcaaccgtctgcgcgtggcgctgaccggcctgaccatggccgagcgcttccgtgacgaaggccgcgacatcctgttcttcgtcgacaacatctaccgctacacgctggccggtaccgaagtgtcggcactgctgggccggatgccttccgccgtgggctatcagccgacgctggctgaagaaatgggcaagctgcaggagcgcatcacgtcgaccaagaccggttcgatcacgtcgatccaggccgtgtacgtgcctgcggatgacttgaccgatccgtcgcccgctacgaccttcctgcacctggactcgaccgtcgtgctgtcgcgtgacatcgctgcgctgggtatctaccccgccgtcgatccgctcgactcgacctcgcgtcagctggatccgcaaatcgtcggtacggaacactacgaagtggcccgccgcgtgcagcagaccctgcagcgctacaaggaactgcgcgacatcatcgcgattctgggcatggacgaactgtcgccggaagacaagctggccgtgggccgcgcccgtaagatccagcgtttcctgtcgcagccgttccacgtggccgaagtgttcacgggttcgccgggcaagtacgtgccgctgaaggaaaccatccgcggcttcaagatgctggtggatggcgagtgcgatcacctgccggagcaggcgttctacatggtcggctcgatcgacgaggccttcgagaaggccaagaagctccagtaa

SEQ ID NO: 43689 - protein, 467 aa, Ralstonia solanacearum
MSIGTIVQCIGAVVDIQFPRDAMPKVYDALVLQDSGEASFAEKGLSFEVQQQLGDGVVRTIALGSSDGLRRGMPVSNTGAPISVPVGHGTLGRIMDVLGRPIDEAGPIAADEKRAIHQKAPKFDELSPSVDLLETGIKVIDLVCPFAKGGKVGLFGGAGVGKTVNMMELINNIAKQHSGLSVFAGVGERTREGNDFYHEMKDSNVLDKVAMVFGQMNEPPGNRLRVALTGLTMAERFRDEGRDILFFVDNIYRYTLAGTEVSALLGRMPSAVGYQPTLAEEMGKLQERITSTKTGSITSIQAVYVPADDLTDPSPATTFLHLDSTVVLSRDIAALGIYPAVDPLDSTSRQLDPQIVGTEHYEVARRVQQTLQRYKELRDIIAILGMDELSPEDKLAVGRARKIQRFLSQPFHVAEVFTGSPGKYVPLKETIRGFKMLVDGECDHLPEQAFYMVGSIDEAFEKAKKLQ

SEQ ID NO: 43690 - DNA, 1961 bp, Raphanus sativus
  CDS (1)..(1497)
atgcggacgaatccaacgacttcggatccagcggtttcaatacgtgaaaaaaacaacctgggacgtattgcccaaatcattggtccggtactggatgtagccttccccccgggcaagatgcctaatatttacaatgctctggtggttaagggtcgagatacgcttggtcaagaaattaatgtgacttgtgaagtacagcaattattaggaaacaaccgagttagagctgtagctatgagcgcgaccgagggtttaaagagagggatggacgtggttgatatgggaaatcctctaagtgttccagtcggcggagcgactctaggacgaattttcaatgtacttggggaacctgttgataatttaggtcctgtcgatactagcacaacatctcctatccataaatccgcgcctgcttttatacaattagatacaaaattatctatttttgaaacaggaattaaagtagtagatcttttggccccttatcgtcgtggggggaaaatcggactattcggtggggctggcgtgggtaaaacaagtctaattatggaattgatcaacaacattgccaaagctcatggtggtgtatccgtatttggtggagtaggcgaacgaactcgtgaaggaaatgatctttacaaggaaatgaaagaatctggagtcattaatgaactaaaccttgcggaatccaaagtagccctagtctacggtcagatgaatgaaccgccgggagctcgtatgagagttggtctgactgccttaactatggcagaatatttccgagatgttaataagcaagacgtacttctatttatcgacaatatcttccgttttgtacaagcaggatccgaggtatccgctttattgggtagaatgccttctgctgtgggttaccaacccacccttagtaccgaaatgggtactttacaagaaagaattacttctacgaaaaaagggtccataacctctattcaagcagtttatgtacctgcagacgatttgactgaccctgctcctgccaccacatttgcacatttagatgcgactaccgtactatcaagaggattagctgctaaaggtatctatccagcggtagatcctttagattcaacgtcaactatgctacaacctcgaatcgttggcgaggaacattatgaaactgcgcaacaagttaagcaaactttacaacgttacaaggagcttcaggacattatagctatcctggggttggacgaattatccgaagaggatcgcttaaccgtcgcaagagcacgaaagattgagcgtttcttatcacaaccttttttcgtagcagaagtatttacaggttctccgggaaaatatgttggtctagcggaaacaattagagggtttaaattgatcctttccggagaatttgattctcttcctgaacaggccttttacttagtgggtaacatcgatgaagctactgcgaaggctacgaacttagaaatggagagtaaattgaagaaatgaccttaaatctttgtgtactgactccgaatcgaattgtttgggattcagaagtaaaagaaatcattttatctactaatagtggacaaattggcgtattaccaaatcacgcgccgattgccacagctgttgatataggtattttgaaaatacgccttaataaccaatggttaacaatggctctgatgggcggttttgctagaataggcaataatgaaattactattttagtaaatgatgcagagaagaatagtgacattgatccacaagaagctcagcaaactcttgaaatagcagaagcgaacttgagaaaagctgaaggcaagagacaaacaattgaggcaaatctagctctcagacgagctcggacacgcgtcgaggctctcaatatgatttgattttgtaactagctgacgtataaaaaaataggatccaaaagcgagaaaaatagcaaaaaaaaaaaaaaa

SEQ ID NO: 43691 - protein, 498 aa, Raphanus sativus
MRTNPTTSDPAVSIREKNNLGRIAQIIGPVLDVAFPPGKMPNIYNALVVKGRDTLGQEINVTCEVQQLLGNNRVRAVAMSATEGLKRGMDVVDMGNPLSVPVGGATLGRIFNVLGEPVDNLGPVDTSTTSPIHKSAPAFIQLDTKLSIFETGIKVVDLLAPYRRGGKIGLFGGAGVGKTSLIMELINNIAKAHGGVSVFGGVGERTREGNDLYKEMKESGVINELNLAESKVALVYGQMNEPPGARMRVGLTALTMAEYFRDVNKQDVLLFIDNIFRFVQAGSEVSALLGRMPSAVGYQPTLSTEMGTLQERITSTKKGSITSIQAVYVPADDLTDPAPATTFAHLDATTVLSRGLAAKGIYPAVDPLDSTSTMLQPRIVGEEHYETAQQVKQTLQRYKELQDIIAILGLDELSEEDRLTVARARKIERFLSQPFFVAEVFTGSPGKYVGLAETIRGFKLILSGEFDSLPEQAFYLVGNIDEATAKATNLEMESKLKK

SEQ ID NO: 43692 - DNA, 1515 bp, Rhizobium meliloti
  CDS (1)..(1515): transl_table=11
atggctaaggcagctaccccgaaagaaaccgcagcggcgaagaagccggctgctccgaagaaggcagcttccgccaagacagtcgttgcggctacgggtgctgtcggccgcgtgacgcaggtcatcggcgccgtcgtcgacgtcgcattcgaagaaggccagctcccgcagatcctgaacgcgctggaaaccgacaacaacggcaaccgcctcgttctcgaagttgcgcagcatctcggcgaaaactccgtccgcacgatcgccatggactcgaccgaaggtctcgttcgcggccagaaggtcgccgacacgggcggcccgatcgcggttccggtcggcaaggaaacgctcggccgcatcatgaacgtcatcggcgagccggtcgacgaagccggcccgctgaagacttccgcccgccgcgccatccaccaggaagcgccggcctatgtggaccagtcgacggaagcgcagattctcgtcaccggcatcaaggtcgtcgacctgctcgctccctatgcgaagggcggcaagatcggcctcttcggcggcgcgggcgtcggcaagaccgtgctgatcatggaactgatcaacaacgtcgccaaggcgcacggcggttactccgtcttcgcaggcgtcggtgaacggacccgcgaaggcaacgacctctatcacgaaatgatcgagtccggcgtgaacaagcatggcggcggcgaaggttccaaggccgcgctcgtctacggccagatgaacgagccgccgggcgcccgcgcacgcgtcgcgctgaccggcctgacggtcgccgaacagttccgtgacgaaggccaggacgttctcttcttcgtcgacaacatcttccgcttcacccaggcaggctcggaagtgtcggctctgctcggccgtattccttcggccgtgggctatcagccgacgctggcaaccgacatgggccagatgcaggagcgcatcaccaccacgaccaagggctcgatcacctcggttcaggcgatttacgttccggccgacgatttgaccgacccggcaccggcgacctcgttcgcgcacctcgatgcgacgacggttctgtcgcgctcgatcgccgaaaagggcatctacccggccgtggatccgctcgactcgacctcgcgcatgctggacccgatgatcgtcggcgaagagcattacgaagtgtcgcgcaaggtgcagtcgaccctgcagcgctacaaggccctgcaggacatcatcgcgatcctgggcatggacgagctttccgaagaggacaagatcgccgtcgcccgcgcccgcaagatcgagcgtttcctgtcgcagccgttcttcgtcgccgaagtcttcaccggctcgccgggcaagctggttgcgctcgaagacacgatcaagggcttcaagggcctcgtcaacggcgagtacgaccacctgccggaagccgccttctacatggtcggttccatcgaggaagccgtcgagaaggccaagaagctggctgccgaagccgcctga

SEQ ID NO: 43693 - protein, 504 aa, Rhizobium meliloti
MAKAATPKETAAAKKPAAPKKAASAKTVVAATGAVGRVTQVIGAVVDVAFEEGQLPQILNALETDNNGNRLVLEVAQHLGENSVRTIAMDSTEGLVRGQKVADTGGPIAVPVGKETLGRIMNVIGEPVDEAGPLKTSARRAIHQEAPAYVDQSTEAQILVTGIKVVDLLAPYAKGGKIGLFGGAGVGKTVLIMELINNVAKAHGGYSVFAGVGERTREGNDLYHEMIESGVNKHGGGEGSKAALVYGQMNEPPGARARVALTGLTVAEQFRDEGQDVLFFVDNIFRFTQAGSEVSALLGRIPSAVGYQPTLATDMGQMQERITTTTKGSITSVQAIYVPADDLTDPAPATSFAHLDATTVLSRSIAEKGIYPAVDPLDSTSRMLDPMIVGEEHYEVSRKVQSTLQRYKALQDIIAILGMDELSEEDKIAVARARKIERFLSQPFFVAEVFTGSPGKLVALEDTIKGFKGLVNGEYDHLPEAAFYMVGSIEEAVEKAKKLAAEAA

SEQ ID NO: 43694 - DNA, 1440 bp, Rhodopirellula baltica
  CDS (1)..(1440): transl_table=11
atgtccactgcaaccgccaccggccgcgtcactcaagtcatcggttcaacctttgatgccgagtttcctgaaggtcaactgccaaagatctacaacgctttgacaatccaaagcgagcacaaaggggtcaccattgacttgaccggcgaagtgcagcaacacctcggtggtggtcgtgttcgtgcgattgctttgggttcgaccgaaggcatgatgcgaggcatgaacgtggtcgacactggcaagccagtttcggttcccgtcggaaaagccaccttgggtcgcgtcttcaacgttctcgggcaacccatcgacaaacgtggcgatgttcaagccgacgattactggcccattcaccgccaggctcctcccgtcaacgaactgtcaacgaacaccgagctgttcgaaacgggcatcaaggtggttgaccttctgaccccatttgttcgtggtggtaaggcaggtttgttcggtggtgctggtctgggcaagaccgtgattctgaccgagttgatcgctcggatcgcatcgagccacggtggttattcggtcttcgccggtgtgggtgaacgaacacgggaaggcaccgacctctggttggaaatgcaagaaaccgagatcggttcgaccggtcgcaacgtgatcgagcaaacctgcatggtgttcggtcaaatgaacgagccaccaggatcacgtctgcgtgttgctctgtccgcactgaccatggcggaatacttccgcgatacaactggtgctgacactctgttgttcgtcgacaacatcttccgcttctcgcaagccggttcggaagtgtccgcacttctcggacggatgccatcggctgtgggctatcagcccacactggcaaccgaaatgggtgctctgcaagaacggattacttcgaccaagcaaggtgctattacatcggtgcaagccgtttatgtgcctgccgatgacccgactgaccccgctccggccacggcgttcggtcagctcgacgctttcatttaccttgagcgttcgatttcggaaaaagggatttatcccgccatcgacccgttggcttcgaactcgcgaattttggatcctcagtacgtcggcgaccgtcactacacgatcgcccgccgcgttcaaacgatcttgcaacgttaccgcgaactgcaagacatcatcgcgattctcggtgtcgacgaactcagcgaagaagacaagaccatcgttcaccgcgcacgccgcatcgaacgattcctgtcgcagcccttcctcgtggcagaagtcttcatcggcaaacccggtgagatcacgtctctcgaagacacgatccgcagcttcgaaggaatctgtgacggcaagtacgatcacttgcccgagcaagcgttcatgtacgtcggtgcgatcgagcaagccgaagagcaagccaagaagatggagtccaagtaa

SEQ ID NO: 43695 - protein, 479 aa, Rhodopirellula baltica
MSTATATGRVTQVIGSTFDAEFPEGQLPKIYNALTIQSEHKGVTIDLTGEVQQHLGGGRVRAIALGSTEGMMRGMNVVDTGKPVSVPVGKATLGRVFNVLGQPIDKRGDVQADDYWPIHRQAPPVNELSTNTELFETGIKVVDLLTPFVRGGKAGLFGGAGLGKTVILTELIARIASSHGGYSVFAGVGERTREGTDLWLEMQETEIGSTGRNVIEQTCMVFGQMNEPPGSRLRVALSALTMAEYFRDTTGADTLLFVDNIFRFSQAGSEVSALLGRMPSAVGYQPTLATEMGALQERITSTKQGAITSVQAVYVPADDPTDPAPATAFGQLDAFIYLERSISEKGIYPAIDPLASNSRILDPQYVGDRHYTIARRVQTILQRYRELQDIIAILGVDELSEEDKTIVHRARRIERFLSQPFLVAEVFIGKPGEITSLEDTIRSFEGICDGKYDHLPEQAFMYVGAIEQAEEQAKKMESK

SEQ ID NO: 43696 - DNA, 1437 bp, Rhodopseudomonas blastica
  CDS (1)..(1437): transl_table=11
atgacaatggcaacgactgtctccaaaggtaaggtgacccaggtcatcggcgccgtcgtggacgttcagttcgaaggcgttcttcccgcgattctgaacgcgctggaaaccaccaacaacggcaagaagctgatcctggaagtcgcccagcacctgggcgagaacacggtccgctgcatcgccatggatgccaccgaaggcctcgtgcgcggcgccccggtcagcgacagcggcaccccgatctcggtgccggtgggcaatgccacgctgggccgcatcctgaacgtcgtcggggaaccgattgacgagcgcggcccgatcgcggccacggaaaagcgcgccattcaccagaaggcgcccgacttccagtcgcagtcgaccgaatcgcagatccttgtcaccggcatcaaggtgatcgacctgctggccccctattccaagggcggcaagatcggcctgttcggcggcgccggcgtgggcaagacggttctcattcaggaactgatcaacaacatcgccaaggtgcactcgggctactcggtgttcgccggcgtgggcgaacggacccgtgaaggcaacgacctgtatcacgagttcatcgaatcgggcgtcatcaacatcgacgatctggaaaagtcgaaggtggcccttgtgtacggccagatgaacgaacctccgggggcgcgtgcccgcgtggcgctgaccggcctgacgctggccgagcagttccgtgaccagtccggcaccgacgttctgttcttcgtggacaacatcttccgcttcacccaggcgggttcggaagtgtcggctctgctgggccgtatcccttcggccgtgggctaccagccgacgctggccaccgacatggggcagcttcaggaacgcatcacctcgaccaaggcgggttcgatcacctcggttcaggcgatctacgttccggccgacgacctgaccgaccccgcgccggccacgtccttcgcccacctcgacgccacgaccaccctgtcgcgcgccatttcggaactggggatctatccggcggttgacccgctcgactcgacctcgcgtctgatggacccgcagatcctgggcgaagagcactacaacaccgcccgtgcggtgcagggcatccttcagcgctacaagtcgctgcaggacatcatcgccatccttggcatggacgaactgtcggaagaggacaagctgaccgtggcccgcgcccggaagatccagcggttcctgtcgcagccgttcgacgtggcgcaggtcttcaccggctcgcccggcgtgcaggtgccgctggacaagaccatcgcctcgttcaaggcggttgtggccggcgaatacgaccacctgccggaagcggccttctacatggtcggcgacatcgaggaagccaaggccaaggccgcgaagcttgccgcggctgcggcctaa

SEQ ID NO: 43697 - protein, 478 aa, Rhodopseudomonas blastica
MTMATTVSKGKVTQVIGAVVDVQFEGVLPAILNALETTNNGKKLILEVAQHLGENTVRCIAMDATEGLVRGAPVSDSGTPISVPVGNATLGRILNVVGEPIDERGPIAATEKRAIHQKAPDFQSQSTESQILVTGIKVIDLLAPYSKGGKIGLFGGAGVGKTVLIQELINNIAKVHSGYSVFAGVGERTREGNDLYHEFIESGVINIDDLEKSKVALVYGQMNEPPGARARVALTGLTLAEQFRDQSGTDVLFFVDNIFRFTQAGSEVSALLGRIPSAVGYQPTLATDMGQLQERITSTKAGSITSVQAIYVPADDLTDPAPATSFAHLDATTTLSRAISELGIYPAVDPLDSTSRLMDPQILGEEHYNTARAVQGILQRYKSLQDIIAILGMDELSEEDKLTVARARKIQRFLSQPFDVAQVFTGSPGVQVPLDKTIASFKAVVAGEYDHLPEAAFYMVGDIEEAKAKAAKLAAAAA

SEQ ID NO: 43698 - DNA, 1419 bp, Rhodobacter capsulatus
  CDS (1)..(1419): transl_table=11
atggcaagcaaaggcaaagtgacccaggtcatcggcgccgtcgtcgacgtgcagttcgaagacggcctcccggcgattctgaacgcccttgaaaccaccaacaacggcaagcgcctcgttctcgaagtggcgcagcacctgggcgagaacaccgtccgcaccatcgcgatggacgcgaccgagggtctcgtgcgcggcgcggccgtgtccgacaccggcggcccgatcaccgttccggtgggcaacgccaccctgggccgcatcctgaacgtcatcggcgagccggtggacgaacgcggtgacgtgtcgaaagccgaagcccgggcgatccaccagcccgcgcccgatttcgcggcgcagtcgacggaaagccagatcctcgtcaccggcatcaaggtgatcgacctgctcgccccctattccaagggcggcaagatcggtctcttcggcggcgccggtgtgggcaagaccgttctgatcatggaactgatcaacaacatcgcgaaagtgcactcgggcttctcggtgttcgcgggcgttggcgaacggacccgtgagggcaacgacctttaccacgagatgatcgaatcgggcgttatcaacctcgagaagctcgaagaatcgaaagtggcgctggtctacggccagatgaacgaacccccgggggcccgtgcccgcgtggcgctgaccggcctgaccctggcggaacagttccgcgaccagtcgggcaccgacgtgctgttcttcgtcgacaacatcttccgcttcacccaggccggttcggaagtgtcggcgctccttggccgtatcccctcggccgtgggctaccagccgacgctggccaccgacatgggcgcgctgcaagaacgcatcacctcgaccaaagccggttcgatcacctcggttcaggccatctacgttccggccgacgaccttaccgacccggccccggccacgtcctttgcccacctcgacgccacgaccgttctgtcgcgtgcgatctcggaactcgggatctacccggccgtcgacccgctcgactccacctcgcggatccttgacccgcaagtcgtcggcgaagagcactatcaggtcgcccgtgacgtccaagggatgctgcaacgctacaagtcgctgcaggacatcatcgccatcctcggcatggacgaactgtcggaagaagacaagctgacggtggcccgcgcccggaagatccagcgcttcctgtcgcagcccttcgacgtggcgaaagtcttcaccggctcggacggcgtgcaggttccgctcgaagacaccatcaagtcgttcaaggcggtggttgcgggcgaatacgaccacctgccggaagcggccttctacatggtcggcggcatcgatgacgtgatcgcgaaagcccagcgcctcgccgctgcggcgtaa

SEQ ID NO: 43699 - protein, 472 aa, Rhodobacter capsulatus
MASKGKVTQVIGAVVDVQFEDGLPAILNALETTNNGKRLVLEVAQHLGENTVRTIAMDATEGLVRGAAVSDTGGPITVPVGNATLGRILNVIGEPVDERGDVSKAEARAIHQPAPDFAAQSTESQILVTGIKVIDLLAPYSKGGKIGLFGGAGVGKTVLIMELINNIAKVHSGFSVFAGVGERTREGNDLYHEMIESGVINLEKLEESKVALVYGQMNEPPGARARVALTGLTLAEQFRDQSGTDVLFFVDNIFRFTQAGSEVSALLGRIPSAVGYQPTLATDMGALQERITSTKAGSITSVQAIYVPADDLTDPAPATSFAHLDATTVLSRAISELGIYPAVDPLDSTSRILDPQVVGEEHYQVARDVQGMLQRYKSLQDIIAILGMDELSEEDKLTVARARKIQRFLSQPFDVAKVFTGSDGVQVPLEDTIKSFKAVVAGEYDHLPEAAFYMVGGIDDVIAKAQRLAAAA

SEQ ID NO: 43700 - DNA, 1431 bp, Rhodopseudomonas palustris
  CDS (1)..(1431): transl_table=11
atggctacacccgccaatcagaccggacgcatcacgcaggtcatcggcgccgtcgtcgacgttcagttcgaagggcacctgccggccattctgaacgccatcgaaaccaagaacggcgacaaccgcctggtgctcgaagttgcgcagcatctcggtgaatcgaccgtccgcaccatcgcgatggacaccaccgaaggtctggtccgtggccaggaagtcaccgacactggcgcgccgatctcggtaccggtcggcgccggcacgctcggccgcatcatgaacgtgatcggcgagccggtcgatgagcagggcccgatcaagtcggaaggcctccgcgccatccaccaggaagcgccggcctacaccgaccagtcgaccgaggctgaaattctcgtcaccggcatcaaggtcgtcgacctgctggcgccttacgccaagggcggtaagatcggcctgttcggcggcgccggcgtcggcaagaccgtgctgattcaggaactgatcaacaacgtcgcccgcgctcacggcggttactcggtgttcgccggcgtcggcgaacgtacccgcgaaggtaacgacctctatcacgagttcatcgaatccggcgtcaacaagaagggcggcggcgagggttcgaagtgcgcgctggtgtacggccagatgaacgaaccgccgggcgcccgcgctcgcgtcggtctgaccggtctgaccgtcgccgagcacttccgcgatcagggccaggacgtgctgttcttcgtcgacaacatcttccgcttcacccaggcgggttcggaagtgtcggcgctgctcggccgtatcccgtcggcggtgggttatcagccgacgctcgcgaccgacatgggcgcgctgcaggagcgcatcaccaccaccaccaagggctcgatcacctcggtgcaggcgatttacgtgccggccgacgacttgaccgacccggcgcccgcgacctcgttcgcgcacttggacgccaccaccgtgctcaatcgtgcgatctcggaaaagggcatctacccggcggtggatccgctcgactcgacctcgcgcatgctgtccgcctcgatcgtcggcgaagagcactacaataccgcgcgtatggttcagcagatcctgcagaagtacaagtcgctgcaggacatcatcgcgatcctgggcatggacgaactgtctgaagaggacaagctcacagtggctcgcgcccgtaagatcgagcgcttcctgtcgcagccgttcttcgtcgccgaagtgttcaccggctcgccgggcaagttcgtcgacctcgccgacaccatcaagggcttccgcgcgatctgcgaaggcaagtacgaccatctgccggaagcggcgttctacatggtcggcaccatcgaagaggcggtcgagaagggcaagaagctcgccgccgaggcggcctga

SEQ ID NO: 43701 - protein, 476 aa, Rhodopseudomonas palustris
MATPANQTGRITQVIGAVVDVQFEGHLPAILNAIETKNGDNRLVLEVAQHLGESTVRTIAMDTTEGLVRGQEVTDTGAPISVPVGAGTLGRIMNVIGEPVDEQGPIKSEGLRAIHQEAPAYTDQSTEAEILVTGIKVVDLLAPYAKGGKIGLFGGAGVGKTVLIQELINNVARAHGGYSVFAGVGERTREGNDLYHEFIESGVNKKGGGEGSKCALVYGQMNEPPGARARVGLTGLTVAEHFRDQGQDVLFFVDNIFRFTQAGSEVSALLGRIPSAVGYQPTLATDMGALQERITTTTKGSITSVQAIYVPADDLTDPAPATSFAHLDATTVLNRAISEKGIYPAVDPLDSTSRMLSASIVGEEHYNTARMVQQILQKYKSLQDIIAILGMDELSEEDKLTVARARKIERFLSQPFFVAEVFTGSPGKFVDLADTIKGFRAICEGKYDHLPEAAFYMVGTIEEAVEKGKKLAAEAA

SEQ ID NO: 43702 - DNA, 1425 bp, Rhodospirillum rubrum
  CDS (1)..(1425): transl_table=11
atggccaagaacaacctcggtacgatcacgcaggtgacgggcgctgtcgttgacgtgaagttcgagggtgaacttccgtcgatcctttccgccctcgagaccgataatcacgggaaccgtctggttctcgaagtggcgcagcatctgggcgagagcgtggtccgcaccatcgccatggacagcacggaaggtctggtccgcggccagcaggtcacgtcgaccggcggtccgatcaccgttccggtcggcccccaggtgctggggcgcatcatgaacgtcatcggcgagcccgttgacgagcgtggcccggtggtcacggcgcagcgctatccgatccaccgtcaggctccgaccttcgccgagcaggcgacggaaaccgagatcctcgtcaccggcatcaaggtcatcgatctgatcgccccctacaccaagggcggcaaggtcggcctgttcggcggcgccggcgtcggcaagaccgtgctgatccaggaactgatcaacaacgtcgccaagggtcacggcgggtattcggtgttcgccggcgtcggcgagcgcacccgtgagggcaacgatctttatcacgagatgatcgacgccgggattatcgacctggaaggcgacaagtcgaaggtcgccctagtttatggccagatgaacgagccgccgggtgcgcgcgcccgcgtcgccctggccggtctgacccaggccgaatacttccgcgacgaagaaggccaggacgtgttgttcttcgtcgacaacatcttccgcttcacccaggccggttcggaagtgtcggccctgctcggtcgtatcccctcggccgtgggctatcagccgaccctggccaccgacatgggcgccctgcaagagcgtatcacctcgaccaagaagggctcgatcacctcggttcaggcgatttacgtgcccgccgacgatctgaccgacccggcgccggccgcctccttcgcccacctcgacgcgacgacgacgctcaaccgctcgatcgccgagctgggcatctacccggccgtcgatccgctcgattcgacctcccgcgcccttgatccgctggtggttggcgaagagcactacaaggtggcccgcgaagttcagcgcgtgttgcagacctataagtcgctccaggacatcatcgccatccttggcatggacgagctgtccgaagaggaccgtctggtcgtcgcccgcgcccgcaagatccagcgcttcctgtcccagccgttccatgtggccgaagtgttcaccggctcgccgggcaagctggtcagcctcgaagacacgatcaagggcttcaagggtctggtcgagggcgagtacgatcacctgcccgaacaggctttctatatggtcggcaacatggccgaagccatcgagaaggccaagaagatggccgccgaagccgcctga

SEQ ID NO: 43703 - protein, 474 aa, Rhodospirillum rubrum
MAKNNLGTITQVTGAVVDVKFEGELPSILSALETDNHGNRLVLEVAQHLGESVVRTIAMDSTEGLVRGQQVTSTGGPITVPVGPQVLGRIMNVIGEPVDERGPVVTAQRYPIHRQAPTFAEQATETEILVTGIKVIDLIAPYTKGGKVGLFGGAGVGKTVLIQELINNVAKGHGGYSVFAGVGERTREGNDLYHEMIDAGIIDLEGDKSKVALVYGQMNEPPGARARVALAGLTQAEYFRDEEGQDVLFFVDNIFRFTQAGSEVSALLGRIPSAVGYQPTLATDMGALQERITSTKKGSITSVQAIYVPADDLTDPAPAASFAHLDATTTLNRSIAELGIYPAVDPLDSTSRALDPLVVGEEHYKVAREVQRVLQTYKSLQDIIAILGMDELSEEDRLVVARARKIQRFLSQPFHVAEVFTGSPGKLVSLEDTIKGFKGLVEGEYDHLPEQAFYMVGNMAEAIEKAKKMAAEAA

SEQ ID NO: 43704 - DNA, 1428 bp, Rhodobacter sphaeroides
  CDS (1)..(1428): transl_table=11
atggcaacagcatcccaaggcaaggtgacgcaggtcatcggcgccgtggtggacgtgcagttcgacggtggcctgccgcccatcctgaacgcgctcgaaaccgagaacaacggcaagcgtctggtcctcgaagtggcccagcacctcggcgagagcaccgtccgcacgatcgccatggacgcgacggaaggtctcgtgcgcggcgcccgggtgacggacaccggcagcccgatctcggtgccggtgggtgacgccaccctcggccgcatcctgaacgtgatcggcgagccgatcgacgagaagggcgatctcggcgaggcctcgacccgcgcgatccaccagccggccccgaccttcgccgagcagtcgaccacctcggagatcctcgtcaccggcatcaaggtgatcgacctcctcgccccctactcgaaaggcggcaagatcggcctcttcggcggcgccggcgtgggcaagaccgttctcatcatggagctcatcaacaacatcgccaaggtgcactcgggctattccgtgttcgccggcgtgggtgagcggacccgtgaagggaacgacctctaccacgagatgatcgaatccggggttatcaagatcgacaacctctcggagtcgaaggtggcgctggtctacggccagatgaacgagcctccgggggcgcgtgcccgcgtggcgctgacgggcctcacgctcgccgagcagttccgcgaccagtcggggacggacgtgctgttcttcgtggacaacatcttccgcttcacccaggcgggttcggaagtgtcggcgcttctcggccgtatcccctcggccgtgggttaccagccgacgctcgccaccgacatgggtgccctgcaggagcgcatcacctcgacgaaagccggctcgatcacctcggtgcaggcgatctacgttccggccgacgaccttaccgacccggcgccggccacctcgttcgcccacctcgacgccacgaccgtgctctcgcgcgcgatctcggaactcgggatctacccggccgtggacccgctcgactccacctcgcggatcctcgatccgcagatcgtcggcgaagagcactacaacgtggcccgtgcggtgcaggggatcctccagcgctacaagtcgcttcaggacatcatcgccatcctcgggatggacgaactgtcggaagaggacaagctgtccgtggcccgcgcccggaagatccagcggttcctgagccagccgttcgacgtggcgaaggtcttcaccggctcggacggggtgcaggtcccgctcgagaaaaccatcgcctccttcaaggccgtggtaaacggcgagtatgaccacctgccggaagccgccttctacatggtcggcgacatcgaggatgtgatcgccaaggcccagcgtctcgcggcgcaggcggcgtaa

SEQ ID NO: 43705 - protein, 475 aa, Rhodobacter sphaeroides
MATASQGKVTQVIGAVVDVQFDGGLPPILNALETENNGKRLVLEVAQHLGESTVRTIAMDATEGLVRGARVTDTGSPISVPVGDATLGRILNVIGEPIDEKGDLGEASTRAIHQPAPTFAEQSTTSEILVTGIKVIDLLAPYSKGGKIGLFGGAGVGKTVLIMELINNIAKVHSGYSVFAGVGERTREGNDLYHEMIESGVIKIDNLSESKVALVYGQMNEPPGARARVALTGLTLAEQFRDQSGTDVLFFVDNIFRFTQAGSEVSALLGRIPSAVGYQPTLATDMGALQERITSTKAGSITSVQAIYVPADDLTDPAPATSFAHLDATTVLSRAISELGIYPAVDPLDSTSRILDPQIVGEEHYNVARAVQGILQRYKSLQDIIAILGMDELSEEDKLSVARARKIQRFLSQPFDVAKVFTGSDGVQVPLEKTIASFKAVVNGEYDHLPEAAFYMVGDIEDVIAKAQRLAAQAA

SEQ ID NO: 43706 - DNA, 1425 bp, Rickettsia felis
  CDS (1)..(1425): transl_table=11
atgacaaaaaatatcggtaaaattactcagattatttcagcggtggtggatgtaaaatttacgaataacggtgagttaccggaaattttaaatgctctagagtgctataacgataaacaaaggatagtgctggaagtagcacaacatataggcgatgatacggtgcgttgtattgctatggattctaccgaaggattagtgcggggtgtagaagtaatagatacaggcagtcctattcggattcccgtaggtactgagacgcttgggcgtattatgaatgttgtaggtgagccgattgacggtaaaggagacattaaaagctcaaatatttcttctatatataagtctgctcctgattttaccaaccagtcaaccgagcgtaatatattagtaaccggtattaaagttgttgatttacttgctccttatactaagggcggtaagataggattattcggtggtgcaggtgtaggtaaaaccgtgttaattatggagcttattaataacgtagctaaggcacatggcggttataccgtatttgcaggagtcggtgagagaactagagagggtaatgatctttaccatgaaatgattgactccggtgtgattgaccttgagaaaccggaaaattcaaaagtagctcttgtttatggacaaatgaacgagccgccgggagcaagggcaagagttgcattaagcggtctgaccattgcggaaagttttagagatatgaatgaggggcaagatgttttattctttgtagataatattttccgttttactcaagcaggttctgaagtatcggcgttgcttggtagaattccgtcagcggtagggtatcagcctactcttgctactgatatgggagagctacaggagcgtatcacctctactaagaacggctcaataacttccgtgcaggctatatatgtaccggcagatgatttaaccgatcctgctcctgctacttcttttgcacatttagatgctacaacagtacttagccgtcagatagccgagcttggaatttatccggcagttgacccgttagatagtaattctcaggtacttgacccgatgattgtcggtgaagagcattatagcgtagcaagacaagtgcagcagattttacaaacttataaatcgttgcaggatatcatcgctattttaggtatggatgagctatccgaagaagataagctaaccgtgtcgcgtgctagaaaaatacagcgtttcttatcacagcctttccatgtcgctgaagtatttaccggagctgaaggcaaatttgttaatttagccgatactatagcaggctttaaagggcttgtagagggtaaatacgatgatttaccagaagctgctttttatatggtcggaactatggacgaggctattgagaaagcgaagattttgaaaggataa

SEQ ID NO: 43707 - protein, 474 aa, Rickettsia felis
MTKNIGKITQIISAVVDVKFTNNGELPEILNALECYNDKQRIVLEVAQHIGDDTVRCIAMDSTEGLVRGVEVIDTGSPIRIPVGTETLGRIMNVVGEPIDGKGDIKSSNISSIYKSAPDFTNQSTERNILVTGIKVVDLLAPYTKGGKIGLFGGAGVGKTVLIMELINNVAKAHGGYTVFAGVGERTREGNDLYHEMIDSGVIDLEKPENSKVALVYGQMNEPPGARARVALSGLTIAESFRDMNEGQDVLFFVDNIFRFTQAGSEVSALLGRIPSAVGYQPTLATDMGELQERITSTKNGSITSVQAIYVPADDLTDPAPATSFAHLDATTVLSRQIAELGIYPAVDPLDSNSQVLDPMIVGEEHYSVARQVQQILQTYKSLQDIIAILGMDELSEEDKLTVSRARKIQRFLSQPFHVAEVFTGAEGKFVNLADTIAGFKGLVEGKYDDLPEAAFYMVGTMDEAIEKAKILKG

SEQ ID NO: 43708 - DNA, 1413 bp, Saccharophagus degradans
  CDS (1)..(1413): transl_table=11
atgagtagcggacgtatcgtacaaatcatcggcgctgtaattgacgtggaattcccacgcgactcagtgccaaaggtttacgacgctttaaccgtcgcagacaaaggcctcacccttgaagtacagcaacagctcggcgacggcgttgttcgtgcaattgcaatgggtggttctgagggtgttagccgcggcctagccgtagaaaacactggtgcaccaatcaacgtacctgttggtactgcgactcttggccgcatcatggacgtattgggtaaccctatcgatgaaaagggcccaatcaacgaaacagaacgtgcttctatccaccgcaaagcaccaaaatatgacgagcttgcggcatctgaagaactactagcaaccggtattaaagttatcgacctagtatgtcctttcgctaagggtggtaaagttggtctgttcggtggtgccggtgtgggtaaaaccgtaaacatgatggaattgatcaacaacatcgcaaccgagcacagcggtttatccgtatttgctggtgtgggtgagcgtactcgtgaaggtaacgacttctacttcgagatgcaggaagccggcgttgtaaacgttgataaattcgacgaatctaaagtggccatggtttatggtcagatgaacgagccacctggaaaccgtttgcgcgtagcattgactggtttgaccatggctgaaaaattccgtgacgaaggtaaagacgtactgttgttcgtagacaacatctaccgttacaccttggcggggaccgaagtatctgcactgttgggccgtatgccttcagcggtgggctaccagcctactcttgctgaagaaatgggtgtgcttcaggagcgtattacttcaaccaagactggttctattacttctatccaagcggtatacgtacctgcggatgacttgactgacccatcgccagctaccacctttgctcacttggattcaaccgttgtattgagtcgtgatattgcagcaaaaggtatctaccctgctatcgacccattggattctagctcacgtcagctagacccattaatcatcggtcaagagcactacgatactgcgcgtggcgtacagtctgttcttcagcgctacaaagaactgaaagatattattgccattttgggtatggatgaattgtctgaagaagataaattaaccgtatctcgtgcacgtaaaatcgaacgtttcttatctcagccatttaacgttgcaaaagtatttaccggtcaagacggtaaaatcgtatcgcttaaagacaccatctctggcttccagggcttgttgagcgggcaatacgacgacttacctgagcaggcgttctacatggttggctctatcgatgaagcaatcgaaaaagccaagaaaatgaaagagaaagcagcgtaa

SEQ ID NO: 43709 - protein, 470 aa, Saccharophagus degradans
MSSGRIVQIIGAVIDVEFPRDSVPKVYDALTVADKGLTLEVQQQLGDGVVRAIAMGGSEGVSRGLAVENTGAPINVPVGTATLGRIMDVLGNPIDEKGPINETERASIHRKAPKYDELAASEELLATGIKVIDLVCPFAKGGKVGLFGGAGVGKTVNMMELINNIATEHSGLSVFAGVGERTREGNDFYFEMQEAGVVNVDKFDESKVAMVYGQMNEPPGNRLRVALTGLTMAEKFRDEGKDVLLFVDNIYRYTLAGTEVSALLGRMPSAVGYQPTLAEEMGVLQERITSTKTGSITSIQAVYVPADDLTDPSPATTFAHLDSTVVLSRDIAAKGIYPAIDPLDSSSRQLDPLIIGQEHYDTARGVQSVLQRYKELKDIIAILGMDELSEEDKLTVSRARKIERFLSQPFNVAKVFTGQDGKIVSLKDTISGFQGLLSGQYDDLPEQAFYMVGSIDEAIEKAKKMKEKAA

SEQ ID NO: 43710 - DNA, 1383 bp, Salmonella paratyphi
  CDS (1)..(1383): transl_table=11
atggctactggaaagattgtccaggtaatcggcgccgtggtcgacgtcgatttccctcaggatgccgtaccacgcgtgtacgatgcccttgaggtgcagaatggtaatgagaagctggtgctggaagttcagcagcagcttggcggcggtatcgtgcgtaccatcgcgatggggtcttctgacggtctgcgtcgcggtctggatgtaaaagatctcgaacacccgatcgaagtcccggtaggtaaagctacgctgggtcgtatcatgaacgtcctgggcgaaccggtcgacatgaaaggcgagatcggcgaagaagagcgttgggcgattcaccgcgcagcgccttcctacgaagagttgtcaaactctcaggaactgctggaaaccggtatcaaagttatcgacctgatgtgtccgttcgcgaagggcggtaaagtcggtctgttcggtggtgcgggtgtaggtaaaaccgtaaacatgatggagcttatccgtaacatcgcgatcgagcactccggttactctgtgtttgcgggcgtaggtgaacgtactcgtgagggtaacgacttctaccatgaaatgaccgactccaacgttatcgataaagtatccctggtgtatggccagatgaacgagccgccgggaaaccgtctgcgcgttgcactgaccggcctgaccatggcggagaaattccgtgacgaaggtcgtgacgtactgctgttcgtcgataacatctatcgttacaccctggccggtacggaagtatccgcactgctgggtcgtatgccttccgcggtaggttaccagccgactctggcggaagagatgggcgttctgcaggaacgtatcacctccaccaagaccggttctatcacctccgtacaggcggtatacgtacctgcggatgacttaactgacccgtctccagccaccacctttgcgcacttagatgcaaccgtggtactgagccgtcagatcgcatccctgggtatctacccggccgttgacccgctggattccaccagccgtcagctggatccgctggttgttggtcaggaacactacgacaccgcgcgtggcgttcagtccatcctgcagcgttatcaggaactgaaagacatcatcgccatcctcggtatggatgaactgtctgaagaagataaactggtggtagctcgcgcgcgtaagatccagcgcttcctgtcccagccgttcttcgtggcggaagtatttaccggttctccgggcaaatacgtctccctgaaagacaccatccgtggctttaaaggcatcatggaaggcgaatacgatcacctgccggagcaggcgttctacatggtcggttccatcgacgaagccgtggaaaaagccaaaaaactttaa

SEQ ID NO: 43711 - protein, 460 aa, Salmonella paratyphi
MATGKIVQVIGAVVDVDFPQDAVPRVYDALEVQNGNEKLVLEVQQQLGGGIVRTIAMGSSDGLRRGLDVKDLEHPIEVPVGKATLGRIMNVLGEPVDMKGEIGEEERWAIHRAAPSYEELSNSQELLETGIKVIDLMCPFAKGGKVGLFGGAGVGKTVNMMELIRNIAIEHSGYSVFAGVGERTREGNDFYHEMTDSNVIDKVSLVYGQMNEPPGNRLRVALTGLTMAEKFRDEGRDVLLFVDNIYRYTLAGTEVSALLGRMPSAVGYQPTLAEEMGVLQERITSTKTGSITSVQAVYVPADDLTDPSPATTFAHLDATVVLSRQIASLGIYPAVDPLDSTSRQLDPLVVGQEHYDTARGVQSILQRYQELKDIIAILGMDELSEEDKLVVARARKIQRFLSQPFFVAEVFTGSPGKYVSLKDTIRGFKGIMEGEYDHLPEQAFYMVGSIDEAVEKAKKL

SEQ ID NO: 43712 - DNA, 1443 bp, Scenedesmus obliquus
  CDS (1)..(1443)
atgagcgatttaaacactaaaaacgtaggaaaaatttcacaaattattgggcctgtattagatattgcttttggtcaaggtcaagttccaaatatttacaatgctttaacaattaaagcaaaaaatgctgcaggtttagaaatgagtgtaacttgtgaagttcaacaacttttaggagatagttgtgtacgtgcagtagcaatgaatccaacagatggtttaatgcgtggtatggaagtattagacacaggaaaaccattaaatgtacctgttggtaaatcaactttaggacgtatttttaacgttttaggagaacctgtagataacctaggtccagtaaaaaatgaagaaagtcttccaattcaccgtacagctcctgctttcgttgatttagacactcgtctttctatttttgaaactggtattaaagttgtagatttattagctccttaccgtcgtggtggaaaaattggtttatttggtggtgctggtgtaggaaaaacggttctgatcatggaactaattaataatattgcaaaagcacacggtggggtttctgtatttgctggtgttggagaacgtactcgtgaagggaacgatttatacactgaaatgaaagaatctggtgttattgttgaaaaaaatttaattgattcaaaagtagcattagtatatggacaaatgaatgaaccaccaggtgcacgtatgcgtgttgctttaactgctttaacaatggctgaatatttcagagatgttaacaaacaagacgtattattctttattgataacattttccgatttgtacaagctggtgctgaagtttctgctttattaggacgtatgccttcagctgtaggttaccaacctacattagcaacagaaatgggtgctttacaagaacgtattacttcaacaaaagatggttcaattacatcaattcaagctgtttatgttcctgcagatgaccttactgaccctgctcctgctacaacattcgcacacttagatgctacaacagtattatcacgtggattagcttcaaaaggtatttacccagctgtagatccattagattcaacttctacaatgttacaaccttggattttaggagaaaaacactacggttgtgctcaaagtgtgaaaagaacattacaacgttacaaagaattacaagatattattgcaattttaggtttagatgaactttctgaagaagatagacttgttgttgctcgtgctcgtaaaattgaacgtttcttatcacaaccattcttcgtagctgaagtattcacaggatctcctggtaaatatgtaagtttagctgaaacaatcgaaggatttaataaaattttagctggtgaattagatgatttaccagagcaagctttctatttagtaggaaacattaacgaagctttaacaaaagctgcttctatgaaataa

SEQ ID NO: 43713 - protein, 480 aa, Scenedesmus obliquus
MSDLNTKNVGKISQIIGPVLDIAFGQGQVPNIYNALTIKAKNAAGLEMSVTCEVQQLLGDSCVRAVAMNPTDGLMRGMEVLDTGKPLNVPVGKSTLGRIFNVLGEPVDNLGPVKNEESLPIHRTAPAFVDLDTRLSIFETGIKVVDLLAPYRRGGKIGLFGGAGVGKTVLIMELINNIAKAHGGVSVFAGVGERTREGNDLYTEMKESGVIVEKNLIDSKVALVYGQMNEPPGARMRVALTALTMAEYFRDVNKQDVLFFIDNIFRFVQAGAEVSALLGRMPSAVGYQPTLATEMGALQERITSTKDGSITSIQAVYVPADDLTDPAPATTFAHLDATTVLSRGLASKGIYPAVDPLDSTSTMLQPWILGEKHYGCAQSVKRTLQRYKELQDIIAILGLDELSEEDRLVVARARKIERFLSQPFFVAEVFTGSPGKYVSLAETIEGFNKILAGELDDLPEQAFYLVGNINEALTKAASMK

SEQ ID NO: 43714 - DNA, 1578 bp, Schizosaccharomyces pombe
  CDS (1)..(1578)
atgctaaagaaacaggccctgagcgggatccgccggttttctttggcaacaaaacagtcttttgtaaagactagttataagttacctcggaagtcatggttgaataccgctaaatttaacactataagatatgcttcgacggaagcagcaaaacataataaaggatcgattaaacaagttattggtgcagttgtcgattgtcagtttgaagatgccgattcattacctagcattttgaacgctttggaagttaagcttcccgataacaaacgccttgttttggaagtagcccaacacgtcggtgaaaatactgttcgtactattgctatggatggtactgagggtcttgttcgtggaacagccgttatcgatactgggtcacccatcagcattcctgttggcccgggtacattaggccgtattatgaacgttattggtgaacccgtagatgaacgcggtcccattaaagccgttaaatactccccaatccacgctgatgctccttctttcgaagaacaatcaacaaccccagaaatcttggagaccggtattaaagttgtagatttgcttgccccatatgctcgtggtggtaagattggtctattcggtggtgcaggtgttggtaaaacagtttttatccaggaattgattaacaacattgccaaagctcatggtggttactctgtctttactggtgtcggtgaacgtacccgtgagggtaacgatttataccgggaaatgcaagaaaccggtgtcattaaattagaaggcgagtctaaggctgctcttgtctttggtcaaatgaatgagcctccaggtgctcgtgcacgtgttgctctcactggtttgactgttgctgaatatttccgcgatattgaaggacaagacgttttgcttttcattgataacattttccgttttactcaagcaggttctgaagtatcagctttgcttggtcgtattccctctgccgtcggttaccaacccacgttagccactgatatgggtgctatgcaagaacgtattaccactactaagaaaggttctattacctcagtccaagctgtctatgttccagctgacgatttaactgatcctgctcctgccactacctttgcccatttggacgctactactgtgttatctcgtagtatttccgagttgggtatttatcctgctgtcgatcctcttgactccaagtctcgtatgatggatcctcgtattcttggtgaggagcactataaccttgcaggttctgttcaacaaatgcttcaagaatacaaatcactacaagatatcattgccattcttggtatggatgaattgtctgaagctgataaattgacagttgagcgtgctcgtaaggtacaacgtttcttgtcccaaccatttgcagttgccgaagtgtttactggtattgaaggacgccttgtttccttgaaagatactatccgctcttttaaggaaattcttgaaggcaagcacgattcattacctgaatctgctttctatatggttggtagcattgacgacgctgttaagaaggctgagaagattgcacaagaattggctgcataa

SEQ ID NO: 43715 - protein, 525 aa, Schizosaccharomyces pombe
MLKKQALSGIRRFSLATKQSFVKTSYKLPRKSWLNTAKFNTIRYASTEAAKHNKGSIKQVIGAVVDCQFEDADSLPSILNALEVKLPDNKRLVLEVAQHVGENTVRTIAMDGTEGLVRGTAVIDTGSPISIPVGPGTLGRIMNVIGEPVDERGPIKAVKYSPIHADAPSFEEQSTTPEILETGIKVVDLLAPYARGGKIGLFGGAGVGKTVFIQELINNIAKAHGGYSVFTGVGERTREGNDLYREMQETGVIKLEGESKAALVFGQMNEPPGARARVALTGLTVAEYFRDIEGQDVLLFIDNIFRFTQAGSEVSALLGRIPSAVGYQPTLATDMGAMQERITTTKKGSITSVQAVYVPADDLTDPAPATTFAHLDATTVLSRSISELGIYPAVDPLDSKSRMMDPRILGEEHYNLAGSVQQMLQEYKSLQDIIAILGMDELSEADKLTVERARKVQRFLSQPFAVAEVFTGIEGRLVSLKDTIRSFKEILEGKHDSLPESAFYMVGSIDDAVKKAEKIAQELAA

SEQ ID NO: 43716 - DNA, 1425 bp, Silicibacter pomeroyi
  CDS (1)..(1425): transl_table=11
atggcgaatgcaaaaggcaaagtcacgcagatcatcggggccgtcgtcgacgtccagttcgatgatgccctgcctgaaattctgaacgcgctggaaaccgaaaacaacggcaagcgtctggtgctcgaagttgcgcagcacctgggcgagaacaccgtccgcaccatcgcaatggacgcgaccgaaggtctggtccgtggcgcggtcgtgaccgataccggcggcccgatctcggtgccggtgggcgcagccaccctgggccgcatcctgaacgtgatcggcgaaccggtggacgaaaagggcccggtgaacgccaccgagacccgtgccatccaccagcccgcaccctcgtttgacgaacagtcgacctcgtcggacatcctggtcaccggcatcaaggtgatcgacctgctggccccctattccaagggcggcaagatcggcctgttcggcggcgccggcgtgggcaagaccgttctgatcatggaactgatcaacaacatcgccaaggtgcactcgggctactcggtgttcgccggtgtgggtgaacggacccgtgagggcaacgacctctaccacgagatgatcgaatccaacgtgatcaagctcgagaacctggaagaatcgcaggtggccctggtttacggccagatgaacgagcctccgggagcccgtgcccgcgttgcgctgaccggtctgaccctggccgagcagttccgcgaccagtccggcaccgacgttctgttcttcgtggacaacatcttccgcttcacccaggccggttccgaggtgtccgcacttctgggccgtatcccttcagccgtgggttaccagccgacgctggccaccgacatgggtgcgatgcaggaacgcatcacctcgaccaaggcaggctcgatcacctcgatccaggccgtctacgttcccgcggacgaccttaccgaccccgcgcccgcaaccacctttgcgcacctcgacgcaaccacggttctgtcgcgtgcgatctcggaactgggtatctacccggctgtggacccgctcgactcgtcgagccggatcctcgatccgcaggttgtcggtgaagagcattatcaggttgcccgtgacgttcagggtatccttcagcgctacaagtcgctgcaggacatcatcgccattctcggcatggacgaactgagcgaagaggacaagctgaccgtggcccgcgcccggaaaatccagcgtttcctcagccagcccttcgacgtggcgaaagtgttcaccggctcggacggtgtgcaggttccgctggaagacaccatctcgtcgttcaaggcggttgtggccggtgaatacgaccacctgcccgaaggcgccttctacatggttggcggcatcgacgaagtgatcgccaaagccgagcggatggccgcagaagccgcctaa

SEQ ID NO: 43717 - protein, 474 aa, Silicibacter pomeroyi
MANAKGKVTQIIGAVVDVQFDDALPEILNALETENNGKRLVLEVAQHLGENTVRTIAMDATEGLVRGAVVTDTGGPISVPVGAATLGRILNVIGEPVDEKGPVNATETRAIHQPAPSFDEQSTSSDILVTGIKVIDLLAPYSKGGKIGLFGGAGVGKTVLIMELINNIAKVHSGYSVFAGVGERTREGNDLYHEMIESNVIKLENLEESQVALVYGQMNEPPGARARVALTGLTLAEQFRDQSGTDVLFFVDNIFRFTQAGSEVSALLGRIPSAVGYQPTLATDMGAMQERITSTKAGSITSIQAVYVPADDLTDPAPATTFAHLDATTVLSRAISELGIYPAVDPLDSSSRILDPQVVGEEHYQVARDVQGILQRYKSLQDIIAILGMDELSEEDKLTVARARKIQRFLSQPFDVAKVFTGSDGVQVPLEDTISSFKAVVAGEYDHLPEGAFYMVGGIDEVIAKAERMAAEAA

SEQ ID NO: 43718 - DNA, 1497 bp, Solanum bulbocastanum
  CDS (1)..(1497)
atgagaatcaatcctactacttctggttctggggtttccacgcttgaaaaaaaaaacccggggcgtgtcgtccaaatcatcggtccggtactagatgtagcctttcccccgggcaagatgccaaatatttataacgctctggtagttcaaggtcgagatagtgttggtcaaccaattaatgtggcttgtgaggtacagcaattattaggaaataatcgagttagggctgtagctatgagtgctacagacggtctaacgagaggaatggcagtgattgacacaggagctcctataagtgttccagtcgggggagcgactctgggacgaatttttaacgtgctcggagagcctgttgataatttagggcctgtagatactagtacaacgtctcctattcatagatctgcgcccgcctttatacagttggatacaaaattatctatttttgaaacaggaattaaagtagtagatcttttagccccctatcgccgtggaggaaaaatcggactattcgggggagctggagtgggtaaaacagtactcattatggaattgattaacaatattgctaaagctcacgggggcgtatccgtatttggcggagtgggtgaacgtactcgggaaggaaatgatctttacatggaaatgaaagaatctggagtgattaataaagaaaatattgcagaatcaaaagtggccctagtttacggtcagatgaatgaaccgccgggagctcgtatgagagttggtttgactgccctaactatggcggaatatttccgagatgttaatgagcaagacgtacttctatttattgacaatatcttccgtttcgtccaagcaggatccgaagtatcggccttattgggtagaatgccttccgctgtgggttatcaaccgaccctaagtaccgaaatgggttctttacaagaaagaattacttctaccaaagacgggtccataacctctattcaagcagtttatgtacccgcagacgatttgaccgaccctgctcctgctacgacatttgcacatttagatgctactaccgtactatcaagaggattggctgccaaaggtatttatccagcagtagatcctttagattcaacgtcaaccatgcttcaacctcggatcgttggtgaggaacattacgaaaccgcccaaagagttaagcaaactttacaacgttacaaagaacttcaggacattatagctatccttggattggacgaattatccgaagaggatcgtttactcgtagcaagagcgcgaaaaattgagcgtttcttatcacaaccctttttcgtagcagaagtatttaccggttctccagggaaatatgttggtctagcagaaacaattcgaggatttcaattgatcctttccggagaattagatggtcttcctgaacaggccttttatttggtaggtactatcgatgaagctaccgcgaaggctatgaacttagaaatggagagcaatttgaagaaatga

SEQ ID NO: 43719 - protein, 498 aa, Solanum bulbocastanum
MRINPTTSGSGVSTLEKKNPGRVVQIIGPVLDVAFPPGKMPNIYNALVVQGRDSVGQPINVACEVQQLLGNNRVRAVAMSATDGLTRGMAVIDTGAPISVPVGGATLGRIFNVLGEPVDNLGPVDTSTTSPIHRSAPAFIQLDTKLSIFETGIKVVDLLAPYRRGGKIGLFGGAGVGKTVLIMELINNIAKAHGGVSVFGGVGERTREGNDLYMEMKESGVINKENIAESKVALVYGQMNEPPGARMRVGLTALTMAEYFRDVNEQDVLLFIDNIFRFVQAGSEVSALLGRMPSAVGYQPTLSTEMGSLQERITSTKDGSITSIQAVYVPADDLTDPAPATTFAHLDATTVLSRGLAAKGIYPAVDPLDSTSTMLQPRIVGEEHYETAQRVKQTLQRYKELQDIIAILGLDELSEEDRLLVARARKIERFLSQPFFVAEVFTGSPGKYVGLAETIRGFQLILSGELDGLPEQAFYLVGTIDEATAKAMNLEMESNLKK

SEQ ID NO: 43720 - DNA, 1497 bp, Solanum lycopersicum
  CDS (1)..(1497)
atgagaatcaatcctactacttctggttctggggtttccacgcttgaaaaaaaaaacccggggcgtgtcgtccaaatcatcggtccggtactagatgtagcctttcccccgggcaagatgccaaatatttataacgctctggtagttcaaggtcgagatagtgttggtcaaccaattaatgtggcttgtgaggtacagcaattattaggaaataatcgagttagggctgtagctatgagtgctacagaaggtctaacgagaggaatggcagtgattgacacaggagctcctataagtgttccagttgggggagcgactctgggacgaatttttaacgtgctcggagagcctgttgataatttagggcctgtagatactagtacaacgtctcctattcatagatctgcgcccgcctttatacagttggatacaaaattatctatttttgaaacaggaattaaagtagtagatcttttagccccttatcgccgtggaggaaaaatcggactattcgggggagctggagtgggtaaaacagtactcattatggaattgattaacaatattgctaaagctcacgggggcgtatccgtatttggcggagtgggtgaacgtactcgggaaggaaatgatctttacatggaaatgaaagaatctggagtgattaataaagaaaatattgcagaatcaaaagtggccctagtttacggtcagatgaatgaaccgccgggagctcgtatgagagttggtttgactgccctaactatggcggaatatttccgagatgttaatgagcaagacgtacttctatttattgacaatatcttccgtttcgtccaagcaggatccgaagtatcggccttattgggtagaatgccttccgctgtgggttatcaaccgaccctaagtaccgaaatgggttctttacaagaaagaattacttctaccaaagaagggtccataacctctattcaagcagtttatgtacccgcagacgatttgaccgaccctgctcctgctacgacatttgcacatttagatgctactaccgtactatcaaggggattggctgccaaaggtatttatccagcagtagatcctttagattcaacgtcaaccatgcttcaacctcggatcgttggtgaggaacattacgaaaccgcccaaagagttaagcaaactttacaacgttacaaagaacttcaggacattatagctatccttggattggacgaattatccgaagaggatcgtttactcgtagcaagagcgcgaaaaattgagcgtttcttatcacaaccctttttcgtagcagaagtatttaccggttctccagggaaatatgttggtctagcagaaacaattcgaggatttcaattgatcctttccggagaattagatggtcttcctgaacaggccttttatttggtaggtactatcgatgaagctaccgcgaaggctatgaacttagaaatggagagcaatttgaagaaatga

SEQ ID NO: 43721 - protein, 498 aa, Solanum lycopersicum
MRINPTTSGSGVSTLEKKNPGRVVQIIGPVLDVAFPPGKMPNIYNALVVQGRDSVGQPINVACEVQQLLGNNRVRAVAMSATEGLTRGMAVIDTGAPISVPVGGATLGRIFNVLGEPVDNLGPVDTSTTSPIHRSAPAFIQLDTKLSIFETGIKVVDLLAPYRRGGKIGLFGGAGVGKTVLIMELINNIAKAHGGVSVFGGVGERTREGNDLYMEMKESGVINKENIAESKVALVYGQMNEPPGARMRVGLTALTMAEYFRDVNEQDVLLFIDNIFRFVQAGSEVSALLGRMPSAVGYQPTLSTEMGSLQERITSTKEGSITSIQAVYVPADDLTDPAPATTFAHLDATTVLSRGLAAKGIYPAVDPLDSTSTMLQPRIVGEEHYETAQRVKQTLQRYKELQDIIAILGLDELSEEDRLLVARARKIERFLSQPFFVAEVFTGSPGKYVGLAETIRGFQLILSGELDGLPEQAFYLVGTIDEATAKAMNLEMESNLKK

SEQ ID NO: 43722 - DNA, 1497 bp, Solanum tuberosum
  CDS (1)..(1497)
atgagaatcaatcctactacttctggttctggggtttccacgcttgaaaaaaaaaacccggggcgtgtcgtccaaatcatcggtccggtactagatgtagcctttcccccgggcaagatgccaaatatttataacgctctggtagttcaaggtcgagatagtgttggtcaaccaattaatgtggcttgtgaggtacagcaattattaggaaataatcgagttagggctgtagctatgagtgctacagacggtctaacgagaggaatggcagtgattgacacaggagctcctatacgtgttccagtcgggggagcgactctgggacgaatttttaacgtgctcggagagcctgttgataatttagggcctgtagatactagtacaacgtctcctattcatagatctgcgcccgcctttatacagttggatacaaaattatctatttttgaaacaggaattaaagtagtagatcttttagccccctatcgccgtggaggaaaaatcggactattcgggggagctggagtgggtaaaacagtactcattatggaattgattaacaatattgctaaagctcacgggggcgtatccgtatttggcggagtgggtgaacgtactcgggaaggaaatgatctttacatggaaatgaaagaatctggagtgattaataaagaaaatattgcagaatcaaaagtggccctagtttacggtcagatgaatgaaccgccgggagctcgtatgagagttggtttgactgccctaactatggcggaatatttccgagatgttaatgagcaagacgtacttctatttattgacaatatcttccgtttcgtccaagcaggatccgaagtatcggccttattgggtagaatgccttccgctgtgggttatcaaccgaccctaagtaccgaaatgggttctttacaagaaagaattacttctaccaaagacgggtccataacctctattcaagcagtttatgtacccgcagacgatttgaccgaccctgctcctgctacgacatttgcacatttagatgctactaccgtactatcaagaggattggctgccaaaggtatttatccagcagtagatcctttagattcaacgtcaaccatgcttcaacctcggatcgttggtgaggaacattacgaaaccgcccaaagagttaagcaaactttacaacgttacaaagaacttcaggacattatagctatccttggattggacgaattatccgaagaggatcgtttactcgtagcaagagcgcgaaaaattgagcgtttcttatcacaaccctttttcgtagcagaagtatttaccggttctccagggaaatatgttggtctagcagaaacaattcgaggatttcaattgatcctttccggagaattagatggtcttcctgaacaggccttttatttggtaggtactatcgatgaagctaccgcgaaggctatgaacttagaaatggagagcaatttgaagaaatga

SEQ ID NO: 43723 - protein, 498 aa, Solanum tuberosum
MRINPTTSGSGVSTLEKKNPGRVVQIIGPVLDVAFPPGKMPNIYNALVVQGRDSVGQPINVACEVQQLLGNNRVRAVAMSATDGLTRGMAVIDTGAPIRVPVGGATLGRIFNVLGEPVDNLGPVDTSTTSPIHRSAPAFIQLDTKLSIFETGIKVVDLLAPYRRGGKIGLFGGAGVGKTVLIMELINNIAKAHGGVSVFGGVGERTREGNDLYMEMKESGVINKENIAESKVALVYGQMNEPPGARMRVGLTALTMAEYFRDVNEQDVLLFIDNIFRFVQAGSEVSALLGRMPSAVGYQPTLSTEMGSLQERITSTKDGSITSIQAVYVPADDLTDPAPATTFAHLDATTVLSRGLAAKGIYPAVDPLDSTSTMLQPRIVGEEHYETAQRVKQTLQRYKELQDIIAILGLDELSEEDRLLVARARKIERFLSQPFFVAEVFTGSPGKYVGLAETIRGFQLILSGELDGLPEQAFYLVGTIDEATAKAMNLEMESNLKK

SEQ ID NO: 43724 - DNA, 1542 bp, Sphingopyxis alaskensis
  CDS (1)..(1542): transl_table=11
atggcaaccgcacccgccaccgaaaagaaggctcccgccaaaaaggccgccgcgcccaaggctgctgcgccgaagaaggccgccgctcccaaggccgctgcccccgtcggcgccgcgaccggccgcatcgcgcaggtcatcggcgccgtcgtcgacgtccagttcaccggcgaactgcccgcgatcctgaacgcgctcgaaaccgacaacaatggcaaccgcctcgtcctcgaagtcgcgcagcacctcggcgagaacaccgtccgcaccatcgcgatggacgcgaccgacggcctgacccgcggccagccggtgcgcgacaccggcgcgcagatttcggtccccgtcgggccgcagacattgggccgcatcctcaacgtcatcggcgagccgatcgacgaacgcggtccggtgaacagcgacatgaccgcgccgatccacgccaaggctcctgagtttgtcgaccagtcgaccgaagcgtcgatcctcgtcaccggcatcaaggtcatcgacctgatcgcgccctatgccaagggtggcaagatcggcctgttcggcggcgcgggcgtcggcaagaccgtgctcatccaggaactgatcaacaacatcgccaagggtcacggcggcgtcagcgtgttcgcgggcgtcggtgaacgcacccgcgaaggcaacgacctttatcacgagtttctcgatgccggcgtcatcgccaaggacgccgacggcaacccgacccccgacgggtcgaaggtcgcgctggtgttcggccagatgaacgaaccgccgggcgcgcgtgcccgcgtcgcgctctcgggcctcaccatggccgaatatttccgcgaccaggaagggcaggacgtgctcttcttcgtcgacaacattttccgcttcacccaggcgggttcggaagtgtcggcgctgctcggccgtattccctcggcggtgggttatcagccgacgctgtcgaccgacatgggcgcgctgcaggaacgcatcacctcgaccaccaagggctcgatcacctcggtgcaggcgatttacgtccccgcggacgacctgaccgacccggcgcctgcaacctccttcgctcacctggacgcgacgacgacgctcagccgcgcgatttcggaactcggcatctatcccgcggtcgatccgctcgattcgaccagccgcgtgctcaccccggcgatcgtcggtcaggaacattatgaaaccgcgcgccgcgttcaggaaacgctgcagaaatacaagtcgctgcaggacatcatcgcgatcctcggcatggacgagctgtcggaagaggacaagctggtcgtcgcccgcgcgcgcaagatccagcgcttcctcagccagcccttccacgtcgccgaagtcttcaccggcattcccggcaagttcgtgccgatcgaggaaacggtgaagtcgttcaaggcggtcgtcgacggcgaatatgaccatctgcccgaagcggccttctacatggtcggcggcatcgacgaagcggtcgccaaggccgcgaagctcgccgaagaggcgtaa

SEQ ID NO: 43725 - protein, 513 aa, Sphingopyxis alaskensis
MATAPATEKKAPAKKAAAPKAAAPKKAAAPKAAAPVGAATGRIAQVIGAVVDVQFTGELPAILNALETDNNGNRLVLEVAQHLGENTVRTIAMDATDGLTRGQPVRDTGAQISVPVGPQTLGRILNVIGEPIDERGPVNSDMTAPIHAKAPEFVDQSTEASILVTGIKVIDLIAPYAKGGKIGLFGGAGVGKTVLIQELINNIAKGHGGVSVFAGVGERTREGNDLYHEFLDAGVIAKDADGNPTPDGSKVALVFGQMNEPPGARARVALSGLTMAEYFRDQEGQDVLFFVDNIFRFTQAGSEVSALLGRIPSAVGYQPTLSTDMGALQERITSTTKGSITSVQAIYVPADDLTDPAPATSFAHLDATTTLSRAISELGIYPAVDPLDSTSRVLTPAIVGQEHYETARRVQETLQKYKSLQDIIAILGMDELSEEDKLVVARARKIQRFLSQPFHVAEVFTGIPGKFVPIEETVKSFKAVVDGEYDHLPEAAFYMVGGIDEAVAKAAKLAEEA

SEQ ID NO: 43726 - DNA, 1413 bp, Staphylococcus epidermidis
  CDS (1)..(1413): transl_table=11
atgggaattggccgtgtaactcaagttatgggtccagtaatagatgttcgttttgaacataacgaagtacctgagataaataatgcattacacatcgaagttcctaaagaagatggagcgcttcaattaacattagaagttgcacttcaactaggtgacgatgtagttcgtacaattgcaatggactcaactgacggcgttcaaagaggaatggaagttaaagatacaggtagagacataagtgtacctgtcggtgacgtaactctaggaagagtgtttaacgtactaggagaaactattgacttagatgaaaaaattgatgattcagtacgacgtgaccctatccatagacaagctccaggattcgacgaattatcaacaaaagtagaaatcttagaaactggtattaaagtagtagacttattagcaccttacataaaaggtggtaaaattggattatttggtggtgccggtgtaggtaaaaccgtactaatccaagaacttattaataacatcgctcaagaacacggtggtatctcagtattcgctggtgttggtgaacgtacacgtgaaggtaatgatctttactatgaaatgagtgacagtggtgttatcaagaaaactgcaatggtctttggtcaaatgaatgagccacctggtgcacgtatgcgtgtagcattatccggattaacaatggccgaatatttccgagatgaagaaggccaagatgtgttattattcattgataacattttcagattcactcaagctggttcagaagtttctgcgttattaggtcgtatgccatcagctgttggttatcaacctacacttgctacagaaatgggtcaattacaagaacgtataagttcaacaaataaaggttcagttacatcaattcaagctgttttcgtaccagccgatgactatactgaccctgcgccagcaacaacgttcgcacacttagattcaacaacaaacttagagcgtaaattaacagaaatgggtatttatccagctgtagacccgcttgcttctacatctagagctttggaaccttcagtagtaggtcaagagcattatgatgtggcacgtgaagttcaatctactttacaaaaatatagagagttacaagatattattgcgattcttggtatggatgaattatcagatgaagataaacaaactgtggaacgagcacgtagaattcaattcttcttatcacaaaacttccacgttgcagaacaatttactggacaaaaaggttcatatgtacctgttaaaacaacagttgcagacttcagagatattttagatggtaagtatgaccatattcctgaagacgcattccgtttagtaggtagcatggaagacgtaattgagaaagcaaaagatatgggtgttgaagtctaa

SEQ ID NO: 43727 - protein, 470 aa, Staphylococcus epidermidis
MGIGRVTQVMGPVIDVRFEHNEVPEINNALHIEVPKEDGALQLTLEVALQLGDDVVRTIAMDSTDGVQRGMEVKDTGRDISVPVGDVTLGRVFNVLGETIDLDEKIDDSVRRDPIHRQAPGFDELSTKVEILETGIKVVDLLAPYIKGGKIGLFGGAGVGKTVLIQELINNIAQEHGGISVFAGVGERTREGNDLYYEMSDSGVIKKTAMVFGQMNEPPGARMRVALSGLTMAEYFRDEEGQDVLLFIDNIFRFTQAGSEVSALLGRMPSAVGYQPTLATEMGQLQERISSTNKGSVTSIQAVFVPADDYTDPAPATTFAHLDSTTNLERKLTEMGIYPAVDPLASTSRALEPSVVGQEHYDVAREVQSTLQKYRELQDIIAILGMDELSDEDKQTVERARRIQFFLSQNFHVAEQFTGQKGSYVPVKTTVADFRDILDGKYDHIPEDAFRLVGSMEDVIEKAKDMGVEV

SEQ ID NO: 43728 - DNA, 1446 bp, Stigmatella aurantiaca
  CDS (1)..(1446): transl_table=11
atgagcgctcaagttgcgacggtaggcaagatcacccaggttctcggtcccgtgattgacgtggagttcccgccgggaggcctgcccgaggtgtacaccgccctcaaggtcaccaacaccagcatcagcgccgaggcggacaacctcaccatcgaagtggcccagcacctgggtgagaacatggtgcgctgcatctcgatggactccaccgagggcctggcccgaggccaggcggtgaagaacaccggcgcccccatccaggtgcccgtggggcaaggcaccctgggccgcatcctcaacgtcatcggcgagccggtggacgagcgcggccccatcacctcctcgcagacgtggcccattcaccgtccggcgcccaccttcgtggaccaggacgtgcgcgtgcaggccttcgagacgggcatcaaggtcatcgacctgctggggccctacacccgcggtggcaagatcggcctgttcggcggcgccggcgtgggcaagacggtgctcctgatggagctcatcgtcaacgtggccaaggagcgcggcggcttctcggtgttcgccggcgtgggcgagcgcacccgcgagggcaacgacctgtatcacgagatgcaggaaggcaacgtatcaacaccaagaacctggatggagagccagtgcgtgctggtgtacgggcagatgaatgagccgcccggcgcccgtgcccgcgtggccctctcggcgctcaccatcgccgagtacttccgggacatggaggggcacgacgtgctcctcttcgtggacaacatctttcgcttcacgcaggcaggctccgaggtgtccgcgctcctgggccgcatccccagcgccgtgggttaccagcccacgctgtccaccgagatgggcgccctccaggagcgcatcacctccaccaccaagggctcggtcacctcggtgcaggccatctacgtgcccgccgacgacctgacggacccggcgccggccaccacgttcgcccacctggatgcgaccacggtgctcaaccgcgccatctccgagctgggcatctaccccgcggtggacccgctcgactccaccagccgcatcctcgatccgaacgtggtggggccggagcactacgcggtggcgcgcaaggtccagggcatcctccagaagtacaaggagctccaggacatcatcgccatcctcggcatggacgagctgtccgagacggacaagctcaccgtggcccgcgcgcggaagatccagaagttcctgtcgcagcccttccacgtggccgaggtcttcaccggcgcgcccggccgctacgtggagctcaaggacaccatccagggcttcaaggagctcgccgagggcaagcacgacgacctgcccgaggctgccttctacatggtgggcaacatcaacgaggccatcgagaaggcgcgcaagctggccgcggcctaa

SEQ ID NO: 43729 - protein, 481 aa, Stigmatella aurantiaca
MSAQVATVGKITQVLGPVIDVEFPPGGLPEVYTALKVTNTSISAEADNLTIEVAQHLGENMVRCISMDSTEGLARGQAVKNTGAPIQVPVGQGTLGRILNVIGEPVDERGPITSSQTWPIHRPAPTFVDQDVRVQAFETGIKVIDLLGPYTRGGKIGLFGGAGVGKTVLLMELIVNVAKERGGFSVFAGVGERTREGNDLYHEMQEGNVSTPRTWMESQCVLVYGQMNEPPGARARVALSALTIAEYFRDMEGHDVLLFVDNIFRFTQAGSEVSALLGRIPSAVGYQPTLSTEMGALQERITSTTKGSVTSVQAIYVPADDLTDPAPATTFAHLDATTVLNRAISELGIYPAVDPLDSTSRILDPNVVGPEHYAVARKVQGILQKYKELQDIIAILGMDELSETDKLTVARARKIQKFLSQPFHVAEVFTGAPGRYVELKDTIQGFKELAEGKHDDLPEAAFYMVGNINEAIEKARKLAAA

SEQ ID NO: 43730 - DNA, 1455 bp, Stigeoclonium helveticum
  CDS (1)..(1455)
atgaatatttatactgaaacaaataaaaatactggtcgtcttattcaaattattggtcctgttgtagatattgcttttccagctgggaatgttcctaatatttataatgcggttgtaatcagtggaaaaaatacagcaggtgaagacatgtgtgttacatgcgaagttcaacagcttttaggagatcgttgtgttcgagcagtagctatgaatccaacagaaggtttaatgcgtggtatggatgctacggatactggtacaccattaatggtacctgtaggaaaaactactttaggtcgtatttttaatgtattaggcgaaccagtagataatctaggtccagtagaaacagaacaaaaattaccgattcaccgttctgctccagcatttacagatttagatacacgtcttgcaatttttgaaacaggtattaaagttgttgatttattagcaccttaccgacgtggtggtaaaattggtttatttggtggtgctggtgtaggaaaaactgttttaattatggaattaattaataatattgcaaaagcacacggtggtgtatcagtttttgctggtgttggtgaacgtactcgtgaaggtaatgatttatatatggaaatgaaagaatcaggtgtaatcaatgaatcaaatttatctgaatcaaaagtagctttagtttatggtcaaatgaatgaaccacctggagcgcgtatgcgtgtaggtttaacagcacttactatggctgaatatttccgtgatataaataaacaagatgtattattatttattgataatattttccgttttgttcaagcaggttctgaagtgtcagctttattaggtcgtatgccaagtgctgtaggttatcagccgactcttgcaacagaaatgggtggtttacaagaacgtattacttcaacaaaagatggttctattacttctattcaagccgtttatgttccagctgatgatttaacagatccagctccagcaacaacatttgctcacttagatgcaacaactgtattatcacgtggtctagcagcaaaaggtatctacccagctgttgatcctttagattcaacatctactatgttacaaccttggattgtaggcgatgagcattatgcttgtgctcaaaaagttaaagaaactttacaaagatataaagaattacaagatattattgctattttagggttagacgagctttcagaagaagatagattattagttgctcgtgctcgtaaaattgaacgttttttatctcaacctttctttgtagcggaagtgttcacgggcagtccaggaaaatatgtagcgttggctgaaactatccgtggttttaaaatggtttttgcaggtgaattagattcacttccagaacaagcattttatttagtaggttctattgatgaagttattgctaaagcagcagctttaacatctaaataa

SEQ ID NO: 43731 - protein, 484 aa, Stigeoclonium helveticum
MNIYTETNKNTGRLIQIIGPVVDIAFPAGNVPNIYNAVVISGKNTAGEDMCVTCEVQQLLGDRCVRAVAMNPTEGLMRGMDATDTGTPLMVPVGKTTLGRIFNVLGEPVDNLGPVETEQKLPIHRSAPAFTDLDTRLAIFETGIKVVDLLAPYRRGGKIGLFGGAGVGKTVLIMELINNIAKAHGGVSVFAGVGERTREGNDLYMEMKESGVINESNLSESKVALVYGQMNEPPGARMRVGLTALTMAEYFRDINKQDVLLFIDNIFRFVQAGSEVSALLGRMPSAVGYQPTLATEMGGLQERITSTKDGSITSIQAVYVPADDLTDPAPATTFAHLDATTVLSRGLAAKGIYPAVDPLDSTSTMLQPWIVGDEHYACAQKVKETLQRYKELQDIIAILGLDELSEEDRLLVARARKIERFLSQPFFVAEVFTGSPGKYVALAETIRGFKMVFAGELDSLPEQAFYLVGSIDEVIAKAAALTSK

SEQ ID NO: 43732 - DNA, 1437 bp, Streptomyces avermitilis
  CDS (1)..(1437): transl_table=11
atgacgacgacagttgagacggccgttgccacgggccgcgtcgcccgggtcatcggcccggtcgtcgacgtggaattccccgtcgacgcgatgccggacatgtacaacgcccttcacgtcgaggtggccgacccggccaacgccggcgagaagaagacgctgaccctggaggtcgcccagcacctgggtgacggcctggtccgcaccatctccatgcagcccaccgacggtctggtccgccaggccgcggtcaccgacaccggtacgggcatcaccgtcccggtcggcgacttcaccaagggcaaggtgttcaacaccctcggtgaggtgctgaacgtcgacgagaagtacgacggcgagcgctggtccatccaccgcaaggccccgcgcttcgacgagctcgagtcgaagaccgagatgttcgagaccggcgtcaaggtcatcgaccttctcaccccgtacgtcaagggtggaaagatcggtctgttcggtggagccggcgtcggcaagacggtgctcatccaggagatgatctaccgcgtcgccaacaaccacgacggtgtctccgtgttcgccggtgtcggtgagcgcacccgtgagggcaacgacctcatcgaggagatgtcggactcgggcgtcatcgacaagaccgccctggtcttcggccagatggacgagcccccgggcacccgtctgcgcgtggccctggccggtctgaccatggcggagtacttccgcgatgtgcagaagcaggacgtgctgttcttcatcgacaacatcttccgcttcacccaggccggttccgaggtgtcgaccctgctcggccgtatgccctccgcggtgggctaccagccgaacctggccgacgagatgggtctcctccaggagcgcatcacctcgacccgtggtcactcgatcacctcgatgcaggcgatctacgtccccgcggacgacctgaccgacccggccccggccaccacgttcgcccacctcgacgcgacgacggttctctcccgtccgatctccgagaagggcatctacccggccgtggacccgctggactccacgtcccgcatcctggacccgcgctacatcgcgcaggaccactacgacgccgccatgcgcgtcaagacggttctgcagaagtacaaggacctccaggacatcatcgcgatcctcggtatcgacgagctcggcgaggaggacaagctcgttgtccaccgcgcccgtcgcgtggagcgcttcctgtcccagaacacccacgtcgccaagcagttcaccggcgtcgacgggtcggacgtcccgctggacgagtcgatcaccgcgttcaacgcgatcatcgacggcgagtacgaccacttcccggagcaggcgttcttcatgtgcggtggcattgaggacctcaaggccaacgccaaggagctcggcgtctcctga

SEQ ID NO: 43733 - protein, 478 aa, Streptomyces avermitilis
MTTTVETAVATGRVARVIGPVVDVEFPVDAMPDMYNALHVEVADPANAGEKKTLTLEVAQHLGDGLVRTISMQPTDGLVRQAAVTDTGTGITVPVGDFTKGKVFNTLGEVLNVDEKYDGERWSIHRKAPRFDELESKTEMFETGVKVIDLLTPYVKGGKIGLFGGAGVGKTVLIQEMIYRVANNHDGVSVFAGVGERTREGNDLIEEMSDSGVIDKTALVFGQMDEPPGTRLRVALAGLTMAEYFRDVQKQDVLFFIDNIFRFTQAGSEVSTLLGRMPSAVGYQPNLADEMGLLQERITSTRGHSITSMQAIYVPADDLTDPAPATTFAHLDATTVLSRPISEKGIYPAVDPLDSTSRILDPRYIAQDHYDAAMRVKTVLQKYKDLQDIIAILGIDELGEEDKLVVHRARRVERFLSQNTHVAKQFTGVDGSDVPLDESITAFNAIIDGEYDHFPEQAFFMCGGIEDLKANAKELGVS

SEQ ID NO: 43734 - DNA, 1437 bp, Streptomyces coelicolor
  CDS (1)..(1437): transl_table=11
atgaccaccactgttgagaccgcgacggccacgggccgcgtcgcccgggtcatcggcccggtcgtcgacgtggagttccccgtcgacgcgatgccggagatctacaacgcgctgcacgtagaggtcgccgacccggccaaggagggcgagctcaagacgctgaccctcgaggtcgcccagcacctcggtgacggcctggtccgcaccatctccatgcagcccaccgacggcctgatccgtcaggccccggtgaccgacacgggcgcggccatctccgtccccgtcggcgacttcaccaagggcaaggtgttcaacaccctcggtgaggtgctgaacgtcgacgagcagtacaccggtgagcgctggccgatccaccgcaaggccccgaacttcgacgagctcgagtcgaagaccgagatgttcgagaccggcgtcaaggtcatcgacctgctgaccccgtacgtcaagggcggcaagatcggtctgttcggcggtgccggcgtcggcaagacggtgctcatccaggagatgatctaccgcgtcgccaacaaccacgacggtgtctccgtgttcgccggtgtcggcgagcgcacccgtgagggcaacgacctcatcgacgagatgagcgagtccggcgtcatcgacaagaccgcgctggtcttcggtcagatggacgagccgccgggcacccgtctgcgcgtcgcgctggccggcctcaccatggccgagtacttccgcgacgtccagaagcaggacgtgctgttcttcatcgacaacatcttccgcttcacccaggcgggctccgaggtgtcgaccctgctcggccgcatgccctccgcggtgggctaccagccgaacctggccgacgagatgggtctcctccaggagcgcatcacctcgacccgtggtcactcgatcacctcgatgcaggcgatctacgtccccgcggacgacctgaccgacccggccccggccaccaccttcgcccacctcgacgcgacgacggtgctctcccgtccgatctccgagaagggcatctacccggccgtggacccgctggactcgacgtcccgcatcctcgacccgcggtacatcgcggcggagcactacaacgccgcgatgcgcgtgaagaacatcctgcagaagtacaaggacctgcaggacatcatcgcgatcctcggtatcgacgagctgggcgaagaggacaagctcgtcgtccaccgcgcccgtcgcgtggagcgcttcctgtcccagaacacccacgtcgccaagcagttcaccggcgtcgacgggtcggacgtcccgctggacgagtcgatcgcggccttcaacgcgatctgcgacggcgagtacgaccacttcccggagcaggcgttcttcatgtgcggtggcatcgaggacctgaagaacaacgccaaggagctgggcgtctcctga

SEQ ID NO: 43735 - protein, 478 aa, Streptomyces coelicolor
MTTTVETATATGRVARVIGPVVDVEFPVDAMPEIYNALHVEVADPAKEGELKTLTLEVAQHLGDGLVRTISMQPTDGLIRQAPVTDTGAAISVPVGDFTKGKVFNTLGEVLNVDEQYTGERWPIHRKAPNFDELESKTEMFETGVKVIDLLTPYVKGGKIGLFGGAGVGKTVLIQEMIYRVANNHDGVSVFAGVGERTREGNDLIDEMSESGVIDKTALVFGQMDEPPGTRLRVALAGLTMAEYFRDVQKQDVLFFIDNIFRFTQAGSEVSTLLGRMPSAVGYQPNLADEMGLLQERITSTRGHSITSMQAIYVPADDLTDPAPATTFAHLDATTVLSRPISEKGIYPAVDPLDSTSRILDPRYIAAEHYNAAMRVKNILQKYKDLQDIIAILGIDELGEEDKLVVHRARRVERFLSQNTHVAKQFTGVDGSDVPLDESIAAFNAICDGEYDHFPEQAFFMCGGIEDLKNNAKELGVS

SEQ ID NO: 43736 - DNA, 1407 bp, Streptococcus mutans
  CDS (1)..(1407): transl_table=11
atgagcacaggcaaaattgctcaggtagttggtcctgttgttgatgttgcatttgcgacagatgataaacttcctgagattaataatgcattggtcgtttataaagatggcgacaagtctcaaagaattgttcttgaagttgcccttgaactcggtgatggactagttcgtaccattgctatggagtcaactgatggtttaacacgtgggcttgaagtctttgatacgggccgtgctatcagtgttccggttggaaaagaaacactaggtcgtgtctttaatgttcttggagatacgattgaccttgataagccttttgcagaagatgctgaacgtcagccaattcataaaaaggcaccatcatttgatgatctatcaacttcaactgagattttagaaacaggaattaaagttattgaccttcttgccccttatcttaaaggtggtaaagtcggcctttttggtggtgccggtgtcggaaagaccgttttgattcaggagttaattcataatattgctcaagagcatggcgggatttcggtatttactggtgttggtgaacggacacgtgaaggaaatgacctttattgggaaatgaaagaatctggtgttattgaaaagacagctatggtctttggtcagatgaatgaaccgcctggagcacggatgcgtgttgctcttactggtcttaccatcgctgaatacttccgtgatgtagaaggtcaggatgtgcttcttttcattgataacattttccgttttacccaagcaggttctgaagtttcagctcttcttggccgtatgccatcagccgttggttatcagccaaccttggcaactgaaatggggcaattgcaagaacggattacatcgacgaaaaaaggttctgttacctcaattcaggccatctatgtgccagccgatgactatactgaccctgcgccagctacagcctttgctcacttagattcaaccactaaccttgaacgccgtctgacacaaatggggatttacccagcggtggatcctttagcttcaagttcacgtgctctctcgcctgaaatagttggtcaagagcactacgatgttgccacagaagtacagcatgtcttgcagcgttatcgtgagttacaagatattatagctattcttggtatggatgagttatctgatgaagaaaagactctggttggccgtgcgcgtcggattcagttcttcctttcacaaaatttcaatgttgcagaacaatttacaggacagccgggttcttatgttcctgttgctgaaactgtccgtggatttaaagaaattctcgaaggaaaatatgatgaacttccagaagatgctttccgaagtgttggagctattgaggatgttgttgaaaaagccaagaatatgggtgtttaa

SEQ ID NO: 43737 - protein, 468 aa, Streptococcus mutans
MSTGKIAQVVGPVVDVAFATDDKLPEINNALVVYKDGDKSQRIVLEVALELGDGLVRTIAMESTDGLTRGLEVFDTGRAISVPVGKETLGRVFNVLGDTIDLDKPFAEDAERQPIHKKAPSFDDLSTSTEILETGIKVIDLLAPYLKGGKVGLFGGAGVGKTVLIQELIHNIAQEHGGISVFTGVGERTREGNDLYWEMKESGVIEKTAMVFGQMNEPPGARMRVALTGLTIAEYFRDVEGQDVLLFIDNIFRFTQAGSEVSALLGRMPSAVGYQPTLATEMGQLQERITSTKKGSVTSIQAIYVPADDYTDPAPATAFAHLDSTTNLERRLTQMGIYPAVDPLASSSRALSPEIVGQEHYDVATEVQHVLQRYRELQDIIAILGMDELSDEEKTLVGRARRIQFFLSQNFNVAEQFTGQPGSYVPVAETVRGFKEILEGKYDELPEDAFRSVGAIEDVVEKAKNMGV

SEQ ID NO: 43738 - DNA, 1380 bp, Thiobacillus denitrificans
  CDS (1)..(1380): transl_table=11
atgagcaacggaaaaattgttcagatcatcggcgcggtggtggacgtggaattcccgcgcgatgccatgcccaaggtcatggaagcgctgaagatgcaggcccccgagctgaccttcgaagtccagcagcagctgggcgacggcgtcgtccgcaccatcgcgatgggctcgaccgacggcctgcgccgcggcatggacgtgctgtcgaccggcaacccgatcatggtgcccgtcggccagaagacgctcggccgcatcatgaacgtgctcggcgatccggttgacgaagccggcccgatcggcgccgagacgaccatgccgatccaccgcaaggccccggcctacgccgaccaggccgcgacggtcgagattctcgaaaccggcatcaaggtcatcgacctcatcatgccgatcgccaagggcggcaaggtcggcctgttcggcggtgccggcgtcggcaagaccgtgacgctgatggaactgatccgcaacatcgctgtgcagcactcgggtttctcggtgttcgccggcgtgggcgagcgtacccgtgaaggcaacgacttctatcacgagatgaaggaaggcggcgttctcgacaaggtcgccctggtctacggccagatgaacgagcccccgggcaaccgtctgcgcgttgcgctgaccggtctgaccatggccgagtacttccgtgacgaaggccgcgacgtgctgctgttcgtcgacaacatctaccgctacacgctggccggtaccgaagtgtcggcgctcttgggccgcatgccgtccgcggtgggctaccagccgaccctggccgacgagatgggccgcctgcaggagcgcatcacctcgaccaagaccggttcgatcacctcgttccaggccgtgtacgtgccggcggacgacttgaccgacccgtcgcccgcgacgacgttcgcgcacttggacgcgacgctggtgttgagccgtcaggttgccgaactcggtatctaccccgcggtggacccgctcgactcgacctcgcggattctcgatccgcaagtcgtcggtgaggagcactacacggtcgcgcgcaaggtgcagggcacgctgcagaagtacaaggaactgcgcgacatcatcgcgattctgggcatggacgaactgtcgcccgaagacaagctggcggtgtcgcgtgcacgtaagctgcagcgcttcctgtcgcagccgttcttcgtcgccgaagtgttcaccggcgcgcccggcaagtacgtcacgctgaaagacacgatcgcgggcttcaaggccatcgtcgaaggcgagtacgaccacctgcccgagcaggcgttctacatggtcggcggcatcgaagaagcggtcgaaaaggcgaaaacgattcagtaa

SEQ ID NO: 43739 - protein, 459 aa, Thiobacillus denitrificans
MSNGKIVQIIGAVVDVEFPRDAMPKVMEALKMQAPELTFEVQQQLGDGVVRTIAMGSTDGLRRGMDVLSTGNPIMVPVGQKTLGRIMNVLGDPVDEAGPIGAETTMPIHRKAPAYADQAATVEILETGIKVIDLIMPIAKGGKVGLFGGAGVGKTVTLMELIRNIAVQHSGFSVFAGVGERTREGNDFYHEMKEGGVLDKVALVYGQMNEPPGNRLRVALTGLTMAEYFRDEGRDVLLFVDNIYRYTLAGTEVSALLGRMPSAVGYQPTLADEMGRLQERITSTKTGSITSFQAVYVPADDLTDPSPATTFAHLDATLVLSRQVAELGIYPAVDPLDSTSRILDPQVVGEEHYTVARKVQGTLQKYKELRDIIAILGMDELSPEDKLAVSRARKLQRFLSQPFFVAEVFTGAPGKYVTLKDTIAGFKAIVEGEYDHLPEQAFYMVGGIEEAVEKAKTIQ

SEQ ID NO: 43740 - DNA, 1636 bp, Nicotiana tabacum
  CDS (43)..(1539)
tttttgcaaaaacatttcgacatatttatttattttattattatgagaatcaatcctactacttctggttctggggtttccacgcttgaaaaaaaaaacccggggcgtgtcgtccaaatcatcggtccggtactagatgtagcctttcccccgggcaagatgccgaatatttataacgctctggtagttcaaggtcgagatagtgttggtcaaccaattaatgtggcttgtgaggtacagcaattattaggaaataatcgagttagggctatagctatgagtgctacagagggtctaacgagaggaatggaagtgattgacacaggagctcctataagtgttccggtcgggggagcgactctgggacgaatttttaacgtgctcggagaacctgttgataatttagggcctgtagatactagtacaacgtctcctattcatagatctgcgcccgcctttatacagttggatacaaaattatctatttttgaaacaggaattgaagtagtagatcttttagccccttatcgccgtggaggaaaaatcggactattcgggggagctggagtgggtaaaacagtacttattatggaattgattaacaatattgctaaagctcacgggggcgtatccgtatttggcggagtgggtgaacgtactcgggaaggaaatgatctttacatggaaatgaaagaatctggagtaattaatgaagaaaatattgcagaatcaaaagtagccctagtttatggtcagatgaatgaaccgccgggagctcgtatgagagttggtttgactgccctaactatggcggaatatttccgagatgttaatgagcaagacgtacttctttttattgacaatatcttccgtttcgtccaagcaggatccgaagtatcggccttattgggtagaatgccttccgctgtgggttatcaacccaccctgagtaccgaaatgggttctttacaagaaagaattacttctaccaaagaagggtccataacctctattcaagcagtttatgtacccgcagacgatttgaccgaccctgctcctgctacgacatttgcacatttagatgctactaccgtactatcaagaggattggctgccaaaggtatttatccagcagtagatcctttagattcaacgtcaaccatgcttcaacctcggatcgttggtgaggaacattacgaaaccgcccaaagagttaagcaaactttacaacgttacaaagaacttcaggacattatagctatccttggattggacgaattatccgaagaggatcgtttactcgtagcaagagcgcgaaaaattgagcgtttcttatcacaaccctttttcgtagcagaagtatttaccggttctccaggtaaatatgttggtctagcagaaacaattcgaggatttcaattgatcctttccggagaattagatggtcttcctgaacaggccttttatttggtaggtaatatcgatgaagctaccgcgaaggctatgaacttagaaatggagagcaatttgaagaaatgaccttaaatcttagtgtactgacccctaatcgaattgtttgggattcagaagtggaagaaattgttttatctactaatagcggtcaaattggcatatt

SEQ ID NO: 43741 - protein, 498 aa, Nicotiana tabacum
MRINPTTSGSGVSTLEKKNPGRVVQIIGPVLDVAFPPGKMPNIYNALVVQGRDSVGQPINVACEVQQLLGNNRVRAIAMSATEGLTRGMEVIDTGAPISVPVGGATLGRIFNVLGEPVDNLGPVDTSTTSPIHRSAPAFIQLDTKLSIFETGIEVVDLLAPYRRGGKIGLFGGAGVGKTVLIMELINNIAKAHGGVSVFGGVGERTREGNDLYMEMKESGVINEENIAESKVALVYGQMNEPPGARMRVGLTALTMAEYFRDVNEQDVLLFIDNIFRFVQAGSEVSALLGRMPSAVGYQPTLSTEMGSLQERITSTKEGSITSIQAVYVPADDLTDPAPATTFAHLDATTVLSRGLAAKGIYPAVDPLDSTSTMLQPRIVGEEHYETAQRVKQTLQRYKELQDIIAILGLDELSEEDRLLVARARKIERFLSQPFFVAEVFTGSPGKYVGLAETIRGFQLILSGELDGLPEQAFYLVGNIDEATAKAMNLEMESNLKK

SEQ ID NO: 43742 - DNA, 1497 bp, Trochodendron aralioides
  CDS (1)..(1497)
atgagaatcaatcctactatttctggtcctggggtttctacacttgaagaaaaaaacctggggcgtgtcgctcaaatcattggtccggtactggatgtagcttttcccccgggcaagatgcctaatatttacaacgctctggtagttaagggtcgagatactgtcggccaacaaattaatgtgacttgtgaggtacagcaattattaggaaataatcgagttagagctgtagctatgagtgctacagatggtctgacgagaggactggaagtgattgacacgggagctcctctaagtgttccagtcggtggagcgactctcggacgaattttcaacgttcttggagagcctgttgataatttaggtcctgtcgatactcgcacaacatctcctattcatagatctgcgcctgcctttatacagttagataccaaattatccatttttgaaacaggaattaaagtagtggatcttttagctccttatcgccgtggaggaaaaatcggactattcgggggagctggagtgggtaaaacagtactcatcatggaattgatcaacaacattgccaaagctcatggaggtgtatctgtatttggcggagtaggcgaacgtactcgtgaaggaaatgatctttacatggaaatgaaagaatctggagtgattaatgaacaaaatattgcagaatcaaaagtagctctagtctacggtcagatgaatgaaccgccgggagctcgtatgagagttggtttgactgccctaaccatggcagagtatttccgggatgttaatgaacaagatgtacttctatttatcgacaatatcttccgtttcgtccaagcaggatccgaagtatctgccttattaggcagaatgccttctgctgtgggttatcaacctacccttagtacagaaatgggttctttgcaagaaagaattacttctacaaaagaaggatccataacttctattcaagcagtttatgtacctgcggacgatttgaccgaccctgctcctgccacgacatttgcacatttagatgctactaccgtactatcaagaggattagctgccaaaggtatctatccagcagtagatcctttagattcaacgtcaactatgctccaacctcggattgttggtgaggaacattatgaaactgcgcaaagagttaagcaaactttacaacgttacaaagaacttcaggacattatagctatccttggattggacgaattatccgaagaggatcgtttaaccgtagcaagagcacgaaaaattgagcgtttcttatcacaacccttcttcgtagcagaagtatttaccggttctccagggaaatatgttggtctagcagaaacaattagggggtttcaattgatcctttccggagaattagatgggcttcctgaacaggccttttatttggtaggtaacatcgatgaagctaccgcgaaggctatgaacttagaagtggagagcaaattgaagaaatga

SEQ ID NO: 43743 - protein, 498 aa, Trochodendron aralioides
MRINPTISGPGVSTLEEKNLGRVAQIIGPVLDVAFPPGKMPNIYNALVVKGRDTVGQQINVTCEVQQLLGNNRVRAVAMSATDGLTRGLEVIDTGAPLSVPVGGATLGRIFNVLGEPVDNLGPVDTRTTSPIHRSAPAFIQLDTKLSIFETGIKVVDLLAPYRRGGKIGLFGGAGVGKTVLIMELINNIAKAHGGVSVFGGVGERTREGNDLYMEMKESGVINEQNIAESKVALVYGQMNEPPGARMRVGLTALTMAEYFRDVNEQDVLLFIDNIFRFVQAGSEVSALLGRMPSAVGYQPTLSTEMGSLQERITSTKEGSITSIQAVYVPADDLTDPAPATTFAHLDATTVLSRGLAAKGIYPAVDPLDSTSTMLQPRIVGEEHYETAQRVKQTLQRYKELQDIIAILGLDELSEEDRLTVARARKIERFLSQPFFVAEVFTGSPGKYVGLAETIRGFQLILSGELDGLPEQAFYLVGNIDEATAKAMNLEVESKLKK

SEQ ID NO: 43744 - DNA, 1404 bp, Vibrio alginolyticus
  CDS (1)..(1404): transl_table=11
atggctacaggtaagatcgtacagatcatcggtgcggtagtcgacgtagagttcccacagagcaatgtacctagtgtatatgacgctctaaacgtaacggactcaaaagagcgtctagttcttgaagttcaacaacagctaggcggtggcgtagttcgttgtatcgtaatgggtagctctgatggtttacgtcgtggagttgaagtggttaacactggcgctccaatttcagtaccagtcggtactaaaactctaggtcgtatcatgaacgtcctaggtgacgcgattgatgagcgtggtgaagtgggcgcggaagaggtttactctatccaccgcagcgcaccaagctacgaagaacaatcaaacgagatcgcacttctagaaacgggcgttaaagtaatcgacctaatttgtccattcgctaagggtggtaaaatcggtctattcggtggtgcaggtgtaggtaagaccgttaacatgatggaacttatcaacaacatcgcactacagcactcaggtctatccgtatttgcgggtgttggtgagcgtactcgtgaaggtaacgatttctactacgagatgcaggaagcgggcgttgtaaacgttgagaagcctgaagaatcgaaagtagcgatggtttacggtcagatgaacgagccaccaggtaaccgtctacgtgttgcactgactggtctaacaatggcagaacgtttccgtgacgaaggtcgtgacgtactactgttcattgataacatctaccgttacacacttgcaggtacagaggtatcggcactgctaggtcgtatgccttctgcggtaggttaccagccaactcttgcagaagagatgggtgtacttcaggagcgtatcacgtcaacgaaatcaggttctatcacgtctgtacaggcggtatacgtacctgcggatgacttgactgacccgtctccagcaaccacgttcgcgcacttggatgcaacggttgtacttaaccgtaacatcgctgctatgggtctataccctgcgatcgacccactagattcaacatctcgtatgcttgatccactagtagttggtcaagatcactacgaagttgctcgtggcgttcagcagacacttcagcgctacaaagagctgaaagacatcattgctatcctaggtatggacgagctatctgaagaagataagcaagttgtatctcgtgcacgtaagattgagcgtttcctaactcagccttaccacgtagcagaagtatttacaggtgaccctggtatttacgtacctctaaaagagactctacgtggcttcaaaggtctactagctggtgaatacgacgacattcctgagcaggcattcatgtactgcggtagcatcgacgatgctattgagaatgcgaagaagctataa

SEQ ID NO: 43745 - protein, 467 aa, Vibrio alginolyticus
MATGKIVQIIGAVVDVEFPQSNVPSVYDALNVTDSKERLVLEVQQQLGGGVVRCIVMGSSDGLRRGVEVVNTGAPISVPVGTKTLGRIMNVLGDAIDERGEVGAEEVYSIHRSAPSYEEQSNEIALLETGVKVIDLICPFAKGGKIGLFGGAGVGKTVNMMELINNIALQHSGLSVFAGVGERTREGNDFYYEMQEAGVVNVEKPEESKVAMVYGQMNEPPGNRLRVALTGLTMAERFRDEGRDVLLFIDNIYRYTLAGTEVSALLGRMPSAVGYQPTLAEEMGVLQERITSTKSGSITSVQAVYVPADDLTDPSPATTFAHLDATVVLNRNIAAMGLYPAIDPLDSTSRMLDPLVVGQDHYEVARGVQQTLQRYKELKDIIAILGMDELSEEDKQVVSRARKIERFLTQPYHVAEVFTGDPGIYVPLKETLRGFKGLLAGEYDDIPEQAFMYCGSIDDAIENAKKL

SEQ ID NO: 43746 - DNA, 1404 bp, Vibrio cholerae
  CDS (1)..(1404): transl_table=11
atggctacaggtaagatcgtacagatcatcggtgcggtagtcgacgtagagttcccacagagcgaagtaccaagtgtttacgatgctctgaatgttgtggattccaaagaacgtctggttctggaagttcaacagcagctaggcggtggcgtgattcgcgctatcgttatgggtagctcggatggtttacgtcgtggaatgacagtacaaaacactggcgctccaatttcagtaccagtaggtactaaaaccctaggtcgtatcatgaacgtgcttggtgatgcgattgacgaacgtggcgacattggcgcagaagaggtgtactcgattcaccgtcctgctccaagctacgaagaacagtctagtgcaactgaacttttggaaacgggtgttaaggttatcgacctgatctgtccgtttgcgaaaggcggtaaaatcggtctgttcggtggtgcgggtgtaggtaagaccgttaacatgatggaacttatcaacaacatcgcgctacagcactcaggtttgtcagtatttgctggggtaggtgagcgtactcgtgagggtaacgacttctaccacgaaatgcaggaagcgggcgttgtaaacgttgaacaaccagaactgtcgaaagtagcgatggtttacggtcagatgaacgagccaccaggcaaccgtctgcgtgtagcactgactggtctgactatggcggaaaagttccgtgatgaaggccgtgacgtactgctgtttatcgacaacatctaccgttacaccctagcgggaacggaagtatctgctctgcttggccgtatgccttcagcggtaggttaccaaccaacactggctgaagagatgggtgttctgcaagaacgtatcacgtcaaccaaaaaaggttctatcacctctgtacaagcggtatacgtacctgcggatgacttgactgacccatcaccagcaaccacgtttgctcacttggatgcaactgtggttctgaaccgtaacatcgccgctatgggtctatacccagcgatcgacccactggattcgacttcacgtcaattggatccactggttgttggtcaagagcactacgatgtggcgcgtggcgtgcaagcaacgctacaacgctataaagagctgaaagacatcatcgcgattctaggtatggacgaactgtctgaagcggacaagcaagtcgttgctcgtgcgcgtaagatcgaacgtttcctgactcagccttaccacgtagcagaagtctttactggcgatccaggggtatacgtacctctgaaagaaaccctgcgtggtttcaaaggtctgctggcaggtgactacgatgacattccagagcaagcgtttatgtactgcggtacgattgacgatgctatcgagaatgcgaagaagctataa

SEQ ID NO: 43747 - protein, 467 aa, Vibrio cholerae
MATGKIVQIIGAVVDVEFPQSEVPSVYDALNVVDSKERLVLEVQQQLGGGVIRAIVMGSSDGLRRGMTVQNTGAPISVPVGTKTLGRIMNVLGDAIDERGDIGAEEVYSIHRPAPSYEEQSSATELLETGVKVIDLICPFAKGGKIGLFGGAGVGKTVNMMELINNIALQHSGLSVFAGVGERTREGNDFYHEMQEAGVVNVEQPELSKVAMVYGQMNEPPGNRLRVALTGLTMAEKFRDEGRDVLLFIDNIYRYTLAGTEVSALLGRMPSAVGYQPTLAEEMGVLQERITSTKKGSITSVQAVYVPADDLTDPSPATTFAHLDATVVLNRNIAAMGLYPAIDPLDSTSRQLDPLVVGQEHYDVARGVQATLQRYKELKDIIAILGMDELSEADKQVVARARKIERFLTQPYHVAEVFTGDPGVYVPLKETLRGFKGLLAGDYDDIPEQAFMYCGTIDDAIENAKKL

SEQ ID NO: 43748 - DNA, 1404 bp, Vibrio vulnificus
  CDS (1)..(1404): transl_table=11
atggctacaggtaagatcgtacagatcatcggtgcggtagtcgacgtagagttcccacagagcgatgtaccaagtgtatacgacgctctaaacgtaaaggactcaaaagagcgtcttgttcttgaagttcaacaacagctaggcggtggcgtagttcgttgtatcgtaatgggtagctctgatggtttacgtcgtggagttgaagtagtaaatacaggcgctccaatttcagtaccagtaggtactaagaccctaggtcgtatcatgaacgtgcttggtgatgcgattgacgagcgtggtgagatcggtgcagaagagctgtactcaattcaccgtccagcgccaagctacgaagagcagtcaaatgcgactgaacttctagaaacaggcgttaaagtaatcgacttgatttgtcctttcgctaagggtggtaaaatcggtctattcggtggtgcaggtgtaggtaagaccgttaacatgatggaacttatcaacaacatcgcactgcaacactctggtctatctgtattcgcaggtgtaggtgagcgtactcgtgagggtaatgacttctaccacgagatgcaggaagcgggtgttgtaaacatcgagaagcctgaagaatcaaaagtagcgatggtttacggtcagatgaacgagcctccaggtaaccgtctacgtgttgcactgactggcctgacaatggcagagcgtttccgtgacgaaggtcgtgacgttctactgtttgtcgataacatctaccgttacacacttgctggtacagaggtatctgcactgctaggccgtatgccttcagcggtaggttaccagccaactcttgcagaagagatgggtgtacttcaggagcgtatcacgtcaacgaagcaaggttctatcacgtctgtacaggcggtatacgtacctgcggatgacttgactgacccgtctccagcaacaacgttcgcgcacttggatgcaacggttgtacttaaccgtaacatcgcagcgatgggtctatacccagcgatcgacccactggattcgacgtctcgtcagctagacccacttgttgtaggtcaagagcactatgacactgctcgtggtgttcagcagacacttcagcgctacaaagagctgaaagacatcatcgcaatcctaggtatggacgagctatctgaatcagataagcaagtggttgcgcgtgcacgtaagattgagcgtttcctaactcagccttaccacgtagcggaagtatttacaggcgacccaggtgtttacgtacctcttaaagagactctacgtggcttcaaaggtctactagctggtgaatacgatgacattccagagcaagcgtttatgtactgcggtactatcgacgaagctattgagaatgctaagaagctataa

SEQ ID NO: 43749 - protein, 467 aa, Vibrio vulnificus
MATGKIVQIIGAVVDVEFPQSDVPSVYDALNVKDSKERLVLEVQQQLGGGVVRCIVMGSSDGLRRGVEVVNTGAPISVPVGTKTLGRIMNVLGDAIDERGEIGAEELYSIHRPAPSYEEQSNATELLETGVKVIDLICPFAKGGKIGLFGGAGVGKTVNMMELINNIALQHSGLSVFAGVGERTREGNDFYHEMQEAGVVNIEKPEESKVAMVYGQMNEPPGNRLRVALTGLTMAERFRDEGRDVLLFVDNIYRYTLAGTEVSALLGRMPSAVGYQPTLAEEMGVLQERITSTKQGSITSVQAVYVPADDLTDPSPATTFAHLDATVVLNRNIAAMGLYPAIDPLDSTSRQLDPLVVGQEHYDTARGVQQTLQRYKELKDIIAILGMDELSESDKQVVARARKIERFLTQPYHVAEVFTGDPGVYVPLKETLRGFKGLLAGEYDDIPEQAFMYCGTIDEAIENAKKL

SEQ ID NO: 43750 - DNA, 1497 bp, Vitis vinifera
  CDS (1)..(1497)
atgagaataaatcctactacttctggtcctggggtttccacgcttgaaaaaaaaaacctggggcgtatcgctcaaatcattggtccggtcctggatgtagcttttcccccgggcaagatgcctaatatttacaatgcgctggtagttaagggtcgagatactgtcggtcaacaaattaatgtgacttgtgaggtacagcaattattaggaaataatcgagttagagctgtggctatgagtgctacagatggtctaatgagaggaatggaagtgattgacacgggagctcctctaagtgttccagtcggtggagcgactctcggacgaattttcaacgtgcttggagagcctgttgataatttaggtcctgtagatactcgcacaacatctcctattcatagatctgcgcccgcctttatacagttagatacaaaattatccatttttgaaacaggaattaaagtagtggatcttttagctccttatcgccgtggaggaaaaattggactattcgggggagctggagtgggtaaaacagtactcattatggaattgatcaacaacattgccaaagctcatgggggtgtatctgtatttggcggagtaggtgaacgtactcgtgaaggaaatgatctttacatggaaatgaaagaatctggagtgattaatgaaaaaaatatttcagaatcaaaagtggctctagtctacggtcagatgaatgaaccgccgggagctcgtatgagagttggtttgactgccctaactatggcggaatatttccgagatgttaatgaacaagacgtacttctatttatcgacaatatcttccgtttcgtccaagcaggatccgaagtatctgccttattgggcagaatgccttccgctgtgggttatcaacctacccttagtaccgaaatgggtactttacaagaaagaattacttctaccaaggaggggtccataacttctattcaagcagtttatgtacctgcggacgatttgaccgaccctgcccctgccacaacatttgcacatttagatgctactaccgtactatcaagaggattagctgccaaaggtatctatccagcagtagatcctttagattcaacgtcaactatgctccaacctcgtatcgttggtgaggaacattatgaaactgcgcaaagagttaagcaaactttacaacgttacaaagaacttcaagacattatagctatccttgggttggacgaattatccgaagaggatcgtttaaccgtagcaagagcacgaaaaattgagcgtttcttatcacaaccctttttcgtagcagaagtatttaccggttctccagggaaatatgttggtctagcagaaacaattagagggtttcaattgatcctttccggagaattagatggtcttcccgaacaggccttttatttggtaggtaacatcgatgaagctaccgcgaaggctatgaacttagaaatggagagcaaattgaagaaatga

SEQ ID NO: 43751 - protein, 498 aa, Vitis vinifera
MRINPTTSGPGVSTLEKKNLGRIAQIIGPVLDVAFPPGKMPNIYNALVVKGRDTVGQQINVTCEVQQLLGNNRVRAVAMSATDGLMRGMEVIDTGAPLSVPVGGATLGRIFNVLGEPVDNLGPVDTRTTSPIHRSAPAFIQLDTKLSIFETGIKVVDLLAPYRRGGKIGLFGGAGVGKTVLIMELINNIAKAHGGVSVFGGVGERTREGNDLYMEMKESGVINEKNISESKVALVYGQMNEPPGARMRVGLTALTMAEYFRDVNEQDVLLFIDNIFRFVQAGSEVSALLGRMPSAVGYQPTLSTEMGTLQERITSTKEGSITSIQAVYVPADDLTDPAPATTFAHLDATTVLSRGLAAKGIYPAVDPLDSTSTMLQPRIVGEEHYETAQRVKQTLQRYKELQDIIAILGLDELSEEDRLTVARARKIERFLSQPFFVAEVFTGSPGKYVGLAETIRGFQLILSGELDGLPEQAFYLVGNIDEATAKAMNLEMESKLKK

SEQ ID NO: 43752 - DNA, 2861 bp, Triticum aestivum
  CDS (731)..(2227)
gaattctcacaataacagggtctactcgatgttaattaggcgtaaatgaaactttagcaaaaatctcgtaaaacaaaaaggatattcaattaatataatatcaactcattaaagaaaattgagggcatgcttaggttaatgaatatgtttcattcatatataatgcgtacaccctgtgtatgttctatcctataggaattcgagttgttgttatggtaagttaacacggttcgttattaaaccatggatttgatttaccaaatccataattattgtatactctttgatagatatagcgcaacccaaattaattcctaatccttattttaaaagttcttaatagttctcttttcttattttgaatgcaaatacctaactaaatactaataaaattctttgttgacagcaatctatgcttcacagtagtatatattttgtatatcgaagtcctagataggaaagtagagtaggcacagatcctccacaaaaggcaaaatgtatatgaaaaaaagattgattgaactttccaacggactcattccatgagtaaacgattgaatgggattcgcttgggcaacgaaatcaagtcctggtccccttttctctcttattgaattaactaattcatttcctttttacttttggattttttttgatttgatttggcattattcaacaataaaaaaagaaaaatttcgacaaattccttttttttaattatgtgataattatgagaaccaatcctactacttctcctcccggggcttccacaattgaagaaaaaagtacaggtcgtatcgatcaaattattggacccgtgctggatgtcacttttcccccaggcaagttaccttatatttataacgctttggtagtccagagtagagacactgacgataagcaaattaatgtgacttgtgaggtacaacaattattaggaaataatcgagttagagctgtagctatgagtgctacggacgggttgatgagaggaatggaagtgattgacacgggagctcctctcagtgttccggtcggtggagctactcttggacgaattttcaacgttcttggggagcctgttgacaatttgggtcctgtagatagtagtgcaacgttccctattcatagatctgcgcctgcctttatcgagttagatacgaaattatccatctttgaaacaggtattaaggtcgtcgatcttttagctccttatcgacgtggaggaaaaataggactatttgggggggctggagtaggtaaaacagtactgatcatggaattaatcaataacattgctaaagctcatgggggcgtatccgtattcggtggagtaggggaacggactcgtgaaggaaatgatctttatatggaaatgaaggaatccggagtaattaatgaaaaaaatattgaggaatcaaaggtagctctagtctatggccaaatgaatgaaccaccgggagctcgtatgagagttggtttaactgccctaactatggcggaatatttccgagatgttaataagcaagacgtgcttttatttatcgataatatctttcgttttgttcaagcaggatcagaggtatccgctttattagggagaatgccctccgcagtgggttatcaacctactcttagtacagaaatgggttctttgcaagaaagaattgcttctactaaaaagggatctataacttcgattcaagcagtttatgtacctgcagacgatttgaccgaccctgcccctgccacaacatttgcacatttggatgctactaccgtactttccagaggattagcttccaagggtatttatccagcagtagatcctttagattcaacctcgactatgttacagcctcggatcgttggcaacgaacattatgaaactgcgcaaagagttaaggaaactttacaacgttacaaagaacttcaggacattattgcaattcttggcttggatgaattatcggaagaggatcgtttaactgtagcaagagcaagaaaaattgagcgtttcttatcacaaccgttctttgtggcagaagtttttactggttctccaggaaagtatgttgctcttgcggaaactattaggggatttcaactaatcctttccggagaattagacggcctacctgaacaggctttttatttggtgggtaacatcgatgaagctagcacgaaagctataaccttagaagaggagaacaaatcgcagaaatgaaattaaatctttatgtactgactcctaagcgaattatttgggattgtgaggtgaaagaaatcattttatccactaatagtggccaaattggcgtattaccaaaccacgcccccattaacacagcagtagatatgggtcctttgagaatacgcctcctcaacgaccaatggttaacagcggttctgtggagcggttttgcgagaatagttaataatgagatcatcattttaggaaatgatgcggaacttggtagtgatattgatccggaagaagctcaaaaggcacttgaaatagccgaagctaacttgagtaaagctgagggtacgaaagatttggttgaagcgaagctcgctctcagacgagctaggatacgaatcgaggctgtcaattggattcccccatccaattgaagacaatccagtggtttatagttgatacaaagaaaaagggaagaggggtagaaaaagttattagatagcgaagcgaagtaagtccaatgctatctagtaatttttctacctacttacctactattggatttgaaccaatgactcccgccgtatgaaagcaatactctaaccactgagttaagtaggcaatttatcaccacaaaggaagacccattacttcgatc

SEQ ID NO: 43753 - protein, 498 aa, Triticum aestivum
MRTNPTTSPPGASTIEEKSTGRIDQIIGPVLDVTFPPGKLPYIYNALVVQSRDTDDKQINVTCEVQQLLGNNRVRAVAMSATDGLMRGMEVIDTGAPLSVPVGGATLGRIFNVLGEPVDNLGPVDSSATFPIHRSAPAFIELDTKLSIFETGIKVVDLLAPYRRGGKIGLFGGAGVGKTVLIMELINNIAKAHGGVSVFGGVGERTREGNDLYMEMKESGVINEKNIEESKVALVYGQMNEPPGARMRVGLTALTMAEYFRDVNKQDVLLFIDNIFRFVQAGSEVSALLGRMPSAVGYQPTLSTEMGSLQERIASTKKGSITSIQAVYVPADDLTDPAPATTFAHLDATTVLSRGLASKGIYPAVDPLDSTSTMLQPRIVGNEHYETAQRVKETLQRYKELQDIIAILGLDELSEEDRLTVARARKIERFLSQPFFVAEVFTGSPGKYVALAETIRGFQLILSGELDGLPEQAFYLVGNIDEASTKAITLEEENKSQK

SEQ ID NO: 43754 - DNA, 1389 bp, Wigglesworthia glossinidia brevipalpis
  CDS (1)..(1389): transl_table=11
atggatactgggaaaatagtccaaattattggacctgtaatagatgtaaaatttgaaatatctttcattccaaaaataaattttgctcttgagataaaaataaaaaacaaaaaattaatcatggaagtaatgcaacaaataggagatgggatagtacgatgtattttgatgggatcctccgatggattaaaaagaggattaaaagtttttaatttaaataaaggaatagaagttcctgtaggaaaacctactcttggaagaataatgaatgtattaggagatcctatagatagaaaaggaaaaattttatcaagtgaatacagaccaattcataataaatctccaagttataacgaaatttctagctcagatgaactacttgaaactggaattaaaataatagatttaatttgtcctttcgcaaaaggaggaaaaataggattgtttggaggagctggagttggaaaaactgttaatatgatggaattaattagaaatatagctattgaacattcaggatattctgttttttctggggttggagaaagaactagagaaggaaatgatttttataatgaaatgatatcctccaatgtaatagataaagtatctttagtttatggtcaaatgaacgaaccaccaggaaatagattaagagtagcactaacaggattgacattagctgaaaaattcagagatgaaggaaatgatgtattattttttgttgataatatttatagatatactttagctggaacagaagtatctgctcttctaggaagaattccttctgcagtgggttatcagcctactctttctgaagaaatgggtattttacaagaaagaattacttccaccaagtctggatcaattacttctgtacaagctatttatgttccagctgatgatcttacagatccttctccagcaactacttttgttcatttagatgcaactgtagtgttaagtcgtcaaattgcttctttagggatttatcctgctattgatcctttagattctactagtagacaattagatccattaatagtaggagaagatcattatttagtagctagaaaaatacaatcaatattacaacgctacaaagatttaaaagatattatagctattttaggaatagatgaattatcagaagaagataaaattttagtatctagagctcgtaaaattcaacgttttttatctcaacctttttttgtagcagaaatttttactggattttcaggcaaatatgttactttaaaggatactattgatggatttaatagcattataaatggagaatatgattatataccagaacaagcattttatatgacaggaaatatttcagatgttttagataaatataaaaaattttattcttaa

SEQ ID NO: 43755 - protein, 462 aa, Wigglesworthia glossinidia brevipalpis
MDTGKIVQIIGPVIDVKFEISFIPKINFALEIKIKNKKLIMEVMQQIGDGIVRCILMGSSDGLKRGLKVFNLNKGIEVPVGKPTLGRIMNVLGDPIDRKGKILSSEYRPIHNKSPSYNEISSSDELLETGIKIIDLICPFAKGGKIGLFGGAGVGKTVNMMELIRNIAIEHSGYSVFSGVGERTREGNDFYNEMISSNVIDKVSLVYGQMNEPPGNRLRVALTGLTLAEKFRDEGNDVLFFVDNIYRYTLAGTEVSALLGRIPSAVGYQPTLSEEMGILQERITSTKSGSITSVQAIYVPADDLTDPSPATTFVHLDATVVLSRQIASLGIYPAIDPLDSTSRQLDPLIVGEDHYLVARKIQSILQRYKDLKDIIAILGIDELSEEDKILVSRARKIQRFLSQPFFVAEIFTGFSGKYVTLKDTIDGFNSIINGEYDYIPEQAFYMTGNISDVLDKYKKFYS

SEQ ID NO: 43756 - DNA, 1428 bp, Wolbachia pipientis wMel
  CDS (1)..(1428): transl_table=11
atgaatataggtagagcgattaaggtaactcaagcagttgttgatataaaatttgaaggtgaattgcctaaaatatttaatgctttaaaaagcaaactaaaatataaggataaggagctggttttagaagtttcgcagcatataggtgacaatatagttcgttgtattgctatggatagcacagatggcatgtcaaggggggatgaatttgttgatacaggtgcaccaatatcggtgccaattgggcgttcaactttaggaaggatttttaatgttgttggagagcttatagatgagtgtggtccactgaagggaaagtataacttagagcctatacacagagcacctccaagttttactgaacagagaatacaggaagaagttttagttacgggaataaaagttatagatcttcttgcaccttatcttaaaggaggaaaaattggcttatttggtggagccggtgttggtaaaacagtcctaataatggaattaattaataatatagcaaaagctcataaaggattttctgtgtttgccggggtaggggagagaacgcgtgaaggtaacgatctttatcacgagatgatcacttcaaatgtaataaatataaatgagcatgaaaaatctcaagctgttttggtttatggtcagatgaatgagcctcctggagcaagggctagagttgctttaacagcacttactatggcagagtattttcgtgaccgtgaaaaccaagatgttctattttttgtggataatatctttagatttacacaagctggttctgaaatttctgctttacttggaagaataccgtcagctgttggttatcagccaacccttgcaactgatatgggtgcaatgcaagaaagaatagcttcaacaacttctggctctattacttctgtgcaagctatatatgttcctgcggacgatttgactgatccagccccagcaactacattctctcaccttgatgcaaccacagtgttgtcaaggcaaatagctgaaatgggaatataccctgctgttgatccacttgattcaacttctcagtctttatctgctgaaatcattggtgaagaacattataatgtagcttctgaggtgaaacgtatattgcaaacttataaatcactgcaagatattatcgcaatacttggtatggatgagctatctgatgaagataaaattattgttgatagggctcggaagattcagaaatttctttctcaaccttttcacgttgcagaaatatttactggcatgcctggtaaatttgtttcactttctgatactgtttccagttttaaagggattgttgaaggcaaatatgatcacttaccagaggctgctttttatatggtggggaatatagatgaagcaataaaaaaggctgaattaatacaagctgaagctaaataa

SEQ ID NO: 43757 - protein, 475 aa, Wolbachia pipientis wMel
MNIGRAIKVTQAVVDIKFEGELPKIFNALKSKLKYKDKELVLEVSQHIGDNIVRCIAMDSTDGMSRGDEFVDTGAPISVPIGRSTLGRIFNVVGELIDECGPLKGKYNLEPIHRAPPSFTEQRIQEEVLVTGIKVIDLLAPYLKGGKIGLFGGAGVGKTVLIMELINNIAKAHKGFSVFAGVGERTREGNDLYHEMITSNVININEHEKSQAVLVYGQMNEPPGARARVALTALTMAEYFRDRENQDVLFFVDNIFRFTQAGSEISALLGRIPSAVGYQPTLATDMGAMQERIASTTSGSITSVQAIYVPADDLTDPAPATTFSHLDATTVLSRQIAEMGIYPAVDPLDSTSQSLSAEIIGEEHYNVASEVKRILQTYKSLQDIIAILGMDELSDEDKIIVDRARKIQKFLSQPFHVAEIFTGMPGKFVSLSDTVSSFKGIVEGKYDHLPEAAFYMVGNIDEAIKKAELIQAEAK

SEQ ID NO: 43758 - DNA, 1404 bp, Wolinella succinogenes
  CDS (1)..(1404): transl_table=11
atggaaggaagaataacccaggttatgggtcctgtcgttgatgtcgatttcgattcgtatcttcccgcgatcaatgaggcgctggatgtcaattacgatatcgaaggacatcccaagaagttggtgttggaagtggcggcacatattggtgatagccgtgtgagaaccatcgctatggatatgacagagggcttgacgcgaggaactaaagtggttgctcgaggaaaatccatcgaggttcccgtaggcgagcaggttcttggaagaatcttcaacgtagtgggcgatgtgattgatgggggcgatgagctcaaagagcctgtgaagtggtcgattcaccgaacagctcctacatttgaaaaccaaagcaccaaaacagagatgtttgaaacagggatcaaagtggttgaccttttggctccttactccaagggtggtaaagttggactctttgggggtgcgggcgttggcaagaccgttgttattatggaacttattcacaacgttgctttcaaacacagcggttactccgtatttgcgggtgtaggcgagcgaacccgtgaggggaatgacctctatcacgagatgaaagaatcgggtgttttggataaagttgccctatgctatggacagatgaacgagccccccggcgcaagaaaccgaatcgccttcacgggcttgactatggcggaatatttccgagatgagaagggattggatgttttgatgtttattgataacatcttccgatacgctcaatcaggggctgagatgtcagcgcttcttgggcgaattccttcagcggttggttatcagcctacattggctagcgagatgggcaagctccaagagcgaatcacctccaccaaaaagggatctatcacctctgttcaagcggtttatgttcccgcggatgaccttacagaccctgcgcctgcatcggtgtttgcccaccttgatgcaactacggttttgaaccgaaagatcgctgagaaaggaatctaccctgcggttgaccctcttgattcaacctcaagaatccttgatcctcaagtagttggtgaagatcactacaagaccgccacaggcgttcagcaagtgcttcaaaaatacaaagacctccaagatatcatcgcgattcttggtatggatgagctttctgaagaggataagcgagtggttgagcgagcacgaagaattgagaaattcctctctcaacccttcttcgttgcggaagtgttcactggaagccctggcaaatatgtgacgcttcaagagaccctagagggcttcaaaggaatcttggaaggcaagtatgaccagattcctgagaacgctttctatatggtgggtggaatcgacgaagtcttggagaaggccgagcggctcaaagctaacgcttaa

SEQ ID NO: 43759 - protein, 467 aa, Wolinella succinogenes
MEGRITQVMGPVVDVDFDSYLPAINEALDVNYDIEGHPKKLVLEVAAHIGDSRVRTIAMDMTEGLTRGTKVVARGKSIEVPVGEQVLGRIFNVVGDVIDGGDELKEPVKWSIHRTAPTFENQSTKTEMFETGIKVVDLLAPYSKGGKVGLFGGAGVGKTVVIMELIHNVAFKHSGYSVFAGVGERTREGNDLYHEMKESGVLDKVALCYGQMNEPPGARNRIAFTGLTMAEYFRDEKGLDVLMFIDNIFRYAQSGAEMSALLGRIPSAVGYQPTLASEMGKLQERITSTKKGSITSVQAVYVPADDLTDPAPASVFAHLDATTVLNRKIAEKGIYPAVDPLDSTSRILDPQVVGEDHYKTATGVQQVLQKYKDLQDIIAILGMDELSEEDKRVVERARRIEKFLSQPFFVAEVFTGSPGKYVTLQETLEGFKGILEGKYDQIPENAFYMVGGIDEVLEKAERLKANA

SEQ ID NO: 43760 - DNA, 1401 bp, Xylella fastidiosa
  CDS (1)..(1401): transl_table=11
atgaatcagggtaagatcgttcagatcatcggcgcaattgtcgacgtcgaattcccacgaaacaatgtccccaaagtatataacgcgctgaagatcgacggcacagccatcatcttggaagtgcagcaacagcttggcgacggcattgtacgcacaatagcacttggctccacagacggcttaaaacgcaacctcattgccaccgacaccggccatgcaatcacagttcccgtaggcactggcacattaggtcgcatcatggatgtactaggcaacccaatcgacgaagcaggtccgatcacttatacagatcaatgggaaatccatcgaaacgctccttcctatgaagatcaagcctcaaccaccgaactgctggagaccggaatcaaggtcatcgaccttatgtgtccatttgctaaaggcggcaaagtcggattattcggtggtgccggtgtcggcaaaactgtcaacatgatggaattgatcaataacatcgccaaggcacatagtgggctgtccgtattcgcgggtgttggcgagcgaacccgcgaaggtaacgacttctatcacgagatgaaagactccaacgttctcgacaaggtagcaatggtgtatgggcagatgaacgaaccaccgggtaaccgtctgcgcgttgcgctcaccggtctcaccatggccgagtacttccgcgatgagaaagacagtagcggcaaaggcaaagatgtacttctattcatcgacaatatctaccgctacaccttagctggcacggaagtatccgccctactcggtcgcatgccctcagcagtaggctaccaaccaacccttgccgaggaaatgggcgtactacaagaacgtatcacctcaaccgcaaatggctcgatcacctcgatccaagcagtgtacgtacccgccgatgatctgactgacccatcacctgcgacgacctttggacatctggactccacagtgacactatcccgctcgatcgccgcattaggcatttacccggcagtggatccactggattcgagcagtcgccagatggatccgctgatcatcggcgaagaacactacaataccacccaacgtgtccaacaaactctgcaaaaatataaagatctgaaggacatcattgcaatcttaggcatggatgaactttccgaagacgacaaactatccgtgtcacgtgcacgcaaaattgaacgatttttcagtcaaccattccatgtcgcagaagtattcaccggtgccccaggtaaatacgtcccattaaaagacacaatccgtggtttcaaagcaatcgtagacggcgaatatgaccatcttcccgaacaagccttctatatggtcggtaacattgaagaagtcatcgaaaaagccaacaaaatgacagcatga

SEQ ID NO: 43761 - protein, 466 aa, Xylella fastidiosa
MNQGKIVQIIGAIVDVEFPRNNVPKVYNALKIDGTAIILEVQQQLGDGIVRTIALGSTDGLKRNLIATDTGHAITVPVGTGTLGRIMDVLGNPIDEAGPITYTDQWEIHRNAPSYEDQASTTELLETGIKVIDLMCPFAKGGKVGLFGGAGVGKTVNMMELINNIAKAHSGLSVFAGVGERTREGNDFYHEMKDSNVLDKVAMVYGQMNEPPGNRLRVALTGLTMAEYFRDEKDSSGKGKDVLLFIDNIYRYTLAGTEVSALLGRMPSAVGYQPTLAEEMGVLQERITSTANGSITSIQAVYVPADDLTDPSPATTFGHLDSTVTLSRSIAALGIYPAVDPLDSSSRQMDPLIIGEEHYNTTQRVQQTLQKYKDLKDIIAILGMDELSEDDKLSVSRARKIERFFSQPFHVAEVFTGAPGKYVPLKDTIRGFKAIVDGEYDHLPEQAFYMVGNIEEVIEKANKMTA

SEQ ID NO: 43762 - DNA, 1536 bp, Saccharomyces cerevisiae
  CDS (1)..(1536)
atggttttgccaagactatatactgctacatcccgtgctgcttttaaagcagccaaacaatccgctccgcttctatccacttcgtggaaaagatgtatggcctcagctgctcaatctactccaatcaccggtaaagttaccgctgtcattggtgccattgttgacgttcattttgaacaatcagagttgcccgctattttgaacgctttagaaattaaaacacctcaaggtaagttggttttggaagttgctcaacatttgggtgaaaacactgtcagaaccattgctatggatggtaccgaaggtttggtccgtggtgaaaaggttcttgacactggtggccctatctccgtcccagttgggagagaaactttagggagaatcatcaacgttatcggtgaacctattgatgaaagaggtccaattaagtccaaactaagaaagccaattcacgcagaccctcctagttttgcagaacaatctacttcggctgaaattttggaaacaggtatcaaagtcgtcgatctattagctccttatgccagaggtggtaagattggtcttttcggtggtgcaggtgtcggtaagactgtgttcattcaagaattgattaacaatatcgccaaggcccatggtggtttttccgttttcaccggtgttggtgaaagaacaagagaaggtaatgacttgtaccgtgaaatgaaggaaactggtgtcattaacttggaaggtgaatccaaggtcgccttagtgttcggtcaaatgaacgaacctccaggagccagagccagagtcgctttaactggtttgacgatcgctgaatatttcagagatgaagaaggtcaagatgtcttgttgtttatcgacaatatctttagatttactcaagctggttcagaagtctctgcccttttgggtcgtattccatctgccgtcggttatcaaccaactttggccactgatatgggtctcttacaagaaagaattaccaccacaaagaagggttctgtcacttctgtgcaagccgtttatgttccagccgatgatttaacagatcctgctcctgccactacttttgcccatttggacgctactaccgtcttgtcaagaggtatttcagaattaggtatttaccctgcagtggatccattggattctaaatcaaggttattggatgccgccgttgtcggtcaagaacattatgacgtcgcctccaaggttcaagaaactttacagacctataaatctttacaagatatcattgctattttgggtatggatgaattgtccgaacaagataaactaactgtcgaaagggcaagaaagattcaaagattcttatctcaaccatttgctgtcgccgaagtctttactggtatcccaggtaaattagtgagattaaaggacaccgttgcctcgttcaaagccgttttggaaggtaaatacgataatataccagaacatgctttctatatggttggtggtattgaagatgttgttgctaaagctgaaaagttagccgctgaagccaactag

SEQ ID NO: 43763 - protein, 511 aa, Saccharomyces cerevisiae
MVLPRLYTATSRAAFKAAKQSAPLLSTSWKRCMASAAQSTPITGKVTAVIGAIVDVHFEQSELPAILNALEIKTPQGKLVLEVAQHLGENTVRTIAMDGTEGLVRGEKVLDTGGPISVPVGRETLGRIINVIGEPIDERGPIKSKLRKPIHADPPSFAEQSTSAEILETGIKVVDLLAPYARGGKIGLFGGAGVGKTVFIQELINNIAKAHGGFSVFTGVGERTREGNDLYREMKETGVINLEGESKVALVFGQMNEPPGARARVALTGLTIAEYFRDEEGQDVLLFIDNIFRFTQAGSEVSALLGRIPSAVGYQPTLATDMGLLQERITTTKKGSVTSVQAVYVPADDLTDPAPATTFAHLDATTVLSRGISELGIYPAVDPLDSKSRLLDAAVVGQEHYDVASKVQETLQTYKSLQDIIAILGMDELSEQDKLTVERARKIQRFLSQPFAVAEVFTGIPGKLVRLKDTVASFKAVLEGKYDNIPEHAFYMVGGIEDVVAKAEKLAAEAN

SEQ ID NO: 43764 - DNA, 1470 bp, Zygnema circumcarinatum
  CDS (1)..(1470)
atgaacaatacccatattacgcttgtggcctccacagtggctactaaaaacgtaggccgtatcactcaaattataggccctgttttagatgcatcgtttcctccaggaaaaatgcctaatatctataatgctttgattatcaaagggcaaaatccagctggtcaagaaattaatattacttgtgaagtacaacagctattgggtgacaataaagtgagagcagtagctatgagtgctactgacggtttaatgagagggatggaagtgactgacactggagctccattaagtgttccagtaggagaatcaactctgggtcgaatttttaatgtgcttggagaaccaatagacaaccttggtcctgttgatgctgctactactctcccaattcatcgatctgctccagcatttactcaattagataccaaattatctatttttgagacaggtataaaagtagtagatttgttagcaccatatcgtcgaggtggtaaaattggtttatttggtggagcaggtgtaggtaaaacagtgttaattatggaattaattaacaatattgcaaaagcccacggaggagtatctgtattcggtggagtaggtgaacgaactcgtgaaggaaatgacctctacatggaaatgaaggagtcaaaagtaattaatgaagaaaatatttctgaatctaaagtagctttagtatatggtcaaatgaatgaaccacctggagctcgtatgcgtgtaggtttgactgcacttacaatggcagaatattttagagatattaataaacaagatgtactattgtttattgataatatattccgttttgtgcaagcaggttcagaagtgtctgcactactaggtagaatgccttctgcagttggttatcagcctactttaagtactgaaatgggtagtttacaagaaagaatcacttctacaaaagaggggtcaattacatctattcaagctgtatatgtaccggctgatgatttaacagatccagctccagctaccacttttgctcacttagacgctactactgtactatcaagaggtctagccgctaaaggaatttatccagcagttgatccccttgattctacttctacaatgctacaaccatggattgtgggaacagaacattatgatacagctcaaggagttaaacaaacccttcagcgatacaaagagctacaagatattattgcgattcttggactagatgagttgtcagaagaagatcgtttagttgtagcaagagctcgtaaagtagaacgatttttgtctcaaccattttttgtggcagaagtatttacaggatcaccaggtaaatatgtaagcttagcagaaactatcaaagggtttcaaatgattttagctggtgaattggaccatttaccagaacaggcgttctacttagtaggaaatattaatgaagctactgctaaggcagcaaccttgtcataa

SEQ ID NO: 43765 - protein, 489 aa, Zygnema circumcarinatum
MNNTHITLVASTVATKNVGRITQIIGPVLDASFPPGKMPNIYNALIIKGQNPAGQEINITCEVQQLLGDNKVRAVAMSATDGLMRGMEVTDTGAPLSVPVGESTLGRIFNVLGEPIDNLGPVDAATTLPIHRSAPAFTQLDTKLSIFETGIKVVDLLAPYRRGGKIGLFGGAGVGKTVLIMELINNIAKAHGGVSVFGGVGERTREGNDLYMEMKESKVINEENISESKVALVYGQMNEPPGARMRVGLTALTMAEYFRDINKQDVLLFIDNIFRFVQAGSEVSALLGRMPSAVGYQPTLSTEMGSLQERITSTKEGSITSIQAVYVPADDLTDPAPATTFAHLDATTVLSRGLAAKGIYPAVDPLDSTSTMLQPWIVGTEHYDTAQGVKQTLQRYKELQDIIAILGLDELSEEDRLVVARARKVERFLSQPFFVAEVFTGSPGKYVSLAETIKGFQMILAGELDHLPEQAFYLVGNINEATAKAATLS

SEQ ID NO: 43766 - DNA, 1455 bp, Zymomonas mobilis
  CDS (1)..(1455): transl_table=11
atggctactgcctctagtaaaaagaatattggccggataagccaggtcattggtccggtcgtcgacgtgctttttgaagagaaacttcctcctcttcttacggctcttgaaaccaaaaaccaggatgctacggttgttctggaagtagcccagcatttgggtgaaaatgtcgttcgcaccatttctatggatacgaccgacggtttggttcgtggtcaggaagtcgttgataccggtagtgaaatccgcgttccggttggccctgaaacactcggccgtatcatgaacgtcgttggtcgtcctgttgatgaacggggtcccatcggcagcaaacagaccatgccaattcatgctgatgctccgcctttcacggaacagagcacggataccgctattctgacgacgggtattaaggttatcgatcttctggccccttactccaaaggtggtaaggtcggattgttcggtggtgccggtgttggtaagaccgtgttgattcaggaactgatcaacaatatcgctaaaggccatggtggtttctcggtgttcgccggcgttggtgagcgcacccgtgaaggtaacgatctttaccatgaattccttgaagctggcgttattgctagcgacaaagatggtaatgcgatttctgaaggttccaaagtggccttggtctatggccagatgaacgaaccgccgggagcccgtgctcgtgttgctctttctggtctgacgatggcggaatatttccgtgatcaagaaggtcaagacgtgttgttcttcgtggataacatcttccgcttcacgcaggctggtgcagaggtttccgctctgttgggtcgtattccttctgccgtgggttatcagccaactttggctactgacatgggtcagttgcaggaacgtattacttctaccaagaagggttccattacctcggttcaggccatctatgttccggccgacgatttgaccgatcctgcacctgccgccagttttgcccatttggatgcgactaccgtgttgagccgtgcgatctcggaaatgggtatttatcccgccgtcgatccgcttgactcttccagccgtaaccttgaaccacgcatcgttggtgatgagcattaccagacggctcgtgatgtgcaggaaattttgcagcgttataaaaacctgcaggatatcattgccattttgggtatggacgaattgtcggaagacgatcgcaaggtcgttggtcgtgctcgtcgtattcagcgcttcctgtcacagcctttccatgtggctgaagtctttacgggtatgcctggtaaatttgttcaggttgaagatacggttcgttccttccgtgaaatcattgatggtaaatatgatgatttgcctgaaaatgctttctacatggtcggctctatcgatgaagctgtcgctaaagctgaaaaaatggccgcagaagcagcctag

SEQ ID NO: 43767 - protein, 484 aa, Zymomonas mobilis
MATASSKKNIGRISQVIGPVVDVLFEEKLPPLLTALETKNQDATVVLEVAQHLGENVVRTISMDTTDGLVRGQEVVDTGSEIRVPVGPETLGRIMNVVGRPVDERGPIGSKQTMPIHADAPPFTEQSTDTAILTTGIKVIDLLAPYSKGGKVGLFGGAGVGKTVLIQELINNIAKGHGGFSVFAGVGERTREGNDLYHEFLEAGVIASDKDGNAISEGSKVALVYGQMNEPPGARARVALSGLTMAEYFRDQEGQDVLFFVDNIFRFTQAGAEVSALLGRIPSAVGYQPTLATDMGQLQERITSTKKGSITSVQAIYVPADDLTDPAPAASFAHLDATTVLSRAISEMGIYPAVDPLDSSSRNLEPRIVGDEHYQTARDVQEILQRYKNLQDIIAILGMDELSEDDRKVVGRARRIQRFLSQPFHVAEVFTGMPGKFVQVEDTVRSFREIIDGKYDDLPENAFYMVGSIDEAVAKAEKMAAEAA

SEQ ID NO: 43768 - DNA, 1674 bp, Oryza sativa
  CDS (1)..(1674)
atggcgacccgccgggccctcacctccgtcctccgctccgcctcccgcctccgcgccgcctccccttccccgtgcccgcgccgcgcgccgctccacccccaccgccgcccgtcccccgcgggcttcctcctgaaccgcgccgccgccgcctacgcgtcgtccgccgcggcgcaggcggcccccgcgcctccccccgcgtcgggcaaggccaccgggggcggcaagatcaccgatgagttcacgggcgctggcgccgtcgggcaggtgtgccaggtgattggcgccgtcgtggacgtgcggttcgacgagggcctgcccccgatcctgaccgcgctggaggtgctcgaccacaacatccgcctcgtgctcgaggtggcgcagcatctcggggagaacatggtgcgcaccatcgccatggacgggaccgaggggctcgttcgcggccagcgcgtgctcaacaccggctctcccatcactgttcctgttggtagggccacacttgggcgtattatgaatgtcatcggtgagcctattgatgagaagggagatatcacaacaaaccacttcctccctatccatcgtgaagcccctgcttttgttgagcaagctacagagcaacagattcttgttactggaattaaggtcgtggatctccttgcaccctatcaaagaggtggtaaaattggtctcttcggtggtgctggggtgggcaaaactgtacttattatggagttgatcaacaatgttgcgaaggctcatggtggtttctctgtctttgctggtgttggagaacgtactcgtgagggtaatgacttgtacagggaaatgattgagagtggtgtgattaagcttggtgacaagcagagtgagagcaagtgtgctcttgtctacgggcaaatgaatgagcccccgggtgctcgtgctcgtgttggactgactggtttgactgttgccgagcatttccgtgatgctgaagggcaggatgtgcttctcttcattgataacattttccgtttcactcaggcaaactccgaggtgtctgccctgcttggacgtatcccatctgctgtgggataccagccaacccttgctactgatcttggaggactgcaggagcggattaccaccacaaagaagggttctatcacatctgttcaagctatttatgtgcctgctgatgacttgacagatcctgcccctgctactacatttgcccatcttgatgctactactgtgttgtcacgacagatttctgagcttggtatttatcctgctgtcgatcctttggattccacatccagaatgttgtctccccatgtactgggtgaggaccactacaacacagctcgtggtgttcagaaggttcttcagaattacaagaatcttcaagatattattgccattctgggaatggacgagctcagtgaggatgataagttgacagtcgctcgtgctaggaagattcagcggttccttagccagcccttccacgttgccgaagttttcacgggtgcacctggaaagtatgttgagctgaaggagagcgttcaaagtttccagggtgtattggacgggaagtatgatgaccttcctgagcagtcattctacatggttggaggaatcgatgaggtcattgccaaggcagagaagattgccaaggagtccgcttcataa

SEQ ID NO: 43769 - protein, 557 aa, Oryza sativa
MATRRALTSVLRSASRLRAASPSPCPRRAPLHPHRRPSPAGFLLNRAAAAYASSAAAQAAPAPPPASGKATGGGKITDEFTGAGAVGQVCQVIGAVVDVRFDEGLPPILTALEVLDHNIRLVLEVAQHLGENMVRTIAMDGTEGLVRGQRVLNTGSPITVPVGRATLGRIMNVIGEPIDEKGDITTNHFLPIHREAPAFVEQATEQQILVTGIKVVDLLAPYQRGGKIGLFGGAGVGKTVLIMELINNVAKAHGGFSVFAGVGERTREGNDLYREMIESGVIKLGDKQSESKCALVYGQMNEPPGARARVGLTGLTVAEHFRDAEGQDVLLFIDNIFRFTQANSEVSALLGRIPSAVGYQPTLATDLGGLQERITTTKKGSITSVQAIYVPADDLTDPAPATTFAHLDATTVLSRQISELGIYPAVDPLDSTSRMLSPHVLGEDHYNTARGVQKVLQNYKNLQDIIAILGMDELSEDDKLTVARARKIQRFLSQPFHVAEVFTGAPGKYVELKESVQSFQGVLDGKYDDLPEQSFYMVGGIDEVIAKAEKIAKESAS

SEQ ID NO: 43770 - DNA, 1497 bp, Oryza sativa
  CDS (1)..(1497)
atgagaaccaatcctactacttctcgtcctggggtttctacaattgaagaaaaaagtacagggcgtatcgatcaaattattggacccgtgctggatgttacttttcccccgggcaagttaccttatatttataatgctttggtagtcaagagtcgagacactgacggtaagcaaattaatgtaacttgtgaggtacaacaattattaggaaataatcgagttagagctgtagctatgagtgctacagatgggttgatgagaggaatggaagtgattgacacgggagctcctctcagtgttcctgtcggtggagctactcttggacgaattttcaacgttcttggggagcctgttgacaatttgggtcctgtagatactagtgcaacattccctattcatagatccgcgcccgcctttatcgagttagatacgaaattatccatctttgaaactggtattaaggtggtcgatcttttagctccttatcggcgtggaggaaaaatcggactatttgggggagctggagtaggtaaaacagtactcatcatggaattaatcaacaatattgctaaagctcacgggggcgtatccgtatttggcggagtaggggaacggactcgtgaaggaaatgatctttatatggaaatgaaggaatctggagtaattaatgaaaaaaatcttgaggaatcaaaggtagctctagtctatggccaaatgaatgaaccgccaggagctcgtatgagagttggtttgactgccctaactatggcagaatatttccgagatgttaataagcaagacgtgcttctattcatcgataatatctttcgttttgttcaagcaggatcggaggtatctgccttattagggagaatgccctctgcagtgggttatcaacctactcttagtacagaaatgggttctttgcaagaaagaattacttctactaaaaagggatctataacttcgatccaagcggtttatgtacctgcggacgatttgaccgaccctgctcctgctacaacatttgcacatttggatgctactaccgtactttccagaggattagcttccaaagggatttatcctacagtagatcctttagattcaacctcaactatgttacaacctcggatcgttggcaacgaacattatgaaactgcgcaaagagttaagcaaactttacaacgttacaaagaacttcaggacattatcgcaattcttgggttggatgaattatcggaggaggatcgtttaactgtagcaagagcacgaaaaattgagcgcttcttatcacaaccgttttttgtggcagaagtttttaccggttctccgggaaagtatgttggtcttgcagaaactattaggggatttcaactaatcctttccggagaattagatggcctacccgaacaggctttttatttggtgggtaacatcgatgaagctagcacgaaagctataaacttagaagaggagaacaaattgaagaaatga

SEQ ID NO: 43771 - protein, 498 aa, Oryza sativa
MRTNPTTSRPGVSTIEEKSTGRIDQIIGPVLDVTFPPGKLPYIYNALVVKSRDTDGKQINVTCEVQQLLGNNRVRAVAMSATDGLMRGMEVIDTGAPLSVPVGGATLGRIFNVLGEPVDNLGPVDTSATFPIHRSAPAFIELDTKLSIFETGIKVVDLLAPYRRGGKIGLFGGAGVGKTVLIMELINNIAKAHGGVSVFGGVGERTREGNDLYMEMKESGVINEKNLEESKVALVYGQMNEPPGARMRVGLTALTMAEYFRDVNKQDVLLFIDNIFRFVQAGSEVSALLGRMPSAVGYQPTLSTEMGSLQERITSTKKGSITSIQAVYVPADDLTDPAPATTFAHLDATTVLSRGLASKGIYPTVDPLDSTSTMLQPRIVGNEHYETAQRVKQTLQRYKELQDIIAILGLDELSEEDRLTVARARKIERFLSQPFFVAEVFTGSPGKYVGLAETIRGFQLILSGELDGLPEQAFYLVGNIDEASTKAINLEEENKLKK

SEQ ID NO: 43772 - DNA, 1662 bp, Zea mays
  CDS (1)..(1662)
atggcgtcccgccgggtcgtctcctcgctcctccgctccgcgtcccgcctgcgggccgcctcgcccgctgctccacgaccgcgcgcgccaccgcaccgcccgtccccggccgggtacctcttcaaccgcgctgccgcctacgcctcttccgccgcggcccaggcggcacctgccaccccgccgccggccaccgggaagaccgggggcggcaagatcaccgacgagttcaccggcgctggcgccatcggccaggtgtgccaggtgatcggcgccgtcgttgacgtgcgcttcgatgagggcctcccgcccatcctcacggcgctcgaggtgctcgacaacaacatccgcctcgtgctcgaggtggcgcagcaccttggcgagaacatggtgcgcaccatcgctatggacggcacggaggggctcgtccgcggccagcgcgtcctcaacactggctcccccatcaccgtgcctgttggcagggctacccttggacgcatcataaatgttattggtgaaccgattgatgagaagggtgacataaagacaaaccacttcctccctattcatcgtgaagcccctgcttttgttgagcaggccactgagcagcaaattcttgttactggaatcaaggtcgtggatcttcttgcaccctaccaaaggggtggaaagattggtctcttcggtggtgcaggagtgggtaaaactgtgctcattatggagttgatcaacaatgttgctaaggcccatggtggtttctctgtgtttgctggtgttggagaacgtacccgtgaaggtaatgatctgtacagggaaatgattgaaagtggtgtcattaagctagatgacaagcagagcgaaagcaagtgtgctcttgtttacgggcagatgaatgagcccccgggtgctcgtgctcgtgttgggttgactggtttgactgttgctgaacatttccgtgatgctgaaggacaagatgtgcttctgtttattgacaacattttccgttttactcaggcaaactctgaggtgtctgctcttcttggacgtatcccatctgctgtgggataccagccaacccttgccactgatcttggaggactgcaagagcgtattacgacaacaaagaagggttctattacatctgtgcaggccatctacgtgcctgccgatgacttgacggatcctgctcctgctactacctttgcccatcttgatgctacaactgtgttgtcacgacagatctctgagcttggtatttatcctgctgttgatccactggattccacatcaagaatgctttctccccacgtgctgggtgaggatcactacaacactgctcgtggtgtgcagaaggttcttcagaactacaaaaatcttcaggatattattgctatcttgggtatggatgagctcagtgagcatgacaagctgacagtcgcccgtgcaagaaagattcagcgtttcctgagccagcctttccatgtcgctgaagttttcacgggtgctccaggaaagtatgtggagctgaaggaaagcgtgaagagtttccagggtgttttggatgggaagtatgatgacctccctgagcagtcattctacatggttggtggcattgaggaagtcattgctaaggctgagaaaattgccaaggagtctgcttcataa

SEQ ID NO: 43773 - protein, 553 aa, Zea mays
MASRRVVSSLLRSASRLRAASPAAPRPRAPPHRPSPAGYLFNRAAAYASSAAAQAAPATPPPATGKTGGGKITDEFTGAGAIGQVCQVIGAVVDVRFDEGLPPILTALEVLDNNIRLVLEVAQHLGENMVRTIAMDGTEGLVRGQRVLNTGSPITVPVGRATLGRIINVIGEPIDEKGDIKTNHFLPIHREAPAFVEQATEQQILVTGIKVVDLLAPYQRGGKIGLFGGAGVGKTVLIMELINNVAKAHGGFSVFAGVGERTREGNDLYREMIESGVIKLDDKQSESKCALVYGQMNEPPGARARVGLTGLTVAEHFRDAEGQDVLLFIDNIFRFTQANSEVSALLGRIPSAVGYQPTLATDLGGLQERITTTKKGSITSVQAIYVPADDLTDPAPATTFAHLDATTVLSRQISELGIYPAVDPLDSTSRMLSPHVLGEDHYNTARGVQKVLQNYKNLQDIIAILGMDELSEHDKLTVARARKIQRFLSQPFHVAEVFTGAPGKYVELKESVKSFQGVLDGKYDDLPEQSFYMVGGIEEVIAKAEKIAKESAS

SEQ ID NO: 43774 - DNA, 1662 bp, Zea mays
  CDS (1)..(1662)
atggcgtcccgccgggtcgtctcctcgctcctccgctccgcgtcccgcctgcgggccgcctcgcccgctgcgccacgcccgcgcgcgccaccgcaccgcccgtccccggccgggtacctcttcaaccgcgctgccgcctacgcctcttccgccgcggcccaggcggcacctgccaccccgccgccggccaccgggaagaccgggggcggcaagatcaccgacgagttcaccggcgctggcgccatcggccaggtgtgccaggtgatcggcgccgtcgttgacgtgcgcttcgatgagggcctcccgcccatcctcacggcgctcgaggtgctcgacaacaacatccgcctcgtgctcgaggtggcgcagcaccttggcgagaacatggtgcgcaccatcgctatggacggcacggaggggctcgtccgcggccagcgcgtcctcaacactggctcccccatcaccgtgcctgttggcagggctacccttggacgcatcataaatgttattggtgaaccgattgatgagaagggtgacataaagacaaaccactccctccctattcatcgtgaagcccctgcctttgttgagcaggccactgagcagcaaattcttgttactggaatcaaggtcgtggatcttcttgcaccctaccaaaggggtggaaagattggcctcttcggtggtgcaggagtgggtaaaactgtgctcatcatggagttgatcaacaatgttgctaaggcccatggtggtttctctgtgtttgctggtgttggagaacgtacccgtgaaggtaatgatctgtacagggaaatgattgaaagtggtgtcattaagctagatgacaagcagagcgaaagcaagtgtgctcttgtttacgggcagatgaatgagcccccgggtgctcgtgctcgtgttgggttgactggtttgactgttgctgaacatttccgtgatgctgaaggacaagatgtgcttctgtttattgacaacattttccgttttactcaggcaaactctgaggtgtctgctcttcttggacgtatcccatctgctgtgggataccagccaacccttgccactgatcttggaggactgcaagagcgtattacgacaacaaagaagggttctattacatctgtgcaggccatctacgtgcctgccgatgacttgacggatcctgctcctgctactacctttgcccatcttgatgctacaactgtgttgtcacgacagatctctgagcttggtatttatcctgctgttgatccactggattccacatcaagaatgctttctccccacgtgctgggtgaggatcactacaacactgctcgtggtgtgcagaaggttcttcagaactacaaaaatcttcaggatattattgctatcttgggtatggatgagctcagtgaggatgacaagctgacagtcgcccgtgcaagaaagattcagcgtttcctgagccagcctttccatgtcgctgaagttttcacgggtgctccaggaaagtatgtggagctgaaggaaagcgtgaagagtttccagggtgttttggatgggaagtatgatgacctccctgagcagtcattctacatggttggtggcattgaggaagtcattgctaaggctgagaaaattgccaaggagtctgcttcataa

SEQ ID NO: 43775 - protein, 553 aa, Zea mays
MASRRVVSSLLRSASRLRAASPAAPRPRAPPHRPSPAGYLFNRAAAYASSAAAQAAPATPPPATGKTGGGKITDEFTGAGAIGQVCQVIGAVVDVRFDEGLPPILTALEVLDNNIRLVLEVAQHLGENMVRTIAMDGTEGLVRGQRVLNTGSPITVPVGRATLGRIINVIGEPIDEKGDIKTNHSLPIHREAPAFVEQATEQQILVTGIKVVDLLAPYQRGGKIGLFGGAGVGKTVLIMELINNVAKAHGGFSVFAGVGERTREGNDLYREMIESGVIKLDDKQSESKCALVYGQMNEPPGARARVGLTGLTVAEHFRDAEGQDVLLFIDNIFRFTQANSEVSALLGRIPSAVGYQPTLATDLGGLQERITTTKKGSITSVQAIYVPADDLTDPAPATTFAHLDATTVLSRQISELGIYPAVDPLDSTSRMLSPHVLGEDHYNTARGVQKVLQNYKNLQDIIAILGMDELSEDDKLTVARARKIQRFLSQPFHVAEVFTGAPGKYVELKESVKSFQGVLDGKYDDLPEQSFYMVGGIEEVIAKAEKIAKESAS

SEQ ID NO: 43776 - DNA, 1497 bp, Brassica napus
  CDS (1)..(1497)
atgagaataaatcctactacttcggatccagcggtttcaatacgtgaaaaaaacaacctgggacgtattgcccaaatcattggtccggtactggatgtagcctttcccccgggcaagatgcctaatatttacaatgctctggtggttaagggtcgagatacgcttggtcaagaaattaatgtgacttgtgaagtacagcaattattaggaaacaaccgagttagagctgtagctatgagcgcgaccgagggtttaaagagagggatggacgtggttgatatgggaaatcctctaagtgttccagtcggcggagcgactctaggacgaattttcaatgtacttggggaacctgttgataatttaggtcctgtcgatactctcacaacatctcctatccataaatccgcgcctgcttttatagacttagatacaaccttatctatttttgaaacaggaattaaagtagtagatcttttggccccttatcgtcgtgggggaaaaatcggactattcggtggggctggcgtgggtaaaacagtactaattatggaattgatcaacaacattgccaaagctcatggtggtgtatccgtatttggtggagtaggcgaacgaactcgtgaaggaaatgatctttacatggaaatgaaagaatctggagtcattaatgaactaaaccttgcggactccaaagtagccctagtctacggtcagatgaatgaaccgccgggagctcgtatgagagttggtctgactgccttaactatggcagaatatttccgagatgttaatgagcaagacgtacttctatttatcgacaatatcttccgttttgtacaagcaggatccgaggtatccgctttattgggtagaatgccttctgctgtgggttaccaacccacccttagtaccgaaatgggttctttacaagaaagaattacttctacgaaaaaagggtccataacctctattcaagcagtttatgtacctgcagacgatttgactgaccctgctcctgccaccacatttgcacatttagatgcgactaccgtactatcaagaggattagctgctaaaggtatctatccagcggtagatcctttagattcaacgtcaactatgctacaacctcgaatcgttggcgaggaacattatgaaactgcgcaacaagtaaagcaaactttacaacgttacaaggagcttcaggacattatagctatcctggggttggacgaattatccgaagaggatcgcttaaccgtcgcaagagcacgaaagattgagcgtttcttatcacaaccttttttcgtagcagaagtatttacaggttctccgggaaaatatgttgggctagcggaaacaattagagggtttaatttgatcctttccggagaatttgattctcttcctgaacaggccttttacttagtgggtaacatcgatgaagctactgcgaaggctacgaacttagaaatggagagtaaattgaagaaatga

SEQ ID NO: 43777 - protein, 498 aa, Brassica napus
MRINPTTSDPAVSIREKNNLGRIAQIIGPVLDVAFPPGKMPNIYNALVVKGRDTLGQEINVTCEVQQLLGNNRVRAVAMSATEGLKRGMDVVDMGNPLSVPVGGATLGRIFNVLGEPVDNLGPVDTLTTSPIHKSAPAFIDLDTTLSIFETGIKVVDLLAPYRRGGKIGLFGGAGVGKTVLIMELINNIAKAHGGVSVFGGVGERTREGNDLYMEMKESGVINELNLADSKVALVYGQMNEPPGARMRVGLTALTMAEYFRDVNEQDVLLFIDNIFRFVQAGSEVSALLGRMPSAVGYQPTLSTEMGSLQERITSTKKGSITSIQAVYVPADDLTDPAPATTFAHLDATTVLSRGLAAKGIYPAVDPLDSTSTMLQPRIVGEEHYETAQQVKQTLQRYKELQDIIAILGLDELSEEDRLTVARARKIERFLSQPFFVAEVFTGSPGKYVGLAETIRGFNLILSGEFDSLPEQAFYLVGNIDEATAKATNLEMESKLKK

SEQ ID NO: 43778 - DNA, 1662 bp, Brassica napus
  CDS (1)..(1662)
atggcgtctcggagagtcttatcaactcttctccgttcatcttccgccagatctgctgccagattcgggagccgtaaccctcggcttccgtccccttcacctgctcgatgcgcttctccttttggtgacctcctcggacgcgtagccgaatattccacctcttcacctgctcctccatcgtctgctccagccaaggatgaggcgaagaagacgtatgattacggaggtaaaggagcgatcgggaaagtctgccaggtcatcggtgctatcgtcgatgtgagattcgaagatcaggaagggttgcctccgatcatgacgtcactcgaggtgcaggatcaccccacgaggctggtgctcgaggtgtcgcatcacttgggtcagaatgtggtcaggactattgctatggatggtactgaggggcttgttcgtggaagacgcgtgctcaacactggagctccgatcactgtacctgttggaagagcaacacttggacgtatcatgaatgttcttggagaacctattgatgagagaggcgaaattaagaccgaacactacttacctattcacagagatgctccggctttggttgatctagccactgggcaagagatccttgccactggtattaaggttgttgatctgcttgctccttaccaaagaggaggaaagattgggctctttggtggtgctggtgttgggaaaactgtgctcattatggaactgattaacaatgtcgccaaagctcatggtggtttctccgtgtttgctggtgtgggagaacgaacccgtgaaggcaatgacttgtacagagaaatgattgagagtggtgtcatcaagctaggcgagaagcagtctgagagcaaatgtgctcttgtgtatggacaaatgaacgagcccccgggtgcccgtgcccgtgttggacttactggtttgactgttgctgagtatttccgtgatgccgaaggccaagatgtgttgcttttcattgacaacattttccgtttcactcaggctaactctgaagtgtctgctttgcttggtcgtatcccatctgctgtgggttaccagccaactctggcttccgatctcggtgctcttcaagagcgaatcacaaccaccaagaaaggttccatcacctcagtccaagccatctatgtccctgctgacgatctgacagatcctgctccagccacaacttttgctcacttggatgccacaactgtgctctcgagacagatttccgagcttggtatctatcctgctgtggatcctctggattcaacatcccgtatgctctcgcctcacattctgggtgaggagcactacaacacggctcgtggtgtgcagaaagtgctacagaactacaagaacttgcaagatattattgccattttgggaatggatgagctaagtgaagatgacaagctgactgttgcccgtgcccgtaagatccagagattcttgagtcagccattccatgttgctgagatcttcacgggtgcccccggaaaatacgtcgaccttaaggaaaacatcaacagtttccagggtttgcttgatggtaagtatgatgatcttcctgaacaatcgttttacatggttggtggcatcgacgaggtggttgctaaagcagagaagatctccaaggaggcagcagcttaa

SEQ ID NO: 43779 - protein, 553 aa, Brassica napus
MASRRVLSTLLRSSSARSAARFGSRNPRLPSPSPARCASPFGDLLGRVAEYSTSSPAPPSSAPAKDEAKKTYDYGGKGAIGKVCQVIGAIVDVRFEDQEGLPPIMTSLEVQDHPTRLVLEVSHHLGQNVVRTIAMDGTEGLVRGRRVLNTGAPITVPVGRATLGRIMNVLGEPIDERGEIKTEHYLPIHRDAPALVDLATGQEILATGIKVVDLLAPYQRGGKIGLFGGAGVGKTVLIMELINNVAKAHGGFSVFAGVGERTREGNDLYREMIESGVIKLGEKQSESKCALVYGQMNEPPGARARVGLTGLTVAEYFRDAEGQDVLLFIDNIFRFTQANSEVSALLGRIPSAVGYQPTLASDLGALQERITTTKKGSITSVQAIYVPADDLTDPAPATTFAHLDATTVLSRQISELGIYPAVDPLDSTSRMLSPHILGEEHYNTARGVQKVLQNYKNLQDIIAILGMDELSEDDKLTVARARKIQRFLSQPFHVAEIFTGAPGKYVDLKENINSFQGLLDGKYDDLPEQSFYMVGGIDEVVAKAEKISKEAAA

SEQ ID NO: 43780 - DNA, 1668 bp, Brassica napus
  CDS (1)..(1668)
atggcgtctcggagagtcttatcaacgcttctccgctcgtcttcctccagatccgccgccagattcgctacccgaaaccctagaatcccgtccccttcccccgctcgatgcgcttctcctttcggtgacctcctcggacgcgtcgccgaatattccacctcttcacccgctgcgccatcgtctcctcctccagccaaggatgaggctaagaagaagacgtatgattacggaggcaaaggcgcgatcgggaaggtctgccaggtcatcggtgctatcgtcgatgtgagattcgaagatcaggaagggttgcctccgatcatgacgtcactcgaggtgcaggatcatcccacgaggctggtgctcgaggtgtcgcatcacttgggtcagaatgtggtcaggactattgctatggatggtaccgagggactcgttcgtgggagacgcgtgctcaacactggagctccaatcactgttcctgtgggtagagcaacacttggacgtattatgaatgttcttggagaacctattgacgagagaggcgaaattaagaccgaacactacttacctattcacagagatgctccggctttggttgatctagccaccggtcaagagatccttgccactggtattaaggttgttgatctgcttgctccttaccaaagaggaggaaagattgggctctttggtggtgctggtgttggcaaaactgtgctcattatggaactgattaacaatgtcgccaaagctcatggtggtttctccgtgtttgctggtgtgggagaaagaacacgtgaaggcaatgacttgtacagagaaatgattgagagtggtgtcatcaagctaggcgagaagcagtctgagagcaaatgtgctcttgtgtatggacaaatgaacgagcccccgggtgctcgtgcccgtgttggacttactggtttgactgttgctgagtatttccgtgatgctgaaggccaagatgtgttgcttttcattgacaacattttccgtttcactcaggctaactctgaagtgtctgctttgcttggtcgtatcccatctgctgtgggttaccagccaactctggcttccgatcttggtgctcttcaagagcgaatcacaaccaccaagaaaggttccatcacctctgtccaagccatctatgtccctgctgatgatttgacagatcctgctcctgccacaaccttcgctcatttagacgccacaactgtgctgtctagacagatttccgagctcggtatctatcctgctgtggatcctctggattcaacatcccgtatgctctcgcctcacattctgggtgaggagcactacaacactgctcgtggtgtgcagaaagtgctacagaactacaagaacttgcaagatattattgccattttgggaatggatgagctaagtgaagatgacaagctgactgttgcccgtgcccgtaagatccagagattcttgagtcagccattccacgttgctgagatcttcactggtgcccctggaaaatacgttgaccttaaggaaaacatcaacagtttccagggtttgctcgatggcaagtatgatgatcttcctgaacaatcgttttacatggttggtggcatcgacgaggtggttgctaaagcagagaagatctccaaggaggccgcagcttaa

SEQ ID NO: 43781 - protein, 555 aa, Brassica napus
MASRRVLSTLLRSSSSRSAARFATRNPRIPSPSPARCASPFGDLLGRVAEYSTSSPAAPSSPPPAKDEAKKKTYDYGGKGAIGKVCQVIGAIVDVRFEDQEGLPPIMTSLEVQDHPTRLVLEVSHHLGQNVVRTIAMDGTEGLVRGRRVLNTGAPITVPVGRATLGRIMNVLGEPIDERGEIKTEHYLPIHRDAPALVDLATGQEILATGIKVVDLLAPYQRGGKIGLFGGAGVGKTVLIMELINNVAKAHGGFSVFAGVGERTREGNDLYREMIESGVIKLGEKQSESKCALVYGQMNEPPGARARVGLTGLTVAEYFRDAEGQDVLLFIDNIFRFTQANSEVSALLGRIPSAVGYQPTLASDLGALQERITTTKKGSITSVQAIYVPADDLTDPAPATTFAHLDATTVLSRQISELGIYPAVDPLDSTSRMLSPHILGEEHYNTARGVQKVLQNYKNLQDIIAILGMDELSEDDKLTVARARKIQRFLSQPFHVAEIFTGAPGKYVDLKENINSFQGLLDGKYDDLPEQSFYMVGGIDEVVAKAEKISKEAAA

SEQ ID NO: 43782 - DNA, 1680 bp, Glycine max
  CDS (1)..(1680)
atggcttcacgcaggctcgtatcttctctgattcgatcctcccttcgtagatctcaatcgaagccctcaatttccgcatcgacatcgaggctcacgtcatccaaccgtgcctcaccgcacggatacttgctgaaccgcgtcgccgagtacgccaccgccgcggctgctgctaccactcctccctctcctcctcctccggggaagaaggagctcggcggcggcgggaagatcaccgatgaattcaccgggaagggcgcgatcgggcaggtctgccaggtcattggtgccgtcgtcgatgtcagattcgacgagggtttgcctccgatcatgaccgcgctggaggttctggatcactcgtcgaggcttgtgttggaggtggcgcagcatttgggtgaaggcgttgtccgaaccattgctatggatgccaccgaaggtgtcgttagaggctggcgcgttctcaacactggctcccctattaccgttccagttggtagggctacccttggccgtatcataaatgtcattggagagcctattgatgccaagggagaaatcaatactgagcattatttgcccattcatagagaagctcctgcttttgttgagcaagaaactgcacagcagattcttgttactggaatcaaggttgttgacctgcttgcaccatatcaaagaggaggaaagattgggttgtttggtggtgctggtgtaggaaaaactgtgcttattatggaacttattaacaatgttgcaaaagctcatggtggtttctctgtgtttgctggtgttggagaacgaacccgagagggtaatgacttgtacagagaaatgattgagagtggtgtcattaagcttgatgataagcagagtgaaagcaagtgtgctcttgtgtatggtcaaatgaatgagccccctggtgcccgtgcccgtgttggtcttactgggcttactgtggctgaacacttccgtgatgctgaagggcaagatgtgcttcttttcgtagacaacattttccgttttacccaagctaactcagaggtgtctgctttgcttggtcgtatcccatctgctgttggttaccaaccaaccttgtctactgatcttggagctcttcaagagcgtattacaacaaccaagaagggttcaattacctctgtccaagctatctatgtgcctgctgatgacttgacagatcctgctcctgctaccacttttgctcacttggatgccacaacagtgttgtcacgacagatctccgagcttggtatctatcctgctgttgatcccttggattctacatctcgtatgctttccccccttattttgggtgcggatcactacgaaactgctcgtggtgtacagaaagtgcttcagaactacaagaatcttcaagatatcattgctattttgggaatggatgagctcagtgaagatgataaattgactgttgcccgtgcccgtaagattcagcgattcttaagccagcctttccatgttgctgaagtcttcactggtgccccaggaaaatatgttgagttgaaggagaacgttgccagcttccagggtgtgttggatggaaaatacgatgaccttccagagcagtcgttttacatggttggcggtattgaggaggtcattgcaaaggccgagaaaattgctaaggaatctgcagcgtcttaa

SEQ ID NO: 43783 - protein, 559 aa, Glycine max
MASRRLVSSLIRSSLRRSQSKPSISASTSRLTSSNRASPHGYLLNRVAEYATAAAAATTPPSPPPPGKKELGGGGKITDEFTGKGAIGQVCQVIGAVVDVRFDEGLPPIMTALEVLDHSSRLVLEVAQHLGEGVVRTIAMDATEGVVRGWRVLNTGSPITVPVGRATLGRIINVIGEPIDAKGEINTEHYLPIHREAPAFVEQETAQQILVTGIKVVDLLAPYQRGGKIGLFGGAGVGKTVLIMELINNVAKAHGGFSVFAGVGERTREGNDLYREMIESGVIKLDDKQSESKCALVYGQMNEPPGARARVGLTGLTVAEHFRDAEGQDVLLFVDNIFRFTQANSEVSALLGRIPSAVGYQPTLSTDLGALQERITTTKKGSITSVQAIYVPADDLTDPAPATTFAHLDATTVLSRQISELGIYPAVDPLDSTSRMLSPLILGADHYETARGVQKVLQNYKNLQDIIAILGMDELSEDDKLTVARARKIQRFLSQPFHVAEVFTGAPGKYVELKENVASFQGVLDGKYDDLPEQSFYMVGGIEEVIAKAEKIAKESAAS

SEQ ID NO: 43784 - DNA, 1497 bp, Glycine max
  CDS (1)..(1497)
atgcgaatcaatcctactacttctggtcctgaggtttctgcgcttgaaaaaaaaaatctgggacgtatcgcccaaataattggtccggtactagatgtagcttttcccccaggtaagatgcctaatatttacaacgctctgatagttaagggtcgagatactgttggtcaacaaattaatgtgacttgtgaagtacagcaattattaggaaataatcgaattagagctgtagctatgagtgcgacagaaggtctaatgagaggaatggaagtgattgacacaggagctgccctaagtgttccagtaggtggagcaactctaggacgaattttcaacgtgcttggagagcccattgataatttaggtcctgtagatactcgcacaacatctcccattcatagatctgcgcctgcctttatacaattagatacaaaattagccatttttgaaacaggaataaaagtagtagatcttttagctccttatcgtcgtggaggaaaaataggacttttcggtggagctggagtgggtaaaacggtactgattatggaattgatcaataacattgccaaagctcatggaggtgtatctgtatttggcggagtaggtgaacgtactcgtgagggaaatgatctttatatggaaatgaaagaatctggagtaatgaatgaacaaaatattgcagaatcaaaagtagctctagtatatggtcaaatgaatgaaccgcccggagctcgtatgagagttggtttaactgccctgactatggcggaatattttcgagatgtcaatgaacaagatgtacttctatttatcgacaatatctttcgcttcgtccaagcaggatctgaagtatctgccttattgggtcgaatgccttctgctgtgggttatcaacccactcttagtactgaaatgggttctttacaagaaagaatcacttctaccaaagaggggtccataacttctattcaagcagtttatgtacccgcagacgatttaaccgatcctgcgcctgctacgacatttgcacatttagatgctactactgtactatcaagaggattagcggccaaaggtatctatccagcagtagatcctttagattcaacctcaactatgctccaacctcgaatcgttggtgaagaacattatgagactgcgcaaagagttaaacaaactttacaacgttacaaagaacttcaagacattatagctatccttggcttggacgaattatccgaagaagatcgcttaaccgtagcaagagcacgaaaaattgagcgtttcttatcacaaccttttttcgtagcagaagtttttaccggttcgccggggaaatatgttagtctagcagaaacaattagagggtttaaattgattctttctggagaattagatggtcttcctgaacaagccttttatttggtaggtaatatcgatgaagctactgcgaaagctacgaacttagaaatggagagcaatttgaagaaatga

SEQ ID NO: 43785 - protein, 498 aa, Glycine max
MRINPTTSGPEVSALEKKNLGRIAQIIGPVLDVAFPPGKMPNIYNALIVKGRDTVGQQINVTCEVQQLLGNNRIRAVAMSATEGLMRGMEVIDTGAALSVPVGGATLGRIFNVLGEPIDNLGPVDTRTTSPIHRSAPAFIQLDTKLAIFETGIKVVDLLAPYRRGGKIGLFGGAGVGKTVLIMELINNIAKAHGGVSVFGGVGERTREGNDLYMEMKESGVMNEQNIAESKVALVYGQMNEPPGARMRVGLTALTMAEYFRDVNEQDVLLFIDNIFRFVQAGSEVSALLGRMPSAVGYQPTLSTEMGSLQERITSTKEGSITSIQAVYVPADDLTDPAPATTFAHLDATTVLSRGLAAKGIYPAVDPLDSTSTMLQPRIVGEEHYETAQRVKQTLQRYKELQDIIAILGLDELSEEDRLTVARARKIERFLSQPFFVAEVFTGSPGKYVSLAETIRGFKLILSGELDGLPEQAFYLVGNIDEATAKATNLEMESNLKK

SEQ ID NO: 43786 - DNA, 24 bp, Artificial sequence
  primer
atggctactggaaagattgtccag

SEQ ID NO: 43787 - DNA, 24 bp, Artificial sequence
  primer
ttaaagttttttggctttttccac

SEQ ID NO: 43788 - protein, 522 aa, Artificial sequence
  consensus sequence
  Variant (2)..(6): Xaa in position 2 to 6 is any amino acid
  Variant (9)..(9): Xaa in position 9 is any amino acid
  Variant (11)..(11): Xaa in position 11 is any amino acid
  Variant (13)..(20): Xaa in position 13 to 20 is any amino acid
  Variant (22)..(22): Xaa in position 22 is any amino acid
  Variant (24)..(26): Xaa in position 24 to 26 is any amino acid
  Variant (27)..(32): Xaa in position 27 to 32 is any or no amino acid
  Variant (34)..(37): Xaa in position 34 to 37 is any amino acid
  Variant (38)..(42): Xaa in position 38 to 42 is any or no amino acid
  Variant (45)..(52): Xaa in position 45 to 52 is any amino acid
  Variant (53)..(66): Xaa in position 53 to 66 is any or no amino acid
  Variant (69)..(69): Xaa in position 69 is any amino acid
  Variant (71)..(71): Xaa in position 71 is any amino acid
  Variant (74)..(76): Xaa in position 74 to 76 is any amino acid
  Variant (79)..(80): Xaa in position 79 to 80 is any amino acid
  Variant (83)..(84): Xaa in position 83 to 84 is any amino acid
  Variant (86)..(86): Xaa in position 86 is any amino acid
  Variant (89)..(89): Xaa in position 89 is any amino acid
  Variant (92)..(93): Xaa in position 92 to 93 is any amino acid
  Variant (95)..(96): Xaa in position 95 to 96 is any amino acid
  Variant (99)..(99): Xaa in position 99 is any amino acid
  Variant (102)..(102): Xaa in position 102 is any amino acid
  Variant (107)..(107): Xaa in position 107 is any amino acid
  Variant (108)..(108): Xaa in position 108 is any or no amino acid
  Variant (114)..(114): Xaa in position 114 is any amino acid
  Variant (117)..(117): Xaa in position 117 is any amino acid
  Variant (119)..(119): Xaa in position 119 is any amino acid
  Variant (121)..(121): Xaa in position 121 is any amino acid
  Variant (123)..(123): Xaa in position 123 is any amino acid
  Variant (124)..(124): Xaa in position 124 is any or no amino acid
  Variant (126)..(134): Xaa in position 126 to 134 is any amino acid
  Variant (135)..(136): Xaa in position 135 to 136 is any or no amino acid
  Variant (139)..(140): Xaa in position 139 to 140 is any amino acid
  Variant (143)..(155): Xaa in position 143 to 155 is any amino acid
  Variant (161)..(161): Xaa in position 161 is any amino acid
  Variant (164)..(165): Xaa in position 164 to 165 is any amino acid
  Variant (167)..(169): Xaa in position 167 to 169 is any amino acid
  Variant (173)..(173): Xaa in position 173 is any amino acid
  Variant (186)..(188): Xaa in position 186 to 188 is any amino acid
  Variant (192)..(192): Xaa in position 192 is any amino acid
  Variant (196)..(197): Xaa in position 196 to 197 is any amino acid
  Variant (199)..(199): Xaa in position 199 is any amino acid
  Variant (201)..(201): Xaa in position 201 is any amino acid
  Variant (205)..(205): Xaa in position 205 is any amino acid
  Variant (217)..(217): Xaa in position 217 is any amino acid
  Variant (219)..(219): Xaa in position 219 is any amino acid
  Variant (222)..(224): Xaa in position 222 to 224 is any amino acid
  Variant (225)..(225): Xaa in position 225 is any or no amino acid
  Variant (227)..(228): Xaa in position 227 to 228 is any amino acid
  Variant (229)..(255): Xaa in position 229 to 255 is any or no amino acid
  Variant (257)..(258): Xaa in position 257 to 258 is any amino acid
  Variant (261)..(261): Xaa in position 261 is any amino acid
  Variant (270)..(270): Xaa in position 270 is any amino acid
  Variant (272)..(272): Xaa in position 272 is any amino acid
  Variant (275)..(275): Xaa in position 275 is any amino acid
  Variant (278)..(278): Xaa in position 278 is any amino acid
  Variant (281)..(281): Xaa in position 281 is any amino acid
  Variant (284)..(284): Xaa in position 284 is any amino acid
  Variant (288)..(290): Xaa in position 288 to 290 is any amino acid
  Variant (291)..(296): Xaa in position 291 to 296 is any or no amino acid
  Variant (300)..(300): Xaa in position 300 is any amino acid
  Variant (302)..(302): Xaa in position 302 is any amino acid
  Variant (306)..(306): Xaa in position 306 is any amino acid
  Variant (308)..(310): Xaa in position 308 to 310 is any amino acid
  Variant (313)..(313): Xaa in position 313 is any amino acid
  Variant (322)..(322): Xaa in position 322 is any amino acid
  Variant (333)..(335): Xaa in position 333 to 335 is any amino acid
  Variant (338)..(338): Xaa in position 338 is any amino acid
  Variant (347)..(348): Xaa in position 347 to 348 is any amino acid
  Variant (354)..(354): Xaa in position 354 is any amino acid
  Variant (357)..(357): Xaa in position 357 is any amino acid
  Variant (368)..(368): Xaa in position 368 is any amino acid
  Variant (380)..(380): Xaa in position 380 is any amino acid
  Variant (385)..(389): Xaa in position 385 to 389 is any amino acid
  Variant (403)..(404): Xaa in position 403 to 404 is any amino acid
  Variant (406)..(406): Xaa in position 406 is any amino acid
  Variant (408)..(410): Xaa in position 408 to 410 is any amino acid
  Variant (412)..(412): Xaa in position 412 is any amino acid
  Variant (416)..(417): Xaa in position 416 to 417 is any amino acid
  Variant (419)..(420): Xaa in position 419 to 420 is any amino acid
  Variant (422)..(424): Xaa in position 422 to 424 is any amino acid
  Variant (427)..(427): Xaa in position 427 is any amino acid
  Variant (430)..(430): Xaa in position 430 is any amino acid
  Variant (432)..(432): Xaa in position 432 is any amino acid
  Variant (440)..(440): Xaa in position 440 is any amino acid
  Variant (446)..(446): Xaa in position 446 is any amino acid
  Variant (448)..(450): Xaa in position 448 to 450 is any amino acid
  Variant (452)..(452): Xaa in position 452 is any amino acid
  Variant (458)..(458): Xaa in position 458 is any amino acid
  Variant (466)..(466): Xaa in position 466 is any amino acid
  Variant (470)..(470): Xaa in position 470 is any amino acid
  Variant (474)..(475): Xaa in position 474 to 475 is any amino acid
  Variant (477)..(478): Xaa in position 477 to 478 is any amino acid
  Variant (480)..(480): Xaa in position 480 is any amino acid
  Variant (482)..(483): Xaa in position 482 to 483 is any amino acid
  Variant (486)..(487): Xaa in position 486 to 487 is any amino acid
  Variant (489)..(493): Xaa in position 489 to 493 is any amino acid
  Variant (495)..(496): Xaa in position 495 to 496 is any amino acid
  Variant (498)..(499): Xaa in position 498 to 499 is any amino acid
  Variant (502)..(502): Xaa in position 502 is any amino acid
  Variant (506)..(506): Xaa in position 506 is any amino acid
  Variant (509)..(509): Xaa in position 509 is any amino acid
  Variant (510)..(514): Xaa in position 510 to 514 is any or no amino acid
  Variant (516)..(517): Xaa in position 516 to 517 is any amino acid
  Variant (518)..(520): Xaa in position 518 to 520 is any or no amino acid
GXXXXXIGXVXDXXXXXXXXVXFXXXXXXXXXPXXXXXXXXXALXXXXXXXXXXXXXXXXXXXXXXEVXQXLGXXXVRXXAMXXTXGLXRGXXVXXTGXPIXVPVGXXTLGRIXNVXGXPXDXXGXXXXXXXXXXXIHXXAPXXXXXXXXXXXXXTGIKVXDLXXPXXXGGKXGLFGGAGVGKTVXXXELIXNIAXXHXGXSVFXGVGERTREGNDXYXEMXXXXVXXXXXXXXXXXXXXXXXXXXXXXXXXXXXKXXLVXGQMNEPPGXRXRVXLTXLTXAEXFRDXXXXXXXXXDVLXFXDNIXRXXXAGXEVSALLGRXPSAVGYQPTLXXXMGXLQERITSTXXGSITSXQAXYVPADDLTDPXPATTFAHLDATXVLSRXXXXXGIYPAVDPLDSTSXXLXPXXXGXEHYXXAXXVXXXLQXYKXLXDIIAILGXDELSEXDXXXVXRARKIXRFLSQPFXVAEXFTGXXGXXVXLXXTIXXFXXXXXGXXDXXPEXAFYXVGXXXXXXIXXXXXKA

SEQ ID NO: 43789 - protein, 58 aa, Artificial sequence
  protein pattern
  Variant (2)..(2): Xaa in position 2 is Ile or Met
  Variant (5)..(5): Xaa in position 5 is Ala or Gln
  Variant (6)..(6): Xaa in position 6 is Ile or Val
  Variant (11)..(11): Xaa in position 11 is Asn or Thr
  Variant (13)..(13): Xaa in position 13 is Ala, Gly or Ser
  Variant (14)..(14): Xaa in position 14 is any amino acid
  Variant (15)..(15): Xaa in position 15 is Asp or Glu
  Variant (16)..(16): Xaa in position 16 is Ile, Leu, Met or Val
  Variant (18)..(18): Xaa in position 18 is any amino acid
  Variant (19)..(19): Xaa in position 19 is Phe, Leu or Met
  Variant (24)..(24): Xaa in position 24 is Ala or Thr
  Variant (25)..(25): Xaa in position 25 is Ser or Thr
  Variant (27)..(27): Xaa in position 27 is any or no amino acid
  Variant (29)..(29): Xaa in position 29 is any or no amino acid
  Variant (35)..(35): Xaa in position 35 is Phe, Ile, Leu or Val
  Variant (38)..(38): Xaa in position 38 is Ile or Val
  Variant (45)..(45): Xaa in position 45 is any amino acid
  Variant (49)..(49): Xaa in position 49 is Ala or Ser
  Variant (52)..(52): Xaa in position 52 is Ala, Asn, Ser or Thr
  Variant (53)..(53): Xaa in position 53 is any amino acid
  Variant (55)..(55): Xaa in position 55 is any amino acid
RXPSXXGYQPXLXXXXGXXQERIXXTXKXGSITSXQAXYVPADDXTDPXPAXXFXHLD

SEQ ID NO: 43790 - protein, 59 aa, Artificial sequence
  protein pattern
  Variant (2)..(3): Xaa in position 2 to 3 is any amino acid
  Variant (5)..(5): Xaa in position 5 is Phe or Tyr
  Variant (6)..(6): Xaa in position 6 is any amino acid
  Variant (7)..(7): Xaa in position 7 is Lys or Arg
  Variant (11)..(11): Xaa in position 11 is Ile or Val
  Variant (24)..(24): Xaa in position 24 is any amino acid
  Variant (25)..(25): Xaa in position 25 is Ile or Met
  Variant (26)..(26): Xaa in position 26 is any amino acid
  Variant (30)..(30): Xaa in position 30 is any or no amino acid
  Variant (32)..(32): Xaa in position 32 is Ile or Val
  Variant (34)..(35): Xaa in position 34 to 35 is any amino acid
  Variant (37)..(37): Xaa in position 37 is Gly, Asn or Ser
  Variant (39)..(39): Xaa in position 39 is any amino acid
  Variant (43)..(43): Xaa in position 43 is Ala, Cys, Gly, Ser, Thr or Val
  Variant (45)..(45): Xaa in position 45 is Ala or Val
  Variant (53)..(53): Xaa in position 53 is Asn or Arg
  Variant (55)..(55): Xaa in position 55 is Phe, Leu or Met
  Variant (56)..(57): Xaa in position 56 to 57 is any amino acid
  Variant (59)..(59): Xaa in position 59 is Phe or Met
LXXPXXXGGKXGLFGGAGVGKTVXXXELIXNXAXXHXGXSVFXGXGERTREGXDXXXEX

SEQ ID NO: 43791 - protein, 21 aa, Artificial sequence
  protein pattern
  Variant (2)..(2): Xaa in position 2 is Ile or Val
  Variant (4)..(4): Xaa in position 4 is Phe or Leu
  Variant (6)..(6): Xaa in position 6 is Ile or Val
  Variant (10)..(10): Xaa in position 10 is Phe or Tyr
  Variant (12)..(12): Xaa in position 12 is Phe or Tyr
  Variant (13)..(13): Xaa in position 13 is Thr or Val
  Variant (14)..(14): Xaa in position 14 is any amino acid
  Variant (17)..(17): Xaa in position 17 is Ala, Ser or Thr
DXLXFXDNIXRXXXAGXEVSA

SEQ ID NO: 43792 - protein, 40 aa, Artificial sequence
  protein pattern
  Variant (2)..(3): Xaa in position 2 to 3 is any amino acid
  Variant (4)..(4): Xaa in position 4 is any or no amino acid
  Variant (6)..(6): Xaa in position 6 is any or no amino acid
  Variant (8)..(8): Xaa in position 8 is Asp, Glu, Gly, Asn or Gln
  Variant (9)..(10): Xaa in position 9 to 10 is any amino acid
  Variant (13)..(13): Xaa in position 13 is Ala, Cys, Gly or Thr
  Variant (14)..(14): Xaa in position 14 is Ile or Val
  Variant (15)..(15): Xaa in position 15 is Ala, Cys, Ser or Val
  Variant (16)..(16): Xaa in position 16 is Leu or Met
  Variant (17)..(18): Xaa in position 17 to 18 is any amino acid
  Variant (19)..(19): Xaa in position 19 is Ser or Thr
  Variant (20)..(20): Xaa in position 20 is Asp or Glu
  Variant (22)..(22): Xaa in position 22 is Phe, Ile, Leu, Met or Val
  Variant (23)..(23): Xaa in position 23 is any amino acid
  Variant (26)..(29): Xaa in position 26 to 29 is any amino acid
  Variant (30)..(30): Xaa in position 30 is Ala, Asp, Gly, Asn or Ser
  Variant (31)..(34): Xaa in position 31 to 34 is any amino acid
  Variant (35)..(35): Xaa in position 35 is Ile, Leu or Val
  Variant (36)..(37): Xaa in position 36 to 37 is any amino acid
VXXXLXGXXXVRXXXXXXXXGXXRGXXXXXXXXXXXXPVG

SEQ ID NO: 43793 - protein, 15 aa, Artificial sequence
  protein pattern
  Variant (2)..(2): Xaa in position 2 is Phe or Tyr
  Variant (11)..(11): Xaa in position 11 is Ala or Asn
  Variant (13)..(13): Xaa in position 13 is any amino acid
VXGQMNEPPGXRXRV

SEQ ID NO: 43794 - protein, 28 aa, Artificial sequence
  protein pattern
  Variant (2)..(5): Xaa in position 2 to 5 is any amino acid
  Variant (7)..(7): Xaa in position 7 is any amino acid
  Variant (8)..(8): Xaa in position 8 is Ile or Leu
  Variant (9)..(9): Xaa in position 9 is Ala or Ser
  Variant (10)..(10): Xaa in position 10 is Ala, Glu or Ser
  Variant (11)..(11): Xaa in position 11 is any amino acid
  Variant (21)..(21): Xaa in position 21 is Ala, Asp, Glu, Gly or Ser
  Variant (23)..(23): Xaa in position 23 is any amino acid
  Variant (25)..(26): Xaa in position 25 to 26 is any amino acid
  Variant (27)..(27): Xaa in position 27 is Ile, Leu or Met
  Variant (28)..(28): Xaa in position 28 is Ala, Asp, Glu, Asn, Gln, Ser or Thr
TXXXXRXXXXXGIYPAVDPLXSXSXXXX

SEQ ID NO: 43795 - protein, 27 aa, Artificial sequence
  protein pattern
  Variant (2)..(2): Xaa in position 2 is Ile or Val
  Variant (3)..(3): Xaa in position 3 is any amino acid
  Variant (4)..(4): Xaa in position 4 is Ala, Gly or Ser
  Variant (6)..(7): Xaa in position 6 to 7 is any amino acid
  Variant (8)..(8): Xaa in position 8 is Ile, Leu or Val
  Variant (9)..(10): Xaa in position 9 to 10 is any amino acid
  Variant (12)..(13): Xaa in position 12 to 13 is any amino acid
  Variant (15)..(15): Xaa in position 15 is any amino acid
  Variant (16)..(16): Xaa in position 16 is Phe, Ile, Leu, Met or Val
  Variant (19)..(19): Xaa in position 19 is any amino acid
  Variant (22)..(24): Xaa in position 22 to 24 is any amino acid
  Variant (26)..(26): Xaa in position 26 is any amino acid
  Variant (27)..(27): Xaa in position 27 is Phe, Ile, Leu, Met or Val
TXXXFXXXXXGXXDXXPEXAFXXXGXX

SEQ ID NO: 43796 - protein, 25 aa, Artificial sequence
  protein pattern
  Variant (3)..(4): Xaa in position 3 to 4 is any amino acid
  Variant (7)..(9): Xaa in position 7 to 9 is any amino acid
  Variant (10)..(10): Xaa in position 10 is Asp, Glu, Asn or Gln
  Variant (11)..(17): Xaa in position 11 to 17 is any amino acid
  Variant (18)..(18): Xaa in position 18 is Phe or Leu
  Variant (19)..(19): Xaa in position 19 is any amino acid
  Variant (25)..(25): Xaa in position 25 is Ile or Val
IHXXAPXXXXXXXXXXXXXTGIKVX

SEQ ID NO: 43797 - protein, 14 aa, Artificial sequence
  protein pattern
  Variant (2)..(2): Xaa in position 2 is Ser or Thr
  Variant (3)..(3): Xaa in position 3 is Ala or Gly
  Variant (6)..(6): Xaa in position 6 is Ile, Met or Val
  Variant (9)..(9): Xaa in position 9 is any amino acid
  Variant (13)..(13): Xaa in position 13 is any amino acid
  Variant (14)..(14): Xaa in position 14 is Ala, Glu, Gly, Asn or Gln
LXXLTXAEXFRDXX

SEQ ID NO: 43798 - protein, 13 aa, Artificial sequence
  protein pattern
  Variant (5)..(5): Xaa in position 5 is Phe, Ile, Leu or Met
  Variant (6)..(6): Xaa in position 6 is Asp or Asn
  Variant (8)..(8): Xaa in position 8 is any amino acid
  Variant (10)..(10): Xaa in position 10 is any amino acid
  Variant (11)..(11): Xaa in position 11 is Ala, Leu, Pro or Val
  Variant (12)..(12): Xaa in position 12 is Ile, Leu, Met or Val
LGRIXXVXGXXXD

SEQ ID NO: 43799 - protein, 13 aa, Artificial sequence
  protein pattern
  Variant (2)..(5): Xaa in position 2 to 5 is any or no amino acid
  Variant (7)..(7): Xaa in position 7 is Ala or Pro
  Variant (9)..(9): Xaa in position 9 is Ile, Leu or Val
  Variant (11)..(11): Xaa in position 11 is Ala, Ile or Val
  Variant (12)..(12): Xaa in position 12 is any amino acid
IXXXXGXVXDXXF

SEQ ID NO: 43800 - DNA, 1353 bp, Escherichia coli
  CDS (1)..(1353): transl_table=11
atgagtctgctgcaattcagtggcctgtttgttgtctggctgctctgcacgctgtttattgccacgctgacctggtttgagtttcgccgtgtgcgctttaacttcaatgtcttcttttcattgctgtttttgctcacctttttcttcggcttcccgctgaccagcgtgctggtatttcgctttgatgttggtgtcgcgccgccagaaatcttgttgcaggcgttgctttctgcgggctgcttctacgcggtttactatgtcacctacaaaacccgcctacgcaaacgcgttgctgatgtaccgcgccgtccgctgtttaccatgaaccgcgtggagaccaatcttacgtgggtgatcctgatgggtatcgcgctggtaagcgtcggcatcttcttcatgcacaacggctttttgctgttccggcttaactcctacagtcagatcttttccagtgaagtctccggcgtggcgttaaaacgcttcttttactttttcatcccggcgatgctggtggtctactttctgcgccaggacagcaaagcgtggctgtttttcctcgtcagcacggtcgcctttggcttgctgacttatatgattgtcggcggcactcgcgccaatatcatcatcgcattcgctatcttcctgtttattggcattattcgcggctggatttcgttgtggatgctggcggcggcgggcgtgctggggattgttggcatgttctggctggcactaaaacgctatggaatgaatgtgagcggcgatgaagcgttctatacgtttctctatctcactcgcgacaccttctcgccgtgggagaatctggcgttgctgttgcagaactacgacaacatcgacttccagggcctggctccaattgtccgcgatttctatgtctttatcccttcctggctgtggccgggtcgcccgagtatggtgctgaactcagccaactactttacctgggaagtgctgaataaccactccggactggcgatctcgcctacgcttataggctcactggtggtgatgggcggcgcgttgttcatcccgctcggggcgatcgtggttggtctgatcatcaaatggttcgactggctgtatgagctgggcaaccgcgagcctaatcgctataaagctgcgatattgcacagtttctgctttggggcgatcttcaatatgatcgtgctggcgcgtgaagggctggattcgtttgtctcacgcgtggtcttttttatcgtggtcttcggcgcatgtctgatgatcgcaaaactgttgtactggctttttgaaagcgccggactcattcataaacgtacaaaatcatcgctccggacgcaggttgaaggataa

SEQ ID NO: 43801 - protein, 450 aa, Escherichia coli
MSLLQFSGLFVVWLLCTLFIATLTWFEFRRVRFNFNVFFSLLFLLTFFFGFPLTSVLVFRFDVGVAPPEILLQALLSAGCFYAVYYVTYKTRLRKRVADVPRRPLFTMNRVETNLTWVILMGIALVSVGIFFMHNGFLLFRLNSYSQIFSSEVSGVALKRFFYFFIPAMLVVYFLRQDSKAWLFFLVSTVAFGLLTYMIVGGTRANIIIAFAIFLFIGIIRGWISLWMLAAAGVLGIVGMFWLALKRYGMNVSGDEAFYTFLYLTRDTFSPWENLALLLQNYDNIDFQGLAPIVRDFYVFIPSWLWPGRPSMVLNSANYFTWEVLNNHSGLAISPTLIGSLVVMGGALFIPLGAIVVGLIIKWFDWLYELGNREPNRYKAAILHSFCFGAIFNMIVLAREGLDSFVSRVVFFIVVFGACLMIAKLLYWLFESAGLIHKRTKSSLRTQVEG

SEQ ID NO: 43802 - DNA, 1305 bp, Haemophilus ducreyi 35000HP
  CDS (1)..(1305): transl_table=11
atgatgttagtcgaatatctcttacttagtagctgttatatatgctctgcttgtttgatgttatctttcatttataaagcctatcagcatcaacaattttcatttcattggttattcagtattatttatttcagtaccttttatctaggtttcccgtgctcaatgttattggcattgctgtttgatgtaacgctacctaactatgaaatgttattactcaccttattgactgcgttagtgagctacttactgtattacttcgtttataaacgagtaaatttgattcgacaagcggtacagaaaagacaggattttgctaaatcagaagctattttgaccgcttcactattgtgtatgattggactatttagcttaatcgcttttatctcaatgaatggcttgttaatttttaaattagaaaaatatagccaaatcttttctagtatcgtacaaggtatcccactaaaacgctttttttattttttcattgccggcttgttagtcttcttcttcctatatgaaaataaaaaaacttggttagcatttttattgattggcgcattttttggaggttttgcctatcttgcagtgggcggaacacgggctaaccttggtttagcgatcgtattattcttattattaggcctttataaaggctatttatcatataaatggttgctcttcatcggcgccagtatgattggcttaatgtttttgcttgcattagcgcgctataatttgaatgtcagtgggcgagaagcctttttcactttcttatatttaaccagagataccttttccccttgggaaaacgtagccttattattcatccacccgcttgaatatcaaggtttaatgccgatcgtacgtgatttttatgtctatttacccaattggctctgggcagacaaacccgatcaaattgtgaataccgctacttattttacacaccaagtattaggcaacgcttcagcattagtcatctcaccaaccttattaggttcattctatattatgggtggttttacaatgatagccataggtatggcattaaccgggctaattatcaaactttttgatcaactattagcttatgctaaacagcacattaaacacagcagttcagccatcttacaagcctattgctttgccaacctatttaacttaatcgtattagttcgtgatggattcgatgccttctgttcccgcttggttttctttagccttatttttggttgctgttggttagttgcgcgtgcaatagaccacatcatcataaacaaacacgtggtgaaggaaaaataa

SEQ ID NO: 43803 - protein, 434 aa, Haemophilus ducreyi 35000HP
MMLVEYLLLSSCYICSACLMLSFIYKAYQHQQFSFHWLFSIIYFSTFYLGFPCSMLLALLFDVTLPNYEMLLLTLLTALVSYLLYYFVYKRVNLIRQAVQKRQDFAKSEAILTASLLCMIGLFSLIAFISMNGLLIFKLEKYSQIFSSIVQGIPLKRFFYFFIAGLLVFFFLYENKKTWLAFLLIGAFFGGFAYLAVGGTRANLGLAIVLFLLLGLYKGYLSYKWLLFIGASMIGLMFLLALARYNLNVSGREAFFTFLYLTRDTFSPWENVALLFIHPLEYQGLMPIVRDFYVYLPNWLWADKPDQIVNTATYFTHQVLGNASALVISPTLLGSFYIMGGFTMIAIGMALTGLIIKLFDQLLAYAKQHIKHSSSAILQAYCFANLFNLIVLVRDGFDAFCSRLVFFSLIFGCCWLVARAIDHIIINKHVVKEK

SEQ ID NO: 43804 - DNA, 1338 bp, Actinobacillus pleuropneumoniae serovar 1 str. 4074
  CDS (1)..(1338): transl_table=11
atgatgattgaatatactttattaaccggtttttatctgctctcggtatggctgatagcgatttatatttatagcgattaccaaaagcagaggttttcattccatttactgtttagcctgatgtatctggtgattttttatctgggctttccgttttcaatggcaatggcattaggctttgatagtccgttagccgaacccgaaacgctctttctaaccctttttgtgatgttggcgggttatttgatttattggttgagttaccgcttttttaccggaacagtcagttttcagaaacctcaagcggttgaaaatataaaaaattttgcaaaaacagaagcaaatttgaccgcttgtttcttattattaattgctgctggtagtttggtttggtttgtttctcttaacggctggttattgtttgaattggaaaaatacagtcaaattttctcgacgacgattcaacacgtttggttgaaacgcttcttctatttctttctgccggcattattaattttatttttcctatatcaaaataaaaaagtatgggggctttttcttatattaggcattttgctcggcggtttgcactatattgcggtgggcggtacacgagcgaatttatcgatggcggtgctattgtttttcctattagggctttataaagattatctatcgtttaaggtgctattgatcgccggttgtgcaatggtcggcgccatgtttttattggcgttagcgcgttacggattaaaggtaagcggctcggaagcatggtttacttttttatatctgacacgagatacgttttccccatgggaaaacttcgccaaaattttagactatccggttgaatttcaaggcttaatgccgattgttcgagatttctatgtttatattccggattggttgtggcaggtaaaacctccttatatcgtcaatacggcaaattatttcacacgggagatgttaggcaatttctcggggttagcgatttcaccgacgctactcggctctttctatattatgggcggattgccgatgataactctcggtatggcatttgtcggcgggattattcaaagtttcgatcgtttatttagttatgcaacatatcatcaggacaaaagtcattccgctattattcaagcgtattgtctggcgaatctgtttaacttagtcgtattggtacgagaggggatggacgcctttgtttctcggtggattttctttagcgtgattttcttattgtgttggtgcgttgccaaattgatcgcgcttaattttgagccgctattatcgatggaaaaggtagataaaaatgatagaaacggttga

SEQ ID NO: 43805 - protein, 445 aa, Actinobacillus pleuropneumoniae serovar 1 str. 4074
MMIEYTLLTGFYLLSVWLIAIYIYSDYQKQRFSFHLLFSLMYLVIFYLGFPFSMAMALGFDSPLAEPETLFLTLFVMLAGYLIYWLSYRFFTGTVSFQKPQAVENIKNFAKTEANLTACFLLLIAAGSLVWFVSLNGWLLFELEKYSQIFSTTIQHVWLKRFFYFFLPALLILFFLYQNKKVWGLFLILGILLGGLHYIAVGGTRANLSMAVLLFFLLGLYKDYLSFKVLLIAGCAMVGAMFLLALARYGLKVSGSEAWFTFLYLTRDTFSPWENFAKILDYPVEFQGLMPIVRDFYVYIPDWLWQVKPPYIVNTANYFTREMLGNFSGLAISPTLLGSFYIMGGLPMITLGMAFVGGIIQSFDRLFSYATYHQDKSHSAIIQAYCLANLFNLVVLVREGMDAFVSRWIFFSVIFLLCWCVAKLIALNFEPLLSMEKVDKNDRNG

SEQ ID NO: 43806 - DNA, 1353 bp, Escherichia coli O157
  CDS (1)..(1353): transl_table=11
atgagtctgctgcaattcagtggcctgtttgttgtctggctgctctgcacgctgtttattgccacgctgacctggtttgagtttcgtcgtgtgcgctttaacttcaatgtattcttttcattgctgtttctgctcacctttttctttggcttcccgctgaccagcgtgctggtgtttcgctttgatgttggtgtcgcgccgccagaaatcctgttgcaggcgttgctttctgcgggctgcttctacgcggtttactacgtcacctacaaaacccgcctacgcaaacgcgttgctgatgtaccgcgccgtccgctgtttaccatgaaccgcgtggaaaccaatcttacgtgggtgatcctgatgggtatcgcgctggtaagcgtcggcatcttcttcatgcacaacggctttttgctgttccggcttaactcctacagtcagatcttttccagtgaagtctccggcgtggcgttaaaacgcttcttttactttttcatcccggcgatgctggtggtctactttctgcgccaggacagcaaagcgtggctgtttttcctcgtcagcacggtcgcctttggcttgctgacttatatgattgtcggcggcactcgcgccaatatcatcatcgcattcgctatcttcctgtttattggcattattcgcggctggatttcgttgtggatgctggcggcggcgggcgtgctggggattgttggcatgttctggctggcgctaaaacgctatggaatgaatgtgagcggcgatgaagcgttctatacgtttctctatctcactcgcgacaccttctcgccgtgggagaatctggcgttgctgttgcagaactacgacaacatcgacttccagggcctggcgccaattgtccgcgatttctatgtctttatcccttcctggctgtggccgggtcgcccgagtatggtgctgaactcagccaactactttacctgggaagtgctgaataaccactccggactggcgatctcgcctacgcttataggctcactggtggtgatgggcggcgcgttgttcatcccgctcggggcgattgtggttggactgatcatcaaatggttcgactggctgtatgagctgggcaaccgcgaaactaatcgctataaggctgcgatattgcacagtttctgctttggggcgatcttcaatatgatcgtgctggcgcgtgaagggctggattcgtttgtctcacgcgtggtcttttttatcgtggtcttcggcgcatgtctgatgatcgcaaaactgttgtactggctttttgaaagcgccggactcattcataaacgtacaaaatcatcgctccggacgcaggttgaaggataa

SEQ ID NO: 43807 - protein, 450 aa, Escherichia coli O157
MSLLQFSGLFVVWLLCTLFIATLTWFEFRRVRFNFNVFFSLLFLLTFFFGFPLTSVLVFRFDVGVAPPEILLQALLSAGCFYAVYYVTYKTRLRKRVADVPRRPLFTMNRVETNLTWVILMGIALVSVGIFFMHNGFLLFRLNSYSQIFSSEVSGVALKRFFYFFIPAMLVVYFLRQDSKAWLFFLVSTVAFGLLTYMIVGGTRANIIIAFAIFLFIGIIRGWISLWMLAAAGVLGIVGMFWLALKRYGMNVSGDEAFYTFLYLTRDTFSPWENLALLLQNYDNIDFQGLAPIVRDFYVFIPSWLWPGRPSMVLNSANYFTWEVLNNHSGLAISPTLIGSLVVMGGALFIPLGAIVVGLIIKWFDWLYELGNRETNRYKAAILHSFCFGAIFNMIVLAREGLDSFVSRVVFFIVVFGACLMIAKLLYWLFESAGLIHKRTKSSLRTQVEG

SEQ ID NO: 43808 - DNA, 1392 bp, Erwinia carotovora subsp
  CDS (1)..(1392)
atgacgcttgggcaatttggagggctgtttgtcgtctacctgatttcagtcatcttcatcctgagcttgacctggatggagtttcggcgcgtacgttttaactttaacgtgctgttctcgctgctctatttattgacgttctattttggttttccctttacctgcgtgctggtgttccggtttggcgttgaagtcgtccccgtgcagtatctgcttcaggcgatgttgtccgcaacggcgttctatgctgtctattacgtcagctacaagacgcgactacgccagaaaacctccgtgccgcgtgctccactcctgacggtgaaccgagttgaagctaatctgacctggctgctgctggcgttgattgcggtagccaccgtcggtattttcttcctcaacaatggcttcctgctgtttaagctgcgctcttacagccagatattctctagcgatgtgtccggtgtggcgttgaaacgctttttctacttcttcattccggcaatgctggtggtgtatttcctgcgccagacgcagcgagcgtggctactgttcctcatcggaacggtcgcatttggaatgctgacatatgtgattgtcggcgggacgcgcgcgaatctgatcattgccttcgccctatttctgtttattggcattgtgcgtggttggattacgctctggatgttggtcgctgctgggatatttggtattgtcgggatgttctggctggcgctgaagcgctatgggctggacgtcagcggtgattacgcattttataccttcctctatttaactcgtgacaccttctcgccctgggagaatctggcgctgctgtggcagaattatgacaagattgagtttcaggggctggcaccgattgctcgtgatttctacgtctttattccctcctggctatggcctgaccgtccgaatctggtgttaaacagcgcgaactatttcacctgggaagtgttgaataaccactctgggctggcgatatcccctacgctgttaggctcgctggtggtgatgggcggcgtgctatttatcccgttgggtgcgattgcggtagggctggttatcaagtggttcgactgggtgtacgagttagggaagaacgacagcaatcgctataaggccgccattttgcaggcgttctgcttcggtgcggtgttcaatattattgtgctaacgcgcgaaggcgtcgattcctttgtttcacgtgtggtgtttttctgtctgatatttggcctgtgcctgctcgttgccaaactgctttactggctgctggaaagcgccggactcatccggcagcgtctgaggcgcatgcgcgccacgccgctcgcgccgacacccaataccgtacaggatccggtgataaaggagcagatatga

SEQ ID NO: 43809 - protein, 463 aa, Erwinia carotovora subsp
MTLGQFGGLFVVYLISVIFILSLTWMEFRRVRFNFNVLFSLLYLLTFYFGFPFTCVLVFRFGVEVVPVQYLLQAMLSATAFYAVYYVSYKTRLRQKTSVPRAPLLTVNRVEANLTWLLLALIAVATVGIFFLNNGFLLFKLRSYSQIFSSDVSGVALKRFFYFFIPAMLVVYFLRQTQRAWLLFLIGTVAFGMLTYVIVGGTRANLIIAFALFLFIGIVRGWITLWMLVAAGIFGIVGMFWLALKRYGLDVSGDYAFYTFLYLTRDTFSPWENLALLWQNYDKIEFQGLAPIARDFYVFIPSWLWPDRPNLVLNSANYFTWEVLNNHSGLAISPTLLGSLVVMGGVLFIPLGAIAVGLVIKWFDWVYELGKNDSNRYKAAILQAFCFGAVFNIIVLTREGVDSFVSRVVFFCLIFGLCLLVAKLLYWLLESAGLIRQRLRRMRATPLAPTPNTVQDPVIKEQI

SEQ ID NO: 43810 - DNA, 1380 bp, Photorhabdus luminescens subsp
  CDS (1)..(1380)
atgactttaacgcagtttggcggattatttgttgtttatttaatatcactggttttcatcctgacgttgacttatcaggaattccggcgtgtacgctttaattttaatatattcttctcattgctttatttgctgacattctattttggttttccactgacatgtttgttggttttccaatttgatgttgaagtggtacctgtggacgccttactacacgctctactggcttcgacctgcttttatggtatttattacgtcagttataaaacacggctaagaaagccatctatgcagcctaaagcaccggtattcaccatgaaccgggtagaaactaactttacatggttactactggcatcagttgcggtggtgacagtggggctgttctttatgcaaaacggttttctactgtttaaattacagtcatacagtcaaattttttccagtcaggtttccggtgttgccctgaaacggttcttttacttctttattcctgccatgttggtggtttatttcttgaagccgacccagttacgctggctgttttttctgattagtacggttgcttttgggatactgacttatgtcgttgttggcggaacacgggctaatattatcattgcgttcgcgttgtttctgtttattggcattgtgcgtggctggataaccttgtggatgttggtaacggcgggcgcaatagggattgttggcatgttttggttggcactcaaacgctatagtttggatgtcagcggcgcagaggcgttttatacttttctctaccttacgagggatactttttccccgtgggaaaattttgcattactgctgaataactacgacaaaattgattttcaggggttggcacctattatccgtgatttctatgtctttattccaagttggctttggccaggacgtcctgatgctgtgttgaattctgcgaattattttacttgggaagtactggataaccactctggtctggcaatttctccgactctgataggctctctggttgtgatgggaggcgtgctgtttattccggttggtgcgattgttgttggattgataattaagtggtttgactggatttatgaattaggaaaacaggagactaatcgttataaggccgctatcttgcaggcattttgctttggcgcgatcttcaacatgattgtgttagctcgtgaaggcgtggattcatttgtttcccgagtggtatttttctgtattatttttggcttatgtctggtaattgctaagttgttgtattggctatttgagagtgcagggcttattagaatgtatctgactggcaaccgagtggtatcacaaaaatgtccgctgcaatgtgaggaaagaaaatggagctaa

SEQ ID NO: 43811 - protein, 459 aa, Photorhabdus luminescens subsp
MTLTQFGGLFVVYLISLVFILTLTYQEFRRVRFNFNIFFSLLYLLTFYFGFPLTCLLVFQFDVEVVPVDALLHALLASTCFYGIYYVSYKTRLRKPSMQPKAPVFTMNRVETNFTWLLLASVAVVTVGLFFMQNGFLLFKLQSYSQIFSSQVSGVALKRFFYFFIPAMLVVYFLKPTQLRWLFFLISTVAFGILTYVVVGGTRANIIIAFALFLFIGIVRGWITLWMLVTAGAIGIVGMFWLALKRYSLDVSGAEAFYTFLYLTRDTFSPWENFALLLNNYDKIDFQGLAPIIRDFYVFIPSWLWPGRPDAVLNSANYFTWEVLDNHSGLAISPTLIGSLVVMGGVLFIPVGAIVVGLIIKWFDWIYELGKQETNRYKAAILQAFCFGAIFNMIVLAREGVDSFVSRVVFFCIIFGLCLVIAKLLYWLFESAGLIRMYLTGNRVVSQKCPLQCEERKWS

SEQ ID NO: 43812 - DNA, 1359 bp, Salmonella choleraesuis
  CDS (1)..(1359): transl_table=11
atgagtgtaatgcaattcagcgggctgctggtggtctggctgctctctacgctgtttatcgccacgctgacctggtttgaattccgccgcgtgcgttttaacttcaacgttttcttttcgttgctgtttttgttgaccttcttttttggttttccgctaaccagcgtgctggtatttcgtttcgacgttggcgtcgcgccgccggaaatcttattgcaggctctattatccgccgcctgtttctacggcgtgtattacgtgacctataaaacgcgtttacgcaaacgcgttgtggatgtaccacgcaagccgctatttaccatgaaccgggtggaaacccaccttacctgggtgatcctgatgggcatcgcgctggtgagcgtggcgattttctttatgcataacggctttttgctgttccggctgcactcctacagccagatcttttccagcgaagtctccggcgtggcgttaaaacggttcttctatttcttcattccggcgatgctggtggtctatttcctgcgccaggacagcaaagcgtggctgttctttctggtgagcaccgtcgcgtttggtctgttgacctacatgattgtcggcggcacgcgcgctaacatcattattgcgtttgctatcttcctgtttatcggcattattcggggctggatcagcctgtggatgctggcggcggcgggcgtgctggggattgtcggtatgttctggctggcgctcaaacgctacggattaaatgtgagcggcgatgaggcgttctatacgtttctttatctgacgcgcgataccttttcgccgtgggagaatctggcgctgctgttgcaaaattaccacaatatcgagtttcaggggctggcccctatcgtgcgtgatttctacgtctttattcccacctggttatggccgggacgacccagcatcgtgctgaattctgcgaattacttcacctgggaagtcctgaacaaccattctggcctggcgatatcgccaacgcttatcggatcgctggtggtcatgggcggggcgctgtttattccgctcggcgcgatcgttgtcgggttgattatcaaatggttcgactggctgtatgaactgggtaaccgggagcccaatcgctataaggcggcgattctgcacagtttctgctttggcgccatctttaatatgattgtgctggcgcgagaagggctggattcgtttgtttcgcgcgtggttttcttcctggtggtttttggcgccagcctgctggtcgctaagcttctgttctggttatttgatagcgccggactgattcataaacgtacaacttcgctccctcaggcacaggtggaaggaaaactatga

SEQ ID NO: 43813 - protein, 452 aa, Salmonella choleraesuis
MSVMQFSGLLVVWLLSTLFIATLTWFEFRRVRFNFNVFFSLLFLLTFFFGFPLTSVLVFRFDVGVAPPEILLQALLSAACFYGVYYVTYKTRLRKRVVDVPRKPLFTMNRVETHLTWVILMGIALVSVAIFFMHNGFLLFRLHSYSQIFSSEVSGVALKRFFYFFIPAMLVVYFLRQDSKAWLFFLVSTVAFGLLTYMIVGGTRANIIIAFAIFLFIGIIRGWISLWMLAAAGVLGIVGMFWLALKRYGLNVSGDEAFYTFLYLTRDTFSPWENLALLLQNYHNIEFQGLAPIVRDFYVFIPTWLWPGRPSIVLNSANYFTWEVLNNHSGLAISPTLIGSLVVMGGALFIPLGAIVVGLIIKWFDWLYELGNREPNRYKAAILHSFCFGAIFNMIVLAREGLDSFVSRVVFFLVVFGASLLVAKLLFWLFDSAGLIHKRTTSLPQAQVEGKL

SEQ ID NO: 43814 - DNA, 1359 bp, Salmonella paratyphi
  CDS (1)..(1359): transl_table=11
atgagtttaatgcaattcagcgggctgctggtggtctggctgctctctacgctgtttatcgccacgctgacctggtttgaattccgccgcgtgcgttttaacttcaacgttttcttttcgttgctgtttttgttgaccttcttttttggttttccgctaaccagcgtgctggtatttcgtttcgacgttggcgtcgcgccgccggaaatcttattgcaggctctattatccgccgcctgtttctacggcgtatattacgtgacctataaaacgcgtttacgcaaacgcgttgtggatgtaccacgcaagccgctatttaccatgaaccgggtggaaacccaccttacctgggtgatcctgatgggcatcgcgctggtgagcgtggcgattttctttatgcataacggctttttgctgttccggctgcactcctacagccagatattttccagcgaagtctccggcgtggcgttaaaacggttcttctatttcttcattccggcgatgctggtggtctatttcctgcgccaggacagcaaagcgtggctgttctttctggtgagcaccgtcgcgtttggtctgttgacctacatgattgtcggcggcacgcgcgctaacatcattattgcgtttgctatcttcctgtttatcggcattattcggggctggatcagcctgtggatgctggcggcggcgggcgtgctggggattgtcggtatgttctggctggcgctcaaacgctacggattaaatgtgagcggcgatgaggcgttctatacgtttctttatctgacgcgcgataccttttcgccgtgggagaatctggcgctgctgttgcaaaattaccacaatatcgattttcaggggctggcccctatcgtgcgtgatttctacgtctttattcccacctggttatggccggggcgacccagtatcgtgctgaattctgcgaattacttcacctgggaagtcctgaacaaccattctggcctggcgatatcgccaacgcttatcggatcgctggtggttatgggcggggcgctgtttattccgctcggcgcgatcgtcgtcgggctgattatcaaatggttcgactggctgtatgaactgggtaaccgggagcccaatcgctataaggcggcgattctgcacagtttctgctttggcgccatctttaatatgattgtgctggcgcgagaagggctggattcgtttgtttcgcgcgtggttttcttcctggtggtttttggcgccagcctgctggtcgctaagcttctgttctggttatttgatagcgccggactgattcataaacgtacaacttcgctccctcaggcacaggtggaaggaaaactatga

SEQ ID NO: 43815 - protein, 452 aa, Salmonella paratyphi
MSLMQFSGLLVVWLLSTLFIATLTWFEFRRVRFNFNVFFSLLFLLTFFFGFPLTSVLVFRFDVGVAPPEILLQALLSAACFYGVYYVTYKTRLRKRVVDVPRKPLFTMNRVETHLTWVILMGIALVSVAIFFMHNGFLLFRLHSYSQIFSSEVSGVALKRFFYFFIPAMLVVYFLRQDSKAWLFFLVSTVAFGLLTYMIVGGTRANIIIAFAIFLFIGIIRGWISLWMLAAAGVLGIVGMFWLALKRYGLNVSGDEAFYTFLYLTRDTFSPWENLALLLQNYHNIDFQGLAPIVRDFYVFIPTWLWPGRPSIVLNSANYFTWEVLNNHSGLAISPTLIGSLVVMGGALFIPLGAIVVGLIIKWFDWLYELGNREPNRYKAAILHSFCFGAIFNMIVLAREGLDSFVSRVVFFLVVFGASLLVAKLLFWLFDSAGLIHKRTTSLPQAQVEGKL

SEQ ID NO: 43816 - DNA, 1359 bp, Salmonella typhi
  CDS (1)..(1359): transl_table=11
atgagtttaatgcaattcagcgggctgctggtggtctggctgctctctacgctgtttatcgccacgctgacttggtttgaattccgccgcgtgcgttttaacttcaacgttttcttttcgttgctttttttgttgaccttcttttttggttttccgctaaccagcgtgctggtatttcgtttcgacgttggcgtcgcgccgccggaaatcttattgcaggctctattatccgccgcctgtttctacggcgtgtattacgtgacctataaaacgcgtttacgcaaacgcgttgtggatgtaccacgcaagccgctatttaccatgaaccgggtggaaacccaccttacctgggtgatcctgatgggcatcgcgctggtgagcgtggcgattttctttatgcataacggctttttgctgttccgactacactcctacagccagatcttttccagcgaagtttccggcgtggcgttaaaacggttcttctatttcttcattccggcgatgctggtggtctatttcctgcgccaagacagcaaagcgtggctgttctttctggtgagcaccgtcgcgtttggtctgttgacctacatgattgtcggcggcacgcgcgccaacatcattattgcgtttgctatcttcctgtttatcggcattattcggggctggatcagcctgtggatgctggcagcggcgggcgtgctggggattgtcggtatgttctggctggcgctcaaacgctacggattaaatgtgagcggcgatgaggcgttctatacgtttctttatctgacgcgcgataccttttcgccgtgggagaatctggcgctgctgttgcaaaattaccacaatatcgattttcaggggctggcccctatcgtgcgtgatttctacgtctttattcctacctggttatggccgggacgacccagtatcgtgctgaattctgcgaattacttcacctgggaagtcctgaacaaccattctggcctggcgatatcgccaacgcttatcggatcgctggtggtcatgggcggggcactgtttattccgctcggcgcgatcgtcgtcgggctgattatcaaatggttcgactggctgtatgaactgggtaaccgggaacccaatcgctataaggcggcgattctgcacagtttctgctttggcgccatctttaatatgattgtgctggcgcgagaagggctggattcgtttgtttcgcgcgtggttttcttcctggtggtttttggcgccagcctgctggtcgctaaacttctgttctggttatttgatagcgccggactgattcataaacgtacaacttcgctccctcaggcacagatggatggaaaactatga

SEQ ID NO: 43817 - protein, 452 aa, Salmonella typhi
MSLMQFSGLLVVWLLSTLFIATLTWFEFRRVRFNFNVFFSLLFLLTFFFGFPLTSVLVFRFDVGVAPPEILLQALLSAACFYGVYYVTYKTRLRKRVVDVPRKPLFTMNRVETHLTWVILMGIALVSVAIFFMHNGFLLFRLHSYSQIFSSEVSGVALKRFFYFFIPAMLVVYFLRQDSKAWLFFLVSTVAFGLLTYMIVGGTRANIIIAFAIFLFIGIIRGWISLWMLAAAGVLGIVGMFWLALKRYGLNVSGDEAFYTFLYLTRDTFSPWENLALLLQNYHNIDFQGLAPIVRDFYVFIPTWLWPGRPSIVLNSANYFTWEVLNNHSGLAISPTLIGSLVVMGGALFIPLGAIVVGLIIKWFDWLYELGNREPNRYKAAILHSFCFGAIFNMIVLAREGLDSFVSRVVFFLVVFGASLLVAKLLFWLFDSAGLIHKRTTSLPQAQMDGKL

SEQ ID NO: 43818 - DNA, 1359 bp, Salmonella typhimurium
  CDS (1)..(1359): transl_table=11
atgagtttaatgcaattcagcgggctgctggtggtctggctgctctctacgctgtttatcgccacgctgacctggtttgaattccgccgcgtgcgttttaacttcaacgttttcttttcgttgctgtttttgttgaccttcttttttggttttccgctaaccagcgtgctggtatttcgtttcgacgttggcgtcgcgccgccggaaatcttattgcaggctctattatccgccgcctgtttctacggcgtgtattacgtgacctataaaacgcgtttacgcaaacgcgttgtggatgtaccacgcaagccgctatttaccatgaaccgggtggaaacccaccttacctgggtgatcctgatgggcatcgcgctggtgagcgtggcgattttctttatgcataacggctttttgctgttccggctgcactcctacagccagatcttttccagcgaagtctccggcgtggcgttaaaacggttcttctatttcttcattccggcgatgctggtggtctatttcctgcgccaggacagcaaagcgtggctgttctttctggtgagcaccgtcgcgtttggtctgttgacctacatgattgtcggcggcacgcgcgctaacatcattattgcgtttgctatcttcctgtttatcggcattattcggggctggatcagcctgtggatgctggcggcggcgggcgtgctggggattgtcggtatgttctggctggcgctcaaacgctacggattaaatgtgagcggcgatgaggcgttctatacgtttctttatctaacgcgcgataccttttcgccgtgggagaatctggcgctgctgttgcaaaattaccacaatatcgagtttcaggggctggcccctatcgtgcgtgatttctacgtctttattcccacctggttatggccgggacgacccagtattgtgctgaactctgcgaattacttcacttgggaagtcctgaacaaccattctggcctggcgatatcgccaacgcttatcggatcgctggtggtcatgggcggggcgctgtttattccgctcggcgcgatcgtcgtcgggctgattatcaaatggttcgactggctgtatgaactgggtaaccgggagcccaatcgctataaggcggcgattctgcacagtttctgctttggcgccatctttaatatgattgtgctggcgcgagaagggctggattcgtttgtttcgcgcgtggttttcttcctggtggtttttggcgccagcctgctggtcgctaagcttctgttctggttatttgatagcgccgggctgattcataaacgtacaacttcgctccctcaggcacaggtggaaggaaaactatga

SEQ ID NO: 43819 - protein, 452 aa, Salmonella typhimurium
MSLMQFSGLLVVWLLSTLFIATLTWFEFRRVRFNFNVFFSLLFLLTFFFGFPLTSVLVFRFDVGVAPPEILLQALLSAACFYGVYYVTYKTRLRKRVVDVPRKPLFTMNRVETHLTWVILMGIALVSVAIFFMHNGFLLFRLHSYSQIFSSEVSGVALKRFFYFFIPAMLVVYFLRQDSKAWLFFLVSTVAFGLLTYMIVGGTRANIIIAFAIFLFIGIIRGWISLWMLAAAGVLGIVGMFWLALKRYGLNVSGDEAFYTFLYLTRDTFSPWENLALLLQNYHNIEFQGLAPIVRDFYVFIPTWLWPGRPSIVLNSANYFTWEVLNNHSGLAISPTLIGSLVVMGGALFIPLGAIVVGLIIKWFDWLYELGNREPNRYKAAILHSFCFGAIFNMIVLAREGLDSFVSRVVFFLVVFGASLLVAKLLFWLFDSAGLIHKRTTSLPQAQVEGKL

SEQ ID NO: 43820 - DNA, 1353 bp, Shigella flexneri
  CDS (1)..(1353): transl_table=11
atgagtctgctgcaattcagtggcctgtttgtggtctggctgctctgcacgctgtttattgccacgctgacctggtttgagtttcgccgtgtgcgctttaacttcaatgtcttcttttcattgctgtttttgctcacctttttcttcggcttcccgctgaccagcgtgctggtatttcgctttgatgttggtgtcgcgccgccagaaatcttgttgcaggtgttgctttctgcgggctgcttctacgcggtttactatgtcacctacaaaacccgcctacgcaaacgcgttgctgatgtaccgcgccgtccgctgtttaccatgaaccgcgtggagaccaatcttacgtgggtgatcctgatgggtatcgcgctggtaagcgtcggcatcttcttcatgcacaacggctttttgctgttccggcttaactcctacagtcagatcttttccagtgaagtctccggcgtggcgttaaaacgcttcttttactttttcatcccggcgatgctggtggtctactttctgcgccaggacagcaaagcgtggctgtttttcctcgtcagcacggtcgcctttggcttgctgacttatatgattgtcggcggcactcgcgccaatatcatcatcgcattcgctatcttcctgtttattggcattattcgcggctggatttcgttgtggatgctggcggcggcgggcgtgctggggattgttggcatgttctggctggcgttaaaacgctatggaatgaatgtgagcggcgatgaagcgttctatacgtttctctatctcactcgcgacaccttttcaccgtgggagaatctggcgttgctgttgcagaactacgacaacatcgacttccagggcctggctccaattgtccgcgatttctatgtctttatcccttcctggctgtggccggggcgcccgagtatggtgctgaactcagccaattactttacctgggaagtactgaataaccactccggactggcgatctcgcctacgcttataggctcactggtggtgatgggcggcgcgttgttcatcccactcggggcgattgtggttggactgatcatcaaatggttcgactggctgtatgagctgggcaaccgcgagactaatcgctataaggctgcgatattgcacagtttctgctttggggcgatcttcaatatgatcgtgctggcacgtgaagggctggattcgtttgtctcacgcgtagtcttttttatcgtggtcttcggcgcatgtctgatgatcgcaaaactgttgtactggctttttgaaagcgccggactcattcataaacgtacaaaatcatcgctccggacgcaggttgaaggataa

SEQ ID NO: 43821 - protein, 450 aa, Shigella flexneri
MSLLQFSGLFVVWLLCTLFIATLTWFEFRRVRFNFNVFFSLLFLLTFFFGFPLTSVLVFRFDVGVAPPEILLQVLLSAGCFYAVYYVTYKTRLRKRVADVPRRPLFTMNRVETNLTWVILMGIALVSVGIFFMHNGFLLFRLNSYSQIFSSEVSGVALKRFFYFFIPAMLVVYFLRQDSKAWLFFLVSTVAFGLLTYMIVGGTRANIIIAFAIFLFIGIIRGWISLWMLAAAGVLGIVGMFWLALKRYGMNVSGDEAFYTFLYLTRDTFSPWENLALLLQNYDNIDFQGLAPIVRDFYVFIPSWLWPGRPSMVLNSANYFTWEVLNNHSGLAISPTLIGSLVVMGGALFIPLGAIVVGLIIKWFDWLYELGNRETNRYKAAILHSFCFGAIFNMIVLAREGLDSFVSRVVFFIVVFGACLMIAKLLYWLFESAGLIHKRTKSSLRTQVEG

SEQ ID NO: 43822 - DNA, 1365 bp, Yersinia pestis
  CDS (1)..(1365): transl_table=11
atgacgctggggcaatttggcggtctattttgtatttatttgatagcagtcatttttattctgacactaacctatcaggaatttcggcgggttaagtttaactttaacgttttgttttcaatgctttatctgttgaccttctattttggtttcccactgacttgtatgctggtgtttcagtttggggtggcggtggtgccggttgagtatttgttgtacgccatgctgtctgctacggccttttatggcatttactatgtcacctataaaacacggttacgtcagcctcgtagccagccgcgcacgccaatattcaccatgaaccgggtagaaactaatctgacctgggtgctgctggcactggtcgcggtagggaccgtcggcatcttctttatgcaaaacggtttcttgctgtttaagctggattcctacagcaaaatattctccagtgatgtctctggtgtcgccctgaagcgttttttctacttctttatcccggcaatgctggtggtttatttcctcaaacaggatcggcgggcctggttcttcttccttgccagcacggtggcgtttggcattctaacttatgtcatcgttggtgggacgcgtgccaatatcattatcgcattctcattgttcctgtttatcggtatcgtccgtggatggataaccctgtggatgctagcggcggcaggtgtcttcgggattgtcggtatgttctggctggcccttaaacgttatggcctggatgtgaacggtgcagaggcattttacaccttcctctatttgacgcgggacaccttctcgccctgggaaaacctcgggttattgctacagaactacgacaaaatagatttccaggggctggcaccgattgtccgtgatttttatgtctttattccaagcgcgctgtggccagaacgcccggatttggtactgaataccgccaattactttacctgggacgttttggacaatcactctgggctggctatctcgccaacgctgattggttctctggtggtcatggggggggtattgtttatcccgctgggggccattgttgtggggcttatcatcaaatggttcgattggttgtatgaacaaggcaaggccgagagtaatcgctataaagcggcgatcctgcaaagcttctgttttggggcggtgtttaatatcattgtcttggcacgtgaagggctggattcctttgtctcacgagtggtatttttctgcgttatctttggtgcctgtctggtactggcaaaattgttgtactggttgttcgatacggcgggcttgataaagcgtcaggggattaaatccaaccgattatcaacgcctaacgcgggcaatcaactgtaa

SEQ ID NO: 43823 - protein, 454 aa, Yersinia pestis
MTLGQFGGLFCIYLIAVIFILTLTYQEFRRVKFNFNVLFSMLYLLTFYFGFPLTCMLVFQFGVAVVPVEYLLYAMLSATAFYGIYYVTYKTRLRQPRSQPRTPIFTMNRVETNLTWVLLALVAVGTVGIFFMQNGFLLFKLDSYSKIFSSDVSGVALKRFFYFFIPAMLVVYFLKQDRRAWFFFLASTVAFGILTYVIVGGTRANIIIAFSLFLFIGIVRGWITLWMLAAAGVFGIVGMFWLALKRYGLDVNGAEAFYTFLYLTRDTFSPWENLGLLLQNYDKIDFQGLAPIVRDFYVFIPSALWPERPDLVLNTANYFTWDVLDNHSGLAISPTLIGSLVVMGGVLFIPLGAIVVGLIIKWFDWLYEQGKAESNRYKAAILQSFCFGAVFNIIVLAREGLDSFVSRVVFFCVIFGACLVLAKLLYWLFDTAGLIKRQGIKSNRLSTPNAGNQL

SEQ ID NO: 43824 - DNA, 23 bp, Artificial sequence
  primer
atgagtctgctgcaattcagtgg

SEQ ID NO: 43825 - DNA, 21 bp, Artificial sequence
  primer
ttatccttcaacctgcgtccg

SEQ ID NO: 43826 - protein, 438 aa, Artificial sequence
  consensus sequence
  Variant (2)..(2): Xaa in position 2 is any amino acid
  Variant (4)..(4): Xaa in position 4 is any amino acid
  Variant (7)..(7): Xaa in position 7 is any amino acid
  Variant (10)..(13): Xaa in position 10 to 13 is any amino acid
  Variant (15)..(18): Xaa in position 15 to 18 is any amino acid
  Variant (21)..(22): Xaa in position 21 to 22 is any amino acid
  Variant (25)..(26): Xaa in position 25 to 26 is any amino acid
  Variant (37)..(38): Xaa in position 37 to 38 is any amino acid
  Variant (43)..(43): Xaa in position 43 is any amino acid
  Variant (48)..(48): Xaa in position 48 is any amino acid
  Variant (53)..(53): Xaa in position 53 is any amino acid
  Variant (55)..(56): Xaa in position 55 to 56 is any amino acid
  Variant (60)..(60): Xaa in position 60 is any amino acid
  Variant (64)..(64): Xaa in position 64 is any amino acid
  Variant (66)..(66): Xaa in position 66 is any amino acid
  Variant (68)..(68): Xaa in position 68 is any amino acid
  Variant (70)..(70): Xaa in position 70 is any amino acid
  Variant (73)..(74): Xaa in position 73 to 74 is any amino acid
  Variant (77)..(77): Xaa in position 77 is any amino acid
  Variant (79)..(80): Xaa in position 79 to 80 is any amino acid
  Variant (83)..(84): Xaa in position 83 to 84 is any amino acid
  Variant (88)..(88): Xaa in position 88 is any amino acid
  Variant (95)..(96): Xaa in position 95 to 96 is any amino acid
  Variant (97)..(100): Xaa in position 97 to 100 is any or no amino acid
  Variant (102)..(103): Xaa in position 102 to 103 is any amino acid
  Variant (105)..(106): Xaa in position 105 to 106 is any amino acid
  Variant (107)..(108): Xaa in position 107 to 108 is any or no amino acid
  Variant (110)..(110): Xaa in position 110 is any amino acid
  Variant (115)..(116): Xaa in position 115 to 116 is any amino acid
  Variant (120)..(121): Xaa in position 120 to 121 is any amino acid
  Variant (123)..(124): Xaa in position 123 to 124 is any amino acid
  Variant (127)..(129): Xaa in position 127 to 129 is any amino acid
  Variant (131)..(132): Xaa in position 131 to 132 is any amino acid
  Variant (135)..(136): Xaa in position 135 to 136 is any amino acid
  Variant (143)..(143): Xaa in position 143 is any amino acid
  Variant (145)..(145): Xaa in position 145 is any amino acid
  Variant (154)..(154): Xaa in position 154 is any amino acid
  Variant (178)..(178): Xaa in position 178 is any amino acid
  Variant (180)..(183): Xaa in position 180 to 183 is any amino acid
  Variant (186)..(186): Xaa in position 186 is any amino acid
  Variant (189)..(190): Xaa in position 189 to 190 is any amino acid
  Variant (196)..(196): Xaa in position 196 is any amino acid
  Variant (200)..(201): Xaa in position 200 to 201 is any amino acid
  Variant (209)..(209): Xaa in position 209 is any amino acid
  Variant (214)..(215): Xaa in position 214 to 215 is any amino acid
  Variant (222)..(222): Xaa in position 222 is any amino acid
  Variant (227)..(227): Xaa in position 227 is any amino acid
  Variant (232)..(233): Xaa in position 232 to 233 is any amino acid
  Variant (236)..(237): Xaa in position 236 to 237 is any amino acid
  Variant (252)..(253): Xaa in position 252 to 253 is any amino acid
  Variant (257)..(257): Xaa in position 257 is any amino acid
  Variant (277)..(277): Xaa in position 277 is any amino acid
  Variant (282)..(282): Xaa in position 282 is any amino acid
  Variant (285)..(286): Xaa in position 285 to 286 is any amino acid
  Variant (288)..(288): Xaa in position 288 is any amino acid
  Variant (305)..(305): Xaa in position 305 is any amino acid
  Variant (310)..(310): Xaa in position 310 is any amino acid
  Variant (313)..(314): Xaa in position 313 to 314 is any amino acid
  Variant (318)..(318): Xaa in position 318 is any amino acid
  Variant (328)..(328): Xaa in position 328 is any amino acid
  Variant (340)..(340): Xaa in position 340 is any amino acid
  Variant (349)..(349): Xaa in position 349 is any amino acid
  Variant (358)..(358): Xaa in position 358 is any amino acid
  Variant (372)..(372): Xaa in position 372 is any amino acid
  Variant (374)..(377): Xaa in position 374 to 377 is any amino acid
  Variant (386)..(387): Xaa in position 386 to 387 is any amino acid
  Variant (393)..(393): Xaa in position 393 is any amino acid
  Variant (396)..(396): Xaa in position 396 is any amino acid
  Variant (400)..(400): Xaa in position 400 is any amino acid
  Variant (404)..(404): Xaa in position 404 is any amino acid
  Variant (415)..(417): Xaa in position 415 to 417 is any amino acid
  Variant (420)..(421): Xaa in position 420 to 421 is any amino acid
  Variant (423)..(424): Xaa in position 423 to 424 is any amino acid
  Variant (429)..(429): Xaa in position 429 is any amino acid
  Variant (433)..(434): Xaa in position 433 to 434 is any amino acid
MXLXQFXGLXXXXLXXXXFIXXLTXXEFRRVRFNFNXXFSLLXLLTFXFGFPXTXXLVFXFDVXVXPXEXLLXXLLXAXXFYXXYYVXYKTRLRXXXXXXPXXPXXXXTXNRVEXXLTWXXLXXIAXXXVXXFFXXNGFLLFXLXSYSQIFSSXVSGVALKRFFYFFIPAMLVVYFLXQXXXXWLXFLXXTVAFGXLTYXXVGGTRANXIIAFXXFLFIGIXRGWIXLWMLXXAGXXGIVGMFWLALKRYGXXVSGXEAFYTFLYLTRDTFSPWENXALLLXNYXXIXFQGLAPIVRDFYVFIPXWLWPXRPXXVLNXANYFTWEVLXNHSGLAISPTLXGSLVVMGGXLFIPLGAIXVGLIIKWFDWLYEXGXXXXNRYKAAILXXFCFGAXFNXIVLXREGXDSFVSRVVFFXXXFGXXLXXAKLLXWLFXXAGLI

SEQ ID NO: 43827 - protein, 54 aa, Artificial sequence
  protein pattern
  Variant (8)..(8): Xaa in position 8 is Ala, Ile or Val
  Variant (17)..(17): Xaa in position 17 is Ser or Thr
  Variant (18)..(18): Xaa in position 18 is any amino acid
  Variant (22)..(22): Xaa in position 22 is Asp, Glu or Gly
  Variant (25)..(25): Xaa in position 25 is Asp, Asn or Ser
  Variant (26)..(26): Xaa in position 26 is any amino acid
  Variant (30)..(30): Xaa in position 30 is Ser or Thr
  Variant (37)..(37): Xaa in position 37 is Asp or Glu
  Variant (40)..(40): Xaa in position 40 is Asp or Asn
  Variant (52)..(52): Xaa in position 52 is Ile or Leu
FQGLAPIXRDFYVFIPXXLWPXRPXXVLNXANYFTWXVLXNHSGLAISPTLXGS

SEQ ID NO: 43828 - protein, 41 aa, Artificial sequence
  protein pattern
  Variant (14)..(14): Xaa in position 14 is Gly or Ser
  Variant (15)..(15): Xaa in position 15 is Leu or Met
  Variant (16)..(16): Xaa in position 16 is Asp or Asn
  Variant (18)..(18): Xaa in position 18 is Asn or Ser
  Variant (20)..(20): Xaa in position 20 is Ala or Asp
  Variant (21)..(21): Xaa in position 21 is any amino acid
  Variant (40)..(40): Xaa in position 40 is Phe or Leu
  Variant (41)..(41): Xaa in position 41 is Ala or Gly
GIVGMFWLALKRYXXXVXGXXAFYTFLYLTRDTFSPWENXX

SEQ ID NO: 43829 - protein, 61 aa, Artificial sequence
  protein pattern
  Variant (4)..(4): Xaa in position 4 is Leu or Val
  Variant (8)..(8): Xaa in position 8 is any or no amino acid
  Variant (10)..(10): Xaa in position 10 is any or no amino acid
  Variant (13)..(13): Xaa in position 13 is Ile or Val
  Variant (20)..(20): Xaa in position 20 is Ile, Leu or Val
  Variant (23)..(23): Xaa in position 23 is any amino acid
  Variant (25)..(26): Xaa in position 25 to 26 is any amino acid
  Variant (27)..(27): Xaa in position 27 is Asp or Glu
  Variant (28)..(28): Xaa in position 28 is Pro, Ser or Thr
  Variant (37)..(37): Xaa in position 37 is any amino acid
  Variant (38)..(38): Xaa in position 38 is Ala or Ser
  Variant (44)..(44): Xaa in position 44 is Ile or Val
  Variant (47)..(47): Xaa in position 47 is Ile or Met
  Variant (51)..(51): Xaa in position 51 is Ala or Thr
  Variant (55)..(55): Xaa in position 55 is Leu or Val
FIPXGAIXVXGLXIKWFDWXYEXGXXXXNRYKAAILXXFCFGAXFNXIVLXREGXDSFVSR

SEQ ID NO: 43830 - protein, 59 aa, Artificial sequence
  protein pattern
  Variant (2)..(2): Xaa in position 2 is any amino acid
  Variant (7)..(7): Xaa in position 7 is Asp, Glu or Gln
  Variant (31)..(31): Xaa in position 31 is Lys or Arg
  Variant (32)..(32): Xaa in position 32 is Pro or Gln
  Variant (33)..(33): Xaa in position 33 is Asp or Thr
  Variant (34)..(34): Xaa in position 34 is Gln, Arg or Ser
  Variant (35)..(36): Xaa in position 35 to 36 is any amino acid
  Variant (38)..(39): Xaa in position 38 to 39 is Phe or Leu
  Variant (42)..(42): Xaa in position 42 is Ala, Ile or Val
  Variant (43)..(43): Xaa in position 43 is Gly or Ser
  Variant (49)..(49): Xaa in position 49 is Ile, Leu or Met
  Variant (53)..(53): Xaa in position 53 is Met or Val
  Variant (54)..(54): Xaa in position 54 is Ile or Val
SXIFSSXVSGVALKRFFYFFIPAMLVVYFLXXXXXXWXXFLXXTVAFGXLTYXXVGGTR

SEQ ID NO: 43831 - protein, 40 aa, Artificial sequence
  protein pattern
  Variant (5)..(5): Xaa in position 5 is any amino acid
  Variant (6)..(6): Xaa in position 6 is any or no amino acid
  Variant (8)..(8): Xaa in position 8 is any or no amino acid
  Variant (10)..(10): Xaa in position 10 is Leu or Met
  Variant (12)..(12): Xaa in position 12 is Phe or Tyr
  Variant (17)..(17): Xaa in position 17 is Phe or Tyr
  Variant (22)..(22): Xaa in position 22 is Phe or Leu
  Variant (24)..(24): Xaa in position 24 is Cys or Ser
  Variant (25)..(25): Xaa in position 25 is Leu, Met or Val
  Variant (29)..(29): Xaa in position 29 is Gln or Arg
  Variant (31)..(31): Xaa in position 31 is Asp or Gly
  Variant (33)..(33): Xaa in position 33 is Ala, Glu or Gly
  Variant (35)..(35): Xaa in position 35 is Ala or Val
  Variant (37)..(37): Xaa in position 37 is Pro or Val
  Variant (38)..(38): Xaa in position 38 is Asp, Glu or Gln
  Variant (39)..(39): Xaa in position 39 is any amino acid
FNFNXXFXSXLXLLTFXFGFPXTXXLVFXFXVXVXPXXXL

SEQ ID NO: 43832 - protein, 29 aa, Artificial sequence
  protein pattern
  Variant (5)..(5): Xaa in position 5 is Ala or Thr
  Variant (6)..(6): Xaa in position 6 is any amino acid
  Variant (7)..(7): Xaa in position 7 is Phe or Leu
  Variant (10)..(10): Xaa in position 10 is Leu or Val
  Variant (11)..(11): Xaa in position 11 is Ile or Leu
  Variant (13)..(14): Xaa in position 13 to 14 is any amino acid
  Variant (15)..(15): Xaa in position 15 is Ile or Val
  Variant (17)..(17): Xaa in position 17 is any or no amino acid
  Variant (19)..(19): Xaa in position 19 is any amino acid
  Variant (20)..(20): Xaa in position 20 is any or no amino acid
  Variant (22)..(22): Xaa in position 22 is Ala or Gly
  Variant (23)..(23): Xaa in position 23 is Ile or Leu
  Variant (26)..(26): Xaa in position 26 is Leu or Met
  Variant (27)..(27): Xaa in position 27 is any amino acid
NRVEXXXTWXXLXXXAXVXXVXXFFXXNG

SEQ ID NO: 43833 - protein, 20 aa, Artificial sequence
  protein pattern
  Variant (2)..(3): Xaa in position 2 to 3 is any or no amino acid
  Variant (6)..(6): Xaa in position 6 is Ala or Ser
  Variant (7)..(7): Xaa in position 7 is Ile or Leu
  Variant (14)..(14): Xaa in position 14 is Ile or Val
  Variant (19)..(19): Xaa in position 19 is Ser or Thr
IXXAFXXFLFIGIXRGWIXL

SEQ ID NO: 43834 - protein, 27 aa, Artificial sequence
  protein pattern
  Variant (2)..(2): Xaa in position 2 is any or no amino acid
  Variant (4)..(5): Xaa in position 4 to 5 is any amino acid
  Variant (6)..(6): Xaa in position 6 is any or no amino acid
  Variant (9)..(9): Xaa in position 9 is Ala or Gly
  Variant (10)..(10): Xaa in position 10 is Ile or Val
  Variant (14)..(14): Xaa in position 14 is Ser or Thr
  Variant (21)..(25): Xaa in position 21 to 25 is any amino acid
  Variant (26)..(26): Xaa in position 26 is any or no amino acid
LXSXXXFYXXYYVXYKTRLRXXXXXXP

SEQ ID NO: 43835 - protein, 15 aa, Artificial sequence
  protein pattern
  Variant (5)..(5): Xaa in position 5 is Phe or Tyr
  Variant (8)..(8): Xaa in position 8 is Phe or Leu
  Variant (9)..(9): Xaa in position 9 is Asp or Glu
  Variant (10)..(10): Xaa in position 10 is Ser or Thr
  Variant (15)..(15): Xaa in position 15 is His, Lys or Arg
AKLLXWLXXXAGLIX

SEQ ID NO: 43836 - protein, 18 aa, Artificial sequence
  protein pattern
  Variant (2)..(2): Xaa in position 2 is Ile or Leu
  Variant (3)..(3): Xaa in position 3 is Ala, Cys or Ser
  Variant (4)..(4): Xaa in position 4 is any amino acid
  Variant (5)..(5): Xaa in position 5 is Ile, Leu or Val
  Variant (8)..(8): Xaa in position 8 is Ala or Leu
  Variant (9)..(9): Xaa in position 9 is Ser or Thr
  Variant (12)..(12): Xaa in position 12 is Trp or Tyr
  Variant (13)..(13): Xaa in position 13 is any amino acid
LXXXXFIXXLTXXEFRRV

SEQ ID NO: 43837 - protein, 8 aa, Artificial sequence
  protein pattern
  Variant (7)..(7): Xaa in position 7 is Ala or Val
LVVMGGXL

SEQ ID NO: 43838 - protein, 11 aa, Artificial sequence
  protein pattern
  Variant (5)..(5): Xaa in position 5 is any amino acid
  Variant (6)..(6): Xaa in position 6 is Ile, Leu or Val
  Variant (7)..(7): Xaa in position 7 is Ile or Val
  Variant (10)..(10): Xaa in position 10 is Ala or Leu
  Variant (11)..(11): Xaa in position 11 is Cys or Ser
VVFFXXXFGXX

SEQ ID NO: 43839 - DNA, 2163 bp, Escherichia coli
  CDS (1)..(2163): transl_table=11
atggacgtttcttacctgctcgacagccttaatgacaaacagcgcgaagcggtggccgcgccacgcagcaaccttctggtgctggcgggcgcgggcagtggtaagacgcgcgtactggtgcatcgtatcgcctggttgatgagcgtggaaaactgctcgccatactcgattatggcggtgacgtttaccaacaaagcggcggcggagatgcgtcatcgtatcgggcaactgatgggcacgagccagggcggtatgtgggtcggcaccttccacgggctggcgcaccgtttgctgcgtgcgcaccatatggacgccaatctgccgcaggatttccagatcctcgacagtgaagaccagctacgcctgcttaagcgtctgatcaaagccatgaacctcgacgagaagcagtggccgccgcggcaggcaatgtggtacatcaacagccagaaagatgaaggcctgcgtccgcatcatattcaaagctacggtaatccggtggagcagacctggcagaaggtgtatcaggcgtatcaggaagcgtgtgaccgcgcgggcctggtggacttcgccgagctgctgctgcgcgctcacgagttgtggcttaacaagccgcatatcctgcaacactaccgcgaacgttttaccaatatcctggtggacgaattccaggataccaacaacattcagtacgcgtggatccgcctgctggcgggcgacaccggcaaagtgatgatcgtcggtgatgacgaccagtcaatctacggctggcgcggggcgcaggtggagaatattcagcgtttccttaatgatttccccggtgccgaaactattcgtctggagcaaaactaccgctctaccagcaatattctgagcgccgctaacgccctgattgaaaacaataacgggcgtctgggtaaaaaactgtggaccgatggcgcggacggtgagcctatttccctctattgcgcttttaacgaactcgatgaagcgcgttttgtggttaaccgcatcaaaacctggcaggacaacggcggagcgcttgccgagtgcgccattctctaccgcagcaacgcccagtcgcgggtgctcgaagaggcgttattgcaggccagtatgccgtaccgtatttacggcgggatgcgcttcttcgaacgccaggaaatcaaagatgcgctctcgtatctgcgcctgattgccaaccgcaacgacgacgcggcctttgagcgtgtggtgaatacgccaacgcggggtattggtgaccggacgctggacgtggtacgtcagacatcgcgcgatcgccagttaacactctggcaggcatgtcgtgagctgttgcaggaaaaagccctcgccgggcgagctgccagcgccttgcagcgatttatggaattaatcgacgccttagcgcaggaaactgccgatatgccgctgcatgtacagactgaccgggtaattaaagactccggcctgcgtaccatgtatgagcaggagaagggcgaaaaaggtcagacgcgtatcgaaaacttagaggaactggtgacggcaacgcgccagttcagctacaacgaagaagacgaagatttaatgccgctgcaggcgttcctctcccatgcggcactggaagcaggtgaagggcaggcggatacctggcaggatgcggtgcagttgatgacgctacactcggcgaaaggcctggagttcccgcaggtgtttatcgttggtatggaagagggcatgttcccaagccagatgtcgctggatgaaggcgggcgtctggaagaagaacgccgtctggcctacgttggcgtaacccgcgcgatgcagaaactgacgctgacctacgcggaaacccgccgtctgtatggtaaagaggtttaccatcgcccgtcgcgctttatcggcgagctgccggaagagtgtgtggaagaggtgcgcctgcgcgccacggtaagccgcccggtcagccatcagcggatgggtacgccgatggtcgagaacgacagcggctacaagctcggccagcgcgtacgccacgctaagtttggtgaaggcaccattgtcaatatggaaggcagcggtgagcatagccgtttgcaggtggcatttcagggccagggtattaaatggctggtggcggcatacgcccggctggagtcggtgtaa

SEQ ID NO: 43840 - protein, 720 aa, Escherichia coli
MDVSYLLDSLNDKQREAVAAPRSNLLVLAGAGSGKTRVLVHRIAWLMSVENCSPYSIMAVTFTNKAAAEMRHRIGQLMGTSQGGMWVGTFHGLAHRLLRAHHMDANLPQDFQILDSEDQLRLLKRLIKAMNLDEKQWPPRQAMWYINSQKDEGLRPHHIQSYGNPVEQTWQKVYQAYQEACDRAGLVDFAELLLRAHELWLNKPHILQHYRERFTNILVDEFQDTNNIQYAWIRLLAGDTGKVMIVGDDDQSIYGWRGAQVENIQRFLNDFPGAETIRLEQNYRSTSNILSAANALIENNNGRLGKKLWTDGADGEPISLYCAFNELDEARFVVNRIKTWQDNGGALAECAILYRSNAQSRVLEEALLQASMPYRIYGGMRFFERQEIKDALSYLRLIANRNDDAAFERVVNTPTRGIGDRTLDVVRQTSRDRQLTLWQACRELLQEKALAGRAASALQRFMELIDALAQETADMPLHVQTDRVIKDSGLRTMYEQEKGEKGQTRIENLEELVTATRQFSYNEEDEDLMPLQAFLSHAALEAGEGQADTWQDAVQLMTLHSAKGLEFPQVFIVGMEEGMFPSQMSLDEGGRLEEERRLAYVGVTRAMQKLTLTYAETRRLYGKEVYHRPSRFIGELPEECVEEVRLRATVSRPVSHQRMGTPMVENDSGYKLGQRVRHAKFGEGTIVNMEGSGEHSRLQVAFQGQGIKWLVAAYARLESV

SEQ ID NO: 43841 - DNA, 3498 bp, Oryza sativa (japonica cultivar-group)
  CDS (1)..(3498)
atgtcgcgctggaaggagaacgcctcccctctccccctccaccccggcggctcctcctccctcctcccccgcaagcgccctcccccatccccgccccctccgcagcccccgtgcccgccgccgcgccgcccgctcgccgacgtcaccggcaacgccctgcggcagcggggatccggagggggaggatgcgggtacgggtacagcacccccgccccgaaggcgcccaggccctcctgcaggttccttctcgacgacgacgaaggcatggacgaggcgttcctgcgggaggtggacgccatttgcgaggagcacgagcggtcctcggccaggaaggataaggaggccggcgaagcgccgccatcgatcccctccgaaccggagagcggagtgtctggagatgcattccggaaggaggagaatgccattggtgaggagggtgatgctcagcctttagccacgagccaggaagaaatggaggatgcggatgaagaagaaatctgtgaactgtggtttggtgatgattcacttccaccggccatttcaattgccacagggggtggagagtttgaggatgcattctggaacatcagtgacattactgaggaggtgcaccatacaggctcttctgccaagtgccaggaggatatggacggaaaaaatagcgatggtccttcagttccctcagtaatttgccatgaagagcgggaaggagagcttgtcgatgcattcttggaggatcttgatgctatccatcagggtgatgctaccaagggccaggaggagccacaggaaacggaactagaaattgaggaaaatgaagggtgtgttccaaagaagtactacgaatatttgcagtccctgaatgacaggcagagggaagctgcatgtagtgatgtgactattccactaatgatagttgctggtccaggaagtggaaagacatcaacaatggttggtcgggtgctcacactgctcaaagaggaatttccaccatcaaacattcttgctatgacattcacaactgctgctgcttctgaaatgcgggatcgaattgggacagtggtggggaaggcagttgccaaggagattgtaataagcacatttcactcattctgcttgcagctttgcaggacccatgctgaaaagctaggccgcacatctgaattcataatctatggaaatgggcagcagaggagggctgttattgaggcagagcgtctattggaaagtgacaaaaataatggtctaggagatgcaaataagaattgcgatggagatattaaaaattctttcaaggacaaagctaagaaatggcagaagtttgttacacaggcaaaagcttctggtaggactcccgaggagtatgaaaagaagggggatttgacaggagcttcaattcttcggcactacaatgaaatattaaggtcttgtaatgctcttgattaccatgattttattaattcatcgataacccttctcacaaagtttcctgaagtatacgacgagtgccgaaatacatggcaggcaatagtagttgatgagtttcaggatacaagtgctatgcaatattatcttttaaagacactagcatcccacaaccgcataactattgttggtgacgaagatcagtccatcttcagtttcaatggtgctgatgtctctggctttgattcatttcgtagagattttccaaatcacaaagaggtcagattgagcaagaactatcgctctacacgggcaattgttgaagcagcaacagctttaattcacaacaacactaaacggcaaagccacaaacttgctgagaccgacaatccctctgggaataagatcattgttaaggagtgccacagtgaagattcacaatgtgcatttgttattgacaagattattgaaaccacatctagttcagttgaaggatgtcattttggcaaaattgctgtcctatatcgcagacagatcactggcaaagcattccaggcgtcattccgcaacagaaaaattccttttaatattcatggtgtggctttctacaggaaaaaggttatcaaagcaattatggccatacttaaaactacattaccaggctgtgatgatgatgccccatggcatcaagccttcaaggccattcttcctggtgacaaggaagaaaaaaagaagattatacatcatattgaaaagatttcattggctagaaagtgtagcttcatatcggctgctactgacatcttcagtgcaaaggtctctggtaccttcaaaagggcccagattactcaaggaagaaaggttttatcagccttggatagcctatcaaaacttgttgaaagggaacaatcagtttcagtggtcatttcttctgctggagatatgctacctcagaaatacctacttgaaaagcgtgcgattgttgatgctgatgggggtaaattattaaatgaagataatgacatcagatcagtccttcagtttttaatggatgatgtgtctgacttcttatcaacacatttttctagttcagtggatacaagcaagactgaggagaaaggctgtgcttctacacttaaagcctttattgattatatctctttgagagaaactgaaaacttcagatcacgaaaggaggaaaataaaaactctatcacattaacaactatccaccagtcaaaaggtttagagtgggatgttgtgtttatcgtgcaggcaaatgattcagaaattcctttgttgcatgagtacaatggcactgtgaaagaagctggaagcacactggaggaggagagaaggctattctatgttgcaatgacacgagctcgaaagaaactgtacatcttacatgtcacggttgactctaatcgccagctgctgcaaccttcacgcttcctcagggagattcctgctcaccttcttgaggtacagggtgagggaactgtgagaagaactcctgaacagccggtgaacattccatttgatcaacctgaaggagatacatcagttgaaaggcctatggtggtacggaatgaaacttcacctttcccagaaatggatcagccatgtcttgctaatgatttcttgaagaggtttgaaattgaggatagagcaataatttcacatatatttcatcaatgggcgaagaaacaggcatttcaaaatccaaaaaggctgcttgataagattggttttgttattgatgaacgtttacgaggtaaaggatacaagcgcaaggatgtattgtgcaagctgaaatcattcttaagtggtgatgaagcgtttggttatgcacaatatgttatcaagtgggaacagattcctatcgacaagcggagccatttgatgagagagagacaggaacatttccaaaagcagaggatagagaactccatgggttcctcagaacctacacctaagcagatatcgtacctccggaacctggggtgcaccatcacacccacgtctcgcctgcacgcgtcgcatcttatcgagaagtacaaatctctatga

SEQ ID NO: 43842 - protein, 1165 aa, Oryza sativa (japonica cultivar-group)
MSRWKENASPLPLHPGGSSSLLPRKRPPPSPPPPQPPCPPPRRPLADVTGNALRQRGSGGGGCGYGYSTPAPKAPRPSCRFLLDDDEGMDEAFLREVDAICEEHERSSARKDKEAGEAPPSIPSEPESGVSGDAFRKEENAIGEEGDAQPLATSQEEMEDADEEEICELWFGDDSLPPAISIATGGGEFEDAFWNISDITEEVHHTGSSAKCQEDMDGKNSDGPSVPSVICHEEREGELVDAFLEDLDAIHQGDATKGQEEPQETELEIEENEGCVPKKYYEYLQSLNDRQREAACSDVTIPLMIVAGPGSGKTSTMVGRVLTLLKEEFPPSNILAMTFTTAAASEMRDRIGTVVGKAVAKEIVISTFHSFCLQLCRTHAEKLGRTSEFIIYGNGQQRRAVIEAERLLESDKNNGLGDANKNCDGDIKNSFKDKAKKWQKFVTQAKASGRTPEEYEKKGDLTGASILRHYNEILRSCNALDYHDFINSSITLLTKFPEVYDECRNTWQAIVVDEFQDTSAMQYYLLKTLASHNRITIVGDEDQSIFSFNGADVSGFDSFRRDFPNHKEVRLSKNYRSTRAIVEAATALIHNNTKRQSHKLAETDNPSGNKIIVKECHSEDSQCAFVIDKIIETTSSSVEGCHFGKIAVLYRRQITGKAFQASFRNRKIPFNIHGVAFYRKKVIKAIMAILKTTLPGCDDDAPWHQAFKAILPGDKEEKKKIIHHIEKISLARKCSFISAATDIFSAKVSGTFKRAQITQGRKVLSALDSLSKLVEREQSVSVVISSAGDMLPQKYLLEKRAIVDADGGKLLNEDNDIRSVLQFLMDDVSDFLSTHFSSSVDTSKTEEKGCASTLKAFIDYISLRETENFRSRKEENKNSITLTTIHQSKGLEWDVVFIVQANDSEIPLLHEYNGTVKEAGSTLEEERRLFYVAMTRARKKLYILHVTVDSNRQLLQPSRFLREIPAHLLEVQGEGTVRRTPEQPVNIPFDQPEGDTSVERPMVVRNETSPFPEMDQPCLANDFLKRFEIEDRAIISHIFHQWAKKQAFQNPKRLLDKIGFVIDERLRGKGYKRKDVLCKLKSFLSGDEAFGYAQYVIKWEQIPIDKRSHLMRERQEHFQKQRIENSMGSSEPTPKQISYLRNLGCTITPTSRLHASHLIEKYKSL

SEQ ID NO: 43843 - DNA, 3369 bp, Arabidopsis thaliana
  CDS (1)..(3369)
atggagaatctcccaccgaacagaggaatgtggaaccaagagtacagtcatggtcggatttctcaaagcttcaggtcggccaagccgctccttgaccggaaaagaccaattgaaaatgcacctaattcctccaatcctttacctcagagaatgaaggaatcaatggatactgaatccgtttctcacaatataaacttcaacagcactcctcttatggagttatctgctaatacaccatacaaacgcctcaaaccagagattgagtcatatgctgatggtcatccttgtggcttgagaacccctcctcctaggtttgatctggataaggagatcattaatggatttcagaccgatatttatgcggacgttggatctttatcagaagcttttgttactcccctgaaagaaccagaaagagttacactaagcaatggttgctctacttcttcaattcttgatgatgactttgatgattccattttagaagagattgacttaatatgtgaacagtcagcgagaaaagcagcttgtcaaactccaactaccagcatatatcagactccgtctaaagataataagagtagtgatcccaaggccagcttagattttagggatgttgaaaagtttgaaccagactctaatgttaaattgaagcttgatgaagagactcctaccattgctgctgatcctgcacttctcaattccatgcctgatgagtgttccaaatatatgttgtctttaaacgatagacagcgtgatgcagcttgtagtaatatttcaactcctttgatggttattgctggtccaggaagtggaaagggtctgcttccatcgaatatccttgctatgactttcactaaagcagcaacttctgagatgagagaacgcataggaaaatctgctggaaagaaagcagcgaaagacataacaatcagtacattccattcattttccttgcaactttgtcggatgcatgcagacaagttacaacgtacatctgagttctcagtgtatgggcatgggcaacaaagaagagcgataatagaagcagtgcgtttatatgaggaggaaaagaagaatggaagcaaaacttctgttccatgcgagtctggagaaggtctaaatggtgcaggagcaggagcaggaaaagcttccggtaagagtccagagcagtgtcgtaagatgggcaatgagataggagctaaaattcttggaaactacaacgatatcctaaaagcttgcgatgctctggactatcatgatttgatcagttgttcggtcacactcctctctgactttcctgaagtattcaaggaatgccaagatacctggaaagccatcatagttgatgaatttcaagacactagcacaatgcagtacaagcttttacgaatgctaggctctcataatcacataactattgttggtgatgatgatcagtccatcttcggttttaacggggcagacagttcaggatttgattcatttcgccgagatttcccaaactacaaagaggtcaggcttataaaaaactatcgctcctcccgccatattgtggaagccgcctcttctatcataaaaaacaatacgaagcggtgccaatcaaaaagcatttcgtctgaaaactcccaaggatcgaagattacagtcaaggaatgccataatgaggaagcacagtgtgcatatgtcattgacaaaataattgaaatcactaatgatggctcaacaccttgttgttcccatggagatattgctattctttataggaggcaggtgtcaggtaaagtgtttcaaaatgcattccgccagagaaaaataccatttaacgttcatggtgttgctttctacaggaaaaaggttgtccaagtcattttggccatgctgaagacaacattttccgaatgtgatgatgcttcttataggcgagtgtttaaggcattacttccttttgagaaagaggaaaagaaaaggattatagaacatattgaaaaaatctccactagtaggaaatgcagcttcatttcagcggcaagtgatatcttcaatgccaagatttctggtaccttcaagaggagccagcttacccagggacgcaaagttttgcaaactcttgacatggtagcaaagctggttgatagggaacaatcactttcagctgtagtaacatgtgtggcaaatatgataccgcagaaataccttcttgagcaacgagcagttgtggataatgatggaggaaaactgcttaatgaagacaacgatcttagatctgtactccagtacttaatggatgatgtagctgagtttatttccactcattgcactacaacagaagaagaggatgcaatcaaagaaaaaaaaggctgcaatcaacttcattcatttatcaactatatctccgagcgggaaactgaaaattttcgttcaagaagacgtgacaatgaaaattctgtcacattgaccaccattcatcagtcgaaaggtttggaatgggacatagttttcatagtcaaggctaatgaaaatgaaattcccctattacatgagtctaacggcaatgcatcagagagtggaacctcacttgaggaggaacgtcgccttctgtatgttgctatgactcgtgctcgcaagaaactattttttttgtacgtgacagtggattcgaactggcaggtgctccaaccctcacgatttcttaaagagattccaggccatcttctacagggagacatgagcgtaaatgactgcagaaaagttcatgaaaatcttcctaacaaaactgagcagagtgtctccagttttggaacagatataaaacatgaagaaagtaaactaacggacaatgatgtgatgaacattccagaggattatgcctccgaggagtcaatagccgcatatgcactcaatggaaacaactttcttaagaggtgtagaactttcatcccaaacaggtttgatgtggaggttagatcagttgtctctcacttatttcacaactgggctaagaaacaagcattccaggaaccaaagaggctgattgacaaggtacggtttgtgattggtgaacgtttggccatcaagaagaacaaacacaaggatgtcttacgagctctcaaatcatcattgacttctgaggaagcgttccaatatgcagaacatgtacttaggtgggaacaacttcctgcagacacacgggctcatatagtgcgtgagaaacaggaacatttccaaaaactgagaattgaaaactcaatgggcacttcggaagcaacgagtaaacagatcgcatttctgcatagtctaggatgcacagtggtcccaacatcacgtctccatgcgtcccgcttgattgaacagtacaaatcactctga

SEQ ID NO: 43844 - protein, 1122 aa, Arabidopsis thaliana
MENLPPNRGMWNQEYSHGRISQSFRSAKPLLDRKRPIENAPNSSNPLPQRMKESMDTESVSHNINFNSTPLMELSANTPYKRLKPEIESYADGHPCGLRTPPPRFDLDKEIINGFQTDIYADVGSLSEAFVTPLKEPERVTLSNGCSTSSILDDDFDDSILEEIDLICEQSARKAACQTPTTSIYQTPSKDNKSSDPKASLDFRDVEKFEPDSNVKLKLDEETPTIAADPALLNSMPDECSKYMLSLNDRQRDAACSNISTPLMVIAGPGSGKGLLPSNILAMTFTKAATSEMRERIGKSAGKKAAKDITISTFHSFSLQLCRMHADKLQRTSEFSVYGHGQQRRAIIEAVRLYEEEKKNGSKTSVPCESGEGLNGAGAGAGKASGKSPEQCRKMGNEIGAKILGNYNDILKACDALDYHDLISCSVTLLSDFPEVFKECQDTWKAIIVDEFQDTSTMQYKLLRMLGSHNHITIVGDDDQSIFGFNGADSSGFDSFRRDFPNYKEVRLIKNYRSSRHIVEAASSIIKNNTKRCQSKSISSENSQGSKITVKECHNEEAQCAYVIDKIIEITNDGSTPCCSHGDIAILYRRQVSGKVFQNAFRQRKIPFNVHGVAFYRKKVVQVILAMLKTTFSECDDASYRRVFKALLPFEKEEKKRIIEHIEKISTSRKCSFISAASDIFNAKISGTFKRSQLTQGRKVLQTLDMVAKLVDREQSLSAVVTCVANMIPQKYLLEQRAVVDNDGGKLLNEDNDLRSVLQYLMDDVAEFISTHCTTTEEEDAIKEKKGCNQLHSFINYISERETENFRSRRRDNENSVTLTTIHQSKGLEWDIVFIVKANENEIPLLHESNGNASESGTSLEEERRLLYVAMTRARKKLFFLYVTVDSNWQVLQPSRFLKEIPGHLLQGDMSVNDCRKVHENLPNKTEQSVSSFGTDIKHEESKLTDNDVMNIPEDYASEESIAAYALNGNNFLKRCRTFIPNRFDVEVRSVVSHLFHNWAKKQAFQEPKRLIDKVRFVIGERLAIKKNKHKDVLRALKSSLTSEEAFQYAEHVLRWEQLPADTRAHIVREKQEHFQKLRIENSMGTSEATSKQIAFLHSLGCTVVPTSRLHASRLIEQYKSL

SEQ ID NO: 43845 - DNA, 2049 bp, Helicobacter pylori 26695
  CDS (1)..(2049): transl_table=11
atgatggattttgaaaaaagcattttagaccatttaaacggagcgcaaaaaatcgctgcaagccacattcaagggccattgctcattttagcgggagctgggagcggtaagactaagactttaacgagccgtttagcgtatttgattggcgtttgtggcgtgcctagcgagaacactttaacgctcactttcaccaataaagcgagtaaagaaatgcaagaaagggctttgaaattgttgaaaaaccaagcccttatcccccccttgctttgcactttccatcgttttggtttgctgtttttaaggcaacacatgaatcttttaaaaagggcatgcgatttttcggtattagatagcgatgaagtcaaaacgctgtgcaaacagctcaaaatttcaaactttagagccagtatttctcaaatcaaaaacggcatgatggatttgagcatgcaagatagcgaatgctataaagcgtatgagctttatcaaaacgcgctcaaaaaagacaatttagtggattttgacgatttgctttttttaagccttaagattttacaagataatgaaaccatcgccaaagagactagcgagcgctaccactacattatggtagatgagtatcaagacacgaacgccttgcaattggagtttttaaaaaaattgagtttcacgcaccataatttgtgcgtggtgggcgatgacgatcagagcatttatgggtttaggggggctgatatttctaacattttaaatttttccaagcattttaaaggggctaaaatagtgaaattagagaccaactaccgctctagcgctgaaattttagcgtgcgctaattctctcatcagccacaaccaacaccgccatattaaaacgcttcaaagtttcaaaggctcgcataaaagcgtggtttgtaaagaatatttgacgcaaaaagaagagagcctggatgtggcttatcaaatcaaagcccttttaaagaagggcgagaatttagaaaatatcgctattttgtatcgcttaaacgggcttagccgcagcattgaagagagcttgaacgctttgaatatcccttataggctcattggggcgctgagtttctatgaaagagccgagattaaagacgctttggcgttcatgcatttagtggctaaaaaagacgatcgcttttttattaagcgcgttttaaacaagcccccaagaggtcttggcaagatcactcaagaatggattttttctcttttagatgaagagggtttgaatttagaagaggcgctaaaacttggggcgtttaaagacaaattaaaccctaaaaacgaatacgctttgaaacaatttatcgctatgatagggcgtttgagggaggcttttgaaatttcagtagaggagttttgctctcggtttttagaagagactaaccttttaaaaagctatgaaaaagaagacaattacgaagaaagagagggctttgttaaagagcttttaaccttagtgaaagaatattttaaaactaaccccacgcattctttactggattttttgaatgaaagcgtgctggatgcccataatacagaaaacgcgcaaaaagtgagttgcatgagcgtgcatatgagtaagggattagagtttaagcatgtgtttgtgatcgggttagaagaagggtttttcccgcatagggggttcaatcaggaaagcgatttagaagaagaaaggcgcttggcttacgtagcgatcactagggctaaagaagaattgcagctctcttatgtgaaagagcgttcgtattttgggaggaaaatttcttgctcgccctctgtgtttttagaggaagcccagttgctcaatcaagacaacccccctaaacaggatcatcaaaaagacgcgcccattaaagtgggggacttgattaggcataagatttttggcactgggagggttttaggcgtagaaaaaggcttgagcggtttgtgcttgaaaatcaattgcggagggaatgtctatgataaaatctcagaaaaatttgtagaaaaagtggataacgggttttga

SEQ ID NO: 43846 - protein, 682 aa, Helicobacter pylori 26695
MMDFEKSILDHLNGAQKIAASHIQGPLLILAGAGSGKTKTLTSRLAYLIGVCGVPSENTLTLTFTNKASKEMQERALKLLKNQALIPPLLCTFHRFGLLFLRQHMNLLKRACDFSVLDSDEVKTLCKQLKISNFRASISQIKNGMMDLSMQDSECYKAYELYQNALKKDNLVDFDDLLFLSLKILQDNETIAKETSERYHYIMVDEYQDTNALQLEFLKKLSFTHHNLCVVGDDDQSIYGFRGADISNILNFSKHFKGAKIVKLETNYRSSAEILACANSLISHNQHRHIKTLQSFKGSHKSVVCKEYLTQKEESLDVAYQIKALLKKGENLENIAILYRLNGLSRSIEESLNALNIPYRLIGALSFYERAEIKDALAFMHLVAKKDDRFFIKRVLNKPPRGLGKITQEWIFSLLDEEGLNLEEALKLGAFKDKLNPKNEYALKQFIAMIGRLREAFEISVEEFCSRFLEETNLLKSYEKEDNYEEREGFVKELLTLVKEYFKTNPTHSLLDFLNESVLDAHNTENAQKVSCMSVHMSKGLEFKHVFVIGLEEGFFPHRGFNQESDLEEERRLAYVAITRAKEELQLSYVKERSYFGRKISCSPSVFLEEAQLLNQDNPPKQDHQKDAPIKVGDLIRHKIFGTGRVLGVEKGLSGLCLKINCGGNVYDKISEKFVEKVDNGF

SEQ ID NO: 43847 - DNA, 2244 bp, Bacillus halodurans C-125
  CDS (1)..(2244): transl_table=11
gtgtttggtggtgttacgaacgtgcaacggaaaatcatagaaaaaatgttggcaggattgaatgacagacaacgagaagcggtgaagcacacagaagggcccctgctactaatggcaggagccggaagtggaaagacaagagtactaacgcaccggattgcctatttattacgtgaaaaaggggttgccccgtggaacgtattagcgattacgtttacaaataaagcggctcgggagatgaaagaccgggtcgctcagcttgttggaccgatcgcagatgatatttggatctccacgttccactctatgtgcgttcgcatcctacgccgcgacatcgatcggatcggctatagtcgtaactttacgattttagattccaccgatcaattgtcagtgatcaagcaaattttaaaaaacaacaacatcgattcgaagaaatttgaaccgcgtagcattttaggtacgatcagcggcgctaaaaatgaattgaagacacctgaacaatttatgggcattgcaaaaggaccttatgaggaaacggcagcagaagtatatgtcgagtaccaaaagcaactaaagaaaaaccaagcgctcgattttgacgacctcatcatgaagacaactagtctcttcaaaaaagttccagaggtacttgagtactaccagcggaagtttcagtatattctagtggatgagtaccaagatacaaaccgagcccaatatatgctcgtgaagatgcttggggatcgccataaaaatgtgtgtgttgtcggggattcggatcagtcgatctataaatggcgcggggccgatatcgccaacattctttcatttgaagaggattaccaagacgcagaggtcattttacttgaacaaaactaccgttccacgaagacaatcttagaagcagccaaccgcgtcatcgaaaacaatgtgaagcggaagccgaaaaacctctggacggaaaatgagcaaggggcgaagattggcttttataaagctgatacggagcaaggagaagcccagtttgtcgtagaaaaaattcgtgaagcgattcaggatggtgcctcttataaagacattgccatcctttaccgaacaaatgctcagtcccgtgtcatggaggaaatgctcattaaatcgaacattgactacaatattgtcggcgggactaagttctacgatcgaaaagaaattaaggatgtgctcgcgtatttacgtctcgtggctaaccctgatgacgacattagcttgcagcgcatcatcaatgttccgaagcggggaatcggagcgacgaccgttgataaaattgctgcttatgcggagcgacaagggatctcgatgtttgccgctctaaaggagattgagcaaatcggtgtcacctcccgtgcggtaagcaaattagttgagtttactgagcagcttggtcattgggtgcaaatgcaagaatatttgtcagtcactgaactagtggaggagctgcttgagcggacaggctatcgcgacatgttgcaaaacgaaaaaacactcgaagcccaaagccgacttgagaacattgatgaatttttgtccgtaacccaagagtttgaaaaatcgagtgacgataaatcgctcattgcctttttaaccgatttagcactcatttcggacatcgataagcttgatgatgaggacgatggagccaagccaaccgatgccgttgtgctcatgaccctccattcagccaaaggactcgaatttccgatcgtctttttaatcggactggaggaaggcatctttccacatagccgttctctttttgaagatgatgaaatggaggaggagcgtcgtttagcctatgttgggattactcgtgccgaaaagcagctttatctaaccagtgcccagctgcgaacgatttacggacgaacaaatgccaacccgccgtcccgttttatcgacgaaattccagaagattgcctcgaatttttgaatgaaccgcaagaagaacttccgtggatgaagacatcacgaccggtgacaaaagcgaaacaaccatctcgttctgtgccgcaaatgacaacgacgggaggcgaacaatttgcatggaccgttggggacaaagcggagcataaaaagtggggaattggcacggtcgtaagcatgaagggggaaggcgactccctggagcttgacattgcattcccgccgccgaccggcatcaaacgactatttgcaaagtttgcaccgattacgaaagcgtaa

SEQ ID NO: 43848 - protein, 747 aa, Bacillus halodurans C-125
MFGGVTNVQRKIIEKMLAGLNDRQREAVKHTEGPLLLMAGAGSGKTRVLTHRIAYLLREKGVAPWNVLAITFTNKAAREMKDRVAQLVGPIADDIWISTFHSMCVRILRRDIDRIGYSRNFTILDSTDQLSVIKQILKNNNIDSKKFEPRSILGTISGAKNELKTPEQFMGIAKGPYEETAAEVYVEYQKQLKKNQALDFDDLIMKTTSLFKKVPEVLEYYQRKFQYILVDEYQDTNRAQYMLVKMLGDRHKNVCVVGDSDQSIYKWRGADIANILSFEEDYQDAEVILLEQNYRSTKTILEAANRVIENNVKRKPKNLWTENEQGAKIGFYKADTEQGEAQFVVEKIREAIQDGASYKDIAILYRTNAQSRVMEEMLIKSNIDYNIVGGTKFYDRKEIKDVLAYLRLVANPDDDISLQRIINVPKRGIGATTVDKIAAYAERQGISMFAALKEIEQIGVTSRAVSKLVEFTEQLGHWVQMQEYLSVTELVEELLERTGYRDMLQNEKTLEAQSRLENIDEFLSVTQEFEKSSDDKSLIAFLTDLALISDIDKLDDEDDGAKPTDAVVLMTLHSAKGLEFPIVFLIGLEEGIFPHSRSLFEDDEMEEERRLAYVGITRAEKQLYLTSAQLRTIYGRTNANPPSRFIDEIPEDCLEFLNEPQEELPWMKTSRPVTKAKQPSRSVPQMTTTGGEQFAWTVGDKAEHKKWGIGTVVSMKGEGDSLELDIAFPPPTGIKRLFAKFAPITKA

SEQ ID NO: 43849 - DNA, 2181 bp, Pasteurella multocida subsp. multocida str. Pm70
  CDS (1)..(2181): transl_table=11
atggatatttcagcattattagatgggttaaatgataaacaacgtgatgcggttgccgcgccactcggcaattacttggtgttggcgggggccgggagtggtaaaacacgtgttttaacacatcgtattgcttggttaattgcagtagaacaggtttctgaagggagtatcatggcagtaaccttcaccaataaagccgcggctgaaatgcgtcatcgtatcgaaagcaccttagctaatcatgcttctcaacgtttatttggtatgtgggtgggcacgttccacagcattgcccaccgcttattgcgtgcccatcatcttgatgccaacttaccccaagatttccaaattctcgatgcggatgatcaactgcgtttagtgaagcgcctactcaaattacataattttgatgagaaaatttttattcctaagcaagtctgctggtatatcaataataaaaaagatgacgggttaagagcgcaccaaattgatgacaataatgatcgacatgagcgggaatggataaaaatttatcagatttatcaagatacttgtgatcgtgctggtttagtggattttgcggaattgttattacgtgcttacgaattatggctgaaaaagcctgtgattttacagcgttatcaacaacgttttcagcacattttggtcgatgagttccaagatactaataagatccaatatgcttgggtaaaattgcttgcgggggaacaaggcaaggtgatgatcgtgggagatgatgatcaatcgatttatggttggcgcggggcaaaaattgaaaatatccaacgctttttagatgatttttccaatgcgcaaaccatccgtcttgaacaaaattatcgttccacggggaatattttggcaagtgccaaccagcttatttccaataacagcaatcgtcttggtaaaaatttgtggacggacggagaaaaaggtgagccagtaggaatctatgcggcttttaatgaattagatgaagccttatttgtttcctcacaaattaaacaatggatagaaaatggcggtaagctaaaagattgtgccattttataccgcagtaatagccaatcccgtgtgattgaagaggcgttaattcgttctcaattaccttatcgtatttatggcggcatgcgtttcttcgagcgtcaagagattaaagatgcccttgcttatttacgtcttattgccaatcgtcaagacgacgccgcgtttgaacgggtggtcaatacgccacctcgtagtattggtgaacgaacgttagatatgctgcgtagtgtgacccgcgaacgtgaagtgactttgtggcaagccacccaattagccattcatgaaaatttactgacggcgagagcagcaaccgcactacaacgctttttagagttgattaattccttacagcaagataccagtgaaatgcccttatttgcgcaaaccgattttgtgattaagcattctggtttatatgccatgtatcaacaggaaaagggggaaaagggcgaagtgcggatcgaaaacttagaagagttagtgactgccacaaaagaatttattaagccagatgaggcagaacagttatctgatttaacggcctttttaactcatgcctccttagaagcaggggaggaacaagcctcaccgcatcaagactatgttgaaatgatgacattgcactctgcaaagggattggaattccctcgggtatttatggtgggggttgaagaagggctatttccaagtttccgatcttttgaagaaccggggcgtttagaagaagagcgtcgcttagcttatgttgggatcacgcgcgcaaaacaaaagttgacgatttgctatgcggaaagtcgccgtttatatgccaaagaagaacgtcatcttccttcccgttttattgctgaattacctacggaatgtattcaagaaatccgcttacgtggtacggtgacacgtgccatgaatcagcagaaagtcggatcggttgcaccgagtttacaggaaagtgaatggaaaatggggcaaaaagtgctacatagcaaatttgggcaaggtacgatcattaatgtggaaggggcggagaataatactcgcttacaaattgcattccaaaatcaagggattaaatggctgattgcccatttagccaaattagaaaaaattcgttaa

SEQ ID NO: 43850 - protein, 726 aa, Pasteurella multocida subsp. multocida str. Pm70
MDISALLDGLNDKQRDAVAAPLGNYLVLAGAGSGKTRVLTHRIAWLIAVEQVSEGSIMAVTFTNKAAAEMRHRIESTLANHASQRLFGMWVGTFHSIAHRLLRAHHLDANLPQDFQILDADDQLRLVKRLLKLHNFDEKIFIPKQVCWYINNKKDDGLRAHQIDDNNDRHEREWIKIYQIYQDTCDRAGLVDFAELLLRAYELWLKKPVILQRYQQRFQHILVDEFQDTNKIQYAWVKLLAGEQGKVMIVGDDDQSIYGWRGAKIENIQRFLDDFSNAQTIRLEQNYRSTGNILASANQLISNNSNRLGKNLWTDGEKGEPVGIYAAFNELDEALFVSSQIKQWIENGGKLKDCAILYRSNSQSRVIEEALIRSQLPYRIYGGMRFFERQEIKDALAYLRLIANRQDDAAFERVVNTPPRSIGERTLDMLRSVTREREVTLWQATQLAIHENLLTARAATALQRFLELINSLQQDTSEMPLFAQTDFVIKHSGLYAMYQQEKGEKGEVRIENLEELVTATKEFIKPDEAEQLSDLTAFLTHASLEAGEEQASPHQDYVEMMTLHSAKGLEFPRVFMVGVEEGLFPSFRSFEEPGRLEEERRLAYVGITRAKQKLTICYAESRRLYAKEERHLPSRFIAELPTECIQEIRLRGTVTRAMNQQKVGSVAPSLQESEWKMGQKVLHSKFGQGTIINVEGAENNTRLQIAFQNQGIKWLIAHLAKLEKIR

SEQ ID NO: 43851 - DNA, 2187 bp, Pseudomonas aeruginosa PAO1
  CDS (1)..(2187): transl_table=11
atgaacgacgacctctccctcctgctgaactccctcaacgacccgcagcgccaggccgtggccgcgccgctgggccgccaactggtcctcgccggcgccggctcgggcaagacccgcgtgctggtgcaccggatcgcctggctgatccaggtcgagcacgcctcgccctacagcatcctgtcggtgaccttcaccaacaaggcggcggcggagatgcgccaccgcatcgagcagttgctcgggatcaatccggcgggcatgtgggtcggcaccttccacggcctcgcccatcgcctgctgcgcgcgcactggcgcgaggccgggctgagcgagaacttccagatcctcgacagcgacgaccagcaacgcctggtcaagcgggtgatccgcgaactcggcctcgacgagcagcgctggccggcgcgccaggcccagtggttcatcaacgggcagaaggacgagggcctgcggccgcaacacatccagcccggcggcgacctgttcctcgccaccatgctgaagatctacgaagcctacgaggcggcctgcgcccgcgccggggtgatcgacttctccgagctgctgctgcgcgccctggacctctggcgcgaccatcccggcgtgctcgagcactaccagcggcgcttccgccatatcctggtggacgagttccaggacaccaacgccgtgcaatacgcctggctgcggattctcgccaagggcggcgacagcctgatggtggtcggcgacgacgaccagtcgatctacggctggcgtggcgcacggatcgagaacatccagcagttcagcgacgacttcgccgatgccgaggtgatccgcctggagcagaactaccgttccaccgcgtcgatcctcaaggccgccaacgccctgatcgccaacaaccagggacgcctgggcaaggagttgtggaccgacggcgaggacggcgagtcgctgagcctgtacgccgcgttcaacgagcacgacgaggcgcgctacgtggtcgagtcgatcgagagcgcgctcaagggcggcctggcgcgcagcgagatcgccatcctctaccgctccaacgcccagtcgcgggtgctggaggaagccctgctgcgggagaagattccctaccgcatctacggcggccagcgcttcttcgagcgtgccgagatcaagaacgccatggcctacctgcgcctgctcgacggccgcggcaacgacgcggcgctggaacgggtggtcaacgtgccggcacgcggcatcggcgagaagaccgtggagagcatccgcgaattcgcccgcggcaacgatgtgtcgatgtgggaggcgatccgcctgatgatcgccaacaaggtcctgcccggccgcgccgccagcgccctgaccggcttcgtcgagctgatcgagaatctttcggcgaaggtcatggacatgccgctgcacctgatgacccagacggtgatcgagcagtccggactgatcagctaccacaaggaagaaaaaggcgagaaaggccaggcccgggtggagaacctcgaggaactggtcagcgccgcccgcgccttcgagaacagcgaggaagaggaagacctcaccccgctgcaggccttcctcagccacgcctccctggaggccggggaaacccaggccgacgcccacgaggacagtgtccagctgatgaccctgcacagcgccaagggcctggagttcccgctggtgttcctggtcggcatggaggaagggctgttcccgcacaagatgagcctggaggaatccggccgcctggaagaggaacgccgcctggcctacgtcggcgtcacccgcgccatgcagcgactggtcctgacctacgcggagacccgccggctctacggtagcgagacctacaacaaggtttcgcgcttcatccgcgagatcccgccggcgctgatccaggaagtgcgcctgtccaataccgtcagccgcccctacggcggcacctcgcgcagtgccggcggcaacctcttcagcggcgccggggtgccggagacgcccttctccctcggccagcgggtgcgccacgcgctgttcggcgaagggactatcctcaacttcgaaggcgccggcgcccaggcccgggtgcaggtgaatttcgagagcgaaggcagcaagtggctgatgctcggctacgccaagctggaagccctgtag

SEQ ID NO: 43852 - protein, 728 aa, Pseudomonas aeruginosa PAO1
MNDDLSLLLNSLNDPQRQAVAAPLGRQLVLAGAGSGKTRVLVHRIAWLIQVEHASPYSILSVTFTNKAAAEMRHRIEQLLGINPAGMWVGTFHGLAHRLLRAHWREAGLSENFQILDSDDQQRLVKRVIRELGLDEQRWPARQAQWFINGQKDEGLRPQHIQPGGDLFLATMLKIYEAYEAACARAGVIDFSELLLRALDLWRDHPGVLEHYQRRFRHILVDEFQDTNAVQYAWLRILAKGGDSLMVVGDDDQSIYGWRGARIENIQQFSDDFADAEVIRLEQNYRSTASILKAANALIANNQGRLGKELWTDGEDGESLSLYAAFNEHDEARYVVESIESALKGGLARSEIAILYRSNAQSRVLEEALLREKIPYRIYGGQRFFERAEIKNAMAYLRLLDGRGNDAALERVVNVPARGIGEKTVESIREFARGNDVSMWEAIRLMIANKVLPGRAASALTGFVELIENLSAKVMDMPLHLMTQTVIEQSGLISYHKEEKGEKGQARVENLEELVSAARAFENSEEEEDLTPLQAFLSHASLEAGETQADAHEDSVQLMTLHSAKGLEFPLVFLVGMEEGLFPHKMSLEESGRLEEERRLAYVGVTRAMQRLVLTYAETRRLYGSETYNKVSRFIREIPPALIQEVRLSNTVSRPYGGTSRSAGGNLFSGAGVPETPFSLGQRVRHALFGEGTILNFEGAGAQARVQVNFESEGSKWLMLGYAKLEAL

SEQ ID NO: 43853 - DNA, 2277 bp, Lactococcus lactis subsp. lactis Il1403
  CDS (1)..(2277): transl_table=11
atgaatccactattacaaggaatgaacgaaaaacaagcagaagcggtccaaactacagaagggcctttattgattatggcaggagctggttcgggtaagactcgtgtcttaactcatcgaattgcttacttaattgatgaaaaaatggttaatccttggaatattttagcgattacctttacaaataaagcagcaaaagaaatgcgggagcgtgctttatcacttactccaagagcacaagatacattaattgcgacctttcactcaatgtgtgtaagaattttgagacgtgatgccgatcatattggttataatcgtaattttacaattatagatccaggggaccaaaaatcgttgatgaaacgaattttgaaagaagctaatttagatcctaaaaaatgggaacccaaagggcttttaaatgcgatttcaaatgctaaaaatgatttattagatgaatcagcttatgaagctcaaacaagcgctagacatccatatgaaatggttgttgcgcgtgtttataagatttaccaaaaagaattacgaaaagcagaatcaatggattttgacgatttaatcatgcagacgttgcgcctttttgatgaaaacccggatgtcctttcttactatcaaggaaaatttcaatatattcatgttgatgagtatcaagataccaaccatgcacaatatcagttggttaaacttttagccagtcgttttcaaaatatctgtgtcgttggggatgctgaccaatcaatctatggttggcgcggagcagatatgcaaaatatcttagactttgaaaaagattatccaaaagctaaagttgttttgcttgaagaaaattaccgctcaacaaaaacaattcttgatgcggcaaacaatgttataaaaaataatttaaaacgtcgaccaaaagaactctggacgcaaaatgatgctggagataagattgtttatttccgcgctggaaatgaacaagaagaagcaaataaggtttctgaaattatcacatcaggcattcgttcaggacgttcttatgctgactatgctgtgctttatcggactaatgctcagtctcggacaattgaagattcttttgttaaatctaatattccctatacaatggttgcgggaactaaattctactcacgtaaggaaattcgtgatgttattgcttacttaaatgtagtagcaaatccagcggataatatgagttttgaacgaattgttaatgaacctaaacgaggagtcggtccgggggcattagaaaaattacgtcgttttgctgacagtcgtggactttctttagcagattcaagttttgatattatgttatccgatattcgtggaaaagcggctggtgagatttataatttggcaatggcctttgatttgttgagaacccatagtgaaagttcaacaatcacagaattagttgaagaaatgttagagcgtactggctatgtcaaagctttgcaaatgatgccaagtatcgaaaatcaagcacgaattgaaaatattgaagaattcttgtcagtaactaaagggtttgatgaaaaatcagaaattcctctagatgaagaaacgggagagccaattgttgaaactggattagataagttgagccgtttccttaacgaagttagtttgctttctgaaacagatgcttatgaggaagaatctgaccaagtaacaatgatgaccctgcatgcggcaaaaggtttggaatttccaattgttttcttaattggaatggaagaaaacatttttcctttatcacgggtaaatgaagatattgatgagttggaagaagaacgtcgtttggcttatgttggaattacacgggcagaagaaacgctctacttaatgaatgccaatcaacgtgtgctttatggtaaaacgaattataatcgtcccagccgttttatttcggaaattgatgatgaattactagaatatgctgggattgctcgtaaagcaaattcaagcttcaatgcttcttataaatctggtggttttgccagtgggatctcgatgtcagatgcgcttcatcaaagaaaagcagtcattaatccaactgcagctcaagcgacgattaataattctgaaacagaagattggcaaattggcgatacagcgattcaccgtaaatggggcgaaggtatggtattaggaatttctggttctggtaaaaatatggaactcaagattaatttcccagaagtcggaatgaaacgtttattagcagcaatggctccaattgagaaaaaatag

SEQ ID NO: 43854 - protein, 758 aa, Lactococcus lactis subsp. lactis Il1403
MNPLLQGMNEKQAEAVQTTEGPLLIMAGAGSGKTRVLTHRIAYLIDEKMVNPWNILAITFTNKAAKEMRERALSLTPRAQDTLIATFHSMCVRILRRDADHIGYNRNFTIIDPGDQKSLMKRILKEANLDPKKWEPKGLLNAISNAKNDLLDESAYEAQTSARHPYEMVVARVYKIYQKELRKAESMDFDDLIMQTLRLFDENPDVLSYYQGKFQYIHVDEYQDTNHAQYQLVKLLASRFQNICVVGDADQSIYGWRGADMQNILDFEKDYPKAKVVLLEENYRSTKTILDAANNVIKNNLKRRPKELWTQNDAGDKIVYFRAGNEQEEANKVSEIITSGIRSGRSYADYAVLYRTNAQSRTIEDSFVKSNIPYTMVAGTKFYSRKEIRDVIAYLNVVANPADNMSFERIVNEPKRGVGPGALEKLRRFADSRGLSLADSSFDIMLSDIRGKAAGEIYNLAMAFDLLRTHSESSTITELVEEMLERTGYVKALQMMPSIENQARIENIEEFLSVTKGFDEKSEIPLDEETGEPIVETGLDKLSRFLNEVSLLSETDAYEEESDQVTMMTLHAAKGLEFPIVFLIGMEENIFPLSRVNEDIDELEEERRLAYVGITRAEETLYLMNANQRVLYGKTNYNRPSRFISEIDDELLEYAGIARKANSSFNASYKSGGFASGISMSDALHQRKAVINPTAAQATINNSETEDWQIGDTAIHRKWGEGMVLGISGSGKNMELKINFPEVGMKRLLAAMAPIEKK

SEQ ID NO: 43855 - DNA, 2208 bp, Neisseria meningitidis MC58
  CDS (1)..(2208): transl_table=11
atgtttcccgaccaatccgcccccaacctgctgcaaggcttgaatcccgaacaactctccgccgtaacctggccgccgcaatccgcacttgtgctggcgggcgcgggcagcggcaaaacgcgcgtgctgaccacgcgcatcgcatggctgttgcaaagcggacaagccagcgtgcacagcattatggcggtaacgtttaccaacaaagccgccaaagaaatgcaaacccgtttgggcgcgatgattcccatcaatgtccgcgccatgtggctcggcacgttccacggtctctgccaccgctttttgcgcctgcaccaccgcgacgccggtctgccgtcttcctttcaaatcctcgacggcggcgaccagctttccctcatcaaacgcctgctcaaaagcctcaacatcgccgaagaaatcatcgcgccgcgttcgctgcaaggctttatcaacgcgcaaaaagaatccggtttgcgcgcttccgtgttgagcgcgcccgatccgcacacacgccgcatgattgagtgctacgccgaatacgacaaaatctgccaacgcgaaggcgtggtcgattttgccgaactcatgctccgcagctacgaaatgctgcaaaacaacgaaatcctgcgccagcactaccaaaaccgcttcaaccacattctcgttgacgagttccaagacaccaacaaactgcaatatgcttggctgaaactgattgccggcaaccacgcagcagtatttgccgtcggcgacgacgaccaaagcatttaccgtttccgtggcgcaagcgtcggcaacatgaccgcgctgatggaagaattccacatcgacgcgcccgtcaaactcgaacaaaactaccgctccgtcggcaacatccttgccgccgccaatgccgtgattgaaaacaacgacgaacgactcggcaaaaacctgcgcaccgacgccgaagcaggcgacaaaatccgctactactccgcctttaccgacctcgaagaagcccggttcatcttggacgaaaccaaagccctcgaacgcgaaggctgggatttggacgaaatcgccgtcctctaccgtagcaacgcccaatcccgcgttatcgaacaaagcctgttccgcagcggcattccctacaaaatctacggcggcttgcgtttttacgaacgccaagaaatcaaacacgcgctcgcctacctgcgcctcgccgtcaatcccgacgacgacaacgccctcttgcgtgtcatcaacttcccaccgcgcggcatcggtgcacgtaccgtcgaaaatcttcagacggcctcaaacgaacaaggcatcaccctctggcaagccgcctgcaacgccggcgcgaaagccgccaaagtcgtcgccttcgtccgcctgattgaagccctgcgcaaccaagtcggacaactgtccctgtccgaaatcatcgtcggcatcctcaaagacagtggcttgaccgaacactaccgcacccaaaaaggcgacaaccaagaccgtctcgacaaccttgacgaactcgtcaacgccgccatcgaattcaaacccgaagacagcaacttcgaaatcctgcctgaaaacatttcagacgaccccgccttccccattctcgccttcctaagcaatgccgccctcgaatccggtgaaaaccaggcaggcgcaggcgaaaaggccgtccaactcatgaccgtccacgccgccaaaggcttggaatttaacgccgtcttcctcaccggcatggaagaaggccgcttccccagcgaaatgagccttgccgaacgcggcggcctcgaagaagaacgccgcctcatgtacgtcgccatcacccgcgcccgcaaacgcctctacatcaccatggcgcaacaacgcatgctgcacggacaaacccaattcggcatcgtctcccgcttcgtcgaagagatcccacccgaagtattgcactacctgtccgtcaaaaagcctgcctacgacagttacggcaacacgcgccaaaccgccgcatccaaagataaaatcatcgacgactacaaacagccccaaacctacgcaggtttccgtatcggacaaaacgtccgccacgccaaattcggcaccggcgtgattatcgatgccgcagataaaggcgaatccgcccgactgaccatcaatttcggcaaacagggcgtgaaagagttggacaccaagtttgcgaaattggaagagatgtaa

SEQ ID NO: 43856 - protein, 735 aa, Neisseria meningitidis MC58
MFPDQSAPNLLQGLNPEQLSAVTWPPQSALVLAGAGSGKTRVLTTRIAWLLQSGQASVHSIMAVTFTNKAAKEMQTRLGAMIPINVRAMWLGTFHGLCHRFLRLHHRDAGLPSSFQILDGGDQLSLIKRLLKSLNIAEEIIAPRSLQGFINAQKESGLRASVLSAPDPHTRRMIECYAEYDKICQREGVVDFAELMLRSYEMLQNNEILRQHYQNRFNHILVDEFQDTNKLQYAWLKLIAGNHAAVFAVGDDDQSIYRFRGASVGNMTALMEEFHIDAPVKLEQNYRSVGNILAAANAVIENNDERLGKNLRTDAEAGDKIRYYSAFTDLEEARFILDETKALEREGWDLDEIAVLYRSNAQSRVIEQSLFRSGIPYKIYGGLRFYERQEIKHALAYLRLAVNPDDDNALLRVINFPPRGIGARTVENLQTASNEQGITLWQAACNAGAKAAKVVAFVRLIEALRNQVGQLSLSEIIVGILKDSGLTEHYRTQKGDNQDRLDNLDELVNAAIEFKPEDSNFEILPENISDDPAFPILAFLSNAALESGENQAGAGEKAVQLMTVHAAKGLEFNAVFLTGMEEGRFPSEMSLAERGGLEEERRLMYVAITRARKRLYITMAQQRMLHGQTQFGIVSRFVEEIPPEVLHYLSVKKPAYDSYGNTRQTAASKDKIIDDYKQPQTYAGFRIGQNVRHAKFGTGVIIDAADKGESARLTINFGKQGVKELDTKFAKLEEM

SEQ ID NO: 43857 - DNA, 2208 bp, Neisseria meningitidis Z2491
  CDS (1)..(2208): transl_table=11
atgtttcccgaccaatccgcccccaacctgctgcaaggcttgaaccctgaacaactttccgccgtaacctggccgccgcaatccgcccttgtgctggcaggcgcgggcagcggcaaaacgcgcgtgctgaccacgcgtatcgcatggctgttgcaaaccggtcaggcaagcgtgcatagcattatggcggtaacgtttaccaataaagccgccaaagaaatgcagacccgtttgggcgcaatgattcccgtcaacgtccgcgccatgtggctcggcacgtttcacggtctctgccaccgctttttgcgcctgcaccaccgcgacgcaggcctgccgtcttcctttcaaattctcgacagcggcgaccagctttccctcatcaaacgcctgctcaaaagcctcaacatcgccgaagaaatcatcgcaccgcgttcgctgcaaggctttatcaacgcgcaaaaagaatccggtttgcgcgcttccgtgttgagcgcgcccgacccgcacacgcgccgcatgattgagtgctacgccgaatacgacaaaatctgccaacgcgaaggcgtggtcgatttcgccgagcttatgctccgcagctacgaaatgctgcaaagcaacgaaattctgcgccggcattaccaaaaccgcttcaaccatattctggtcgacgagttccaagacaccaacaaactgcaatacgcgtggctcaaactcatggcgggcggtaacacggcagtgtttgccgtcggcgacgacgaccaaagcatttaccgattccgtggcgcaaacgtcggcaatatgaccgcactgatggaagaattccacatcgacgcgcccgtcaaactcgaacaaaactaccgctccgtcggcaacatcctcgcctccgccaacgccgtcatcgaaaacaacgacgaacgcctcggcaaaaacctgcgcaccgacgccgaagcaggcgacaaaatccgctactactccgcctttaccgatctcgaagaagcccaattcatcgtggacgaaaccaaagccctcgaacgcgagggctgggatttggacgaaatcgccgtcctctaccgcagcaacgcccaatcgcgcgtcatcgaacaaagcctgttccgcagcggcattccctacaaaatctacggcggattgcgcttttacgaacgccaagaaatcaaacacgcgctcgcctacctgcgcctcgccgtcaatcccgacgacgacaacgccctcttgcgtgtcatcaacttcccaccacgcggcatcggcgcacgcaccatcgagaaccttcagacggcatcgcaagagcaaggcatcaccctctggcaagccgcctgcaacgccggtgcaaaagccaccaaaatcgccgccttcgtccgcctgattgaagccctgcgcaaccaagtcggacaaatgtccctgtccgaaatcatcgtcggcatcctcaaagacagcggcctgaccgaacactaccgaacccaaaaaggcgacaaccaagaccgcctcgacaacctcgacgaactcgtcaacgccgccatcgagttcaaacccgaagacagcaactttgaaaccctgcccgacaacatttcagacgaccccgccttccccatcctcgctttcctaagcaatgctgctctcgaatccggcgaaaaccaagcaggcgcgggcgaaaaagccgtacaactcatgaccgtgcacgccgccaaaggcttggaatttaacgccgtattcctcaccggcatggaagaaggccgcttccccagcgaaatgagccttgccgaacgcggcggcctcgaagaagaacgccgcctgatgtacgtcgccatcacccgcgcccgcaaacgcctctacatcaccatggcgcaacaacgcatgctgcacggacaaacccaattcggcatcgtctcccgcttcgtcgaagaaatcccgcccgaagtattgcactacctgtccgtcaaaaaacccgcctacgaccgctatggcaacacgcgccaaaccgccgcgcccaaagacaaaatcatcgacgactacaaacagccccaaacctacgcaggtttccgtatcggacaaaacgtccgccacgccaaattcggcaccggcgtgattatcgatgccgcagataaaggcgaatccgcccgactgaccatcaatttcggcaaacagggcgtgaaagagttggacaccaagtttgcgaaattggaagcgatgtaa

SEQ ID NO: 43858 - protein, 735 aa, Neisseria meningitidis Z2491
MFPDQSAPNLLQGLNPEQLSAVTWPPQSALVLAGAGSGKTRVLTTRIAWLLQTGQASVHSIMAVTFTNKAAKEMQTRLGAMIPVNVRAMWLGTFHGLCHRFLRLHHRDAGLPSSFQILDSGDQLSLIKRLLKSLNIAEEIIAPRSLQGFINAQKESGLRASVLSAPDPHTRRMIECYAEYDKICQREGVVDFAELMLRSYEMLQSNEILRRHYQNRFNHILVDEFQDTNKLQYAWLKLMAGGNTAVFAVGDDDQSIYRFRGANVGNMTALMEEFHIDAPVKLEQNYRSVGNILASANAVIENNDERLGKNLRTDAEAGDKIRYYSAFTDLEEAQFIVDETKALEREGWDLDEIAVLYRSNAQSRVIEQSLFRSGIPYKIYGGLRFYERQEIKHALAYLRLAVNPDDDNALLRVINFPPRGIGARTIENLQTASQEQGITLWQAACNAGAKATKIAAFVRLIEALRNQVGQMSLSEIIVGILKDSGLTEHYRTQKGDNQDRLDNLDELVNAAIEFKPEDSNFETLPDNISDDPAFPILAFLSNAALESGENQAGAGEKAVQLMTVHAAKGLEFNAVFLTGMEEGRFPSEMSLAERGGLEEERRLMYVAITRARKRLYITMAQQRMLHGQTQFGIVSRFVEEIPPEVLHYLSVKKPAYDRYGNTRQTAAPKDKIIDDYKQPQTYAGFRIGQNVRHAKFGTGVIIDAADKGESARLTINFGKQGVKELDTKFAKLEAM

SEQ ID NO: 43859 - DNA, 2022 bp, Escherichia coli O157:H7 EDL933
  CDS (1)..(2022): transl_table=11
  misc_feature (202)..(202): k is g or t
atgcgtctaaaccccggccaacaacaagctgtcgaattcgttaccggcccctgcctggtgctggcgggcgcgggttccggtaaaactcgtgttatcaccaataaaatcgcccatctgatccgcggttgcggttatcaggcgcggcacattgcggcggtgacctttactaataaagcagcgcgcgagatgaaagagcgtgtakggcagacgctggggcgtaaagaggcgcgtgggctgatgatctccactttccatacgttggggctggatatcatcaaacgcgagtatgcggcgcttgggatgaaagcgaacttctcgttatttgacgataccgatcagcttgctttgcttaaagagttgaccgaggggctgattgaagatgacaaagttctcctgcaacaactgatttcgaccatctctaactggaagaacgatctcaaaactccggcgcaggcggcggcagaggcaaagggcgagcgggatcgtatttttgcccattgttatgggctgtatgatgcacacctgaaagcctgtaacgttctcgacttcgatgacctgattttattgccgacgttgctgctgcaacgcaatgaagaagtacgcgaacgctggcagaacaaaattcgctacctgctggtggatgagtatcaggacaccaacaccagccagtatgaactggtgaaactgctggtgggcagccgcgcgcgctttaccgtggtgggtgacgatgaccagtcgatctactcctggcgcggtgcacgtccgcaaaacctggtgctgctgagtcaggattttccggcgctgaaggtgattaagcttgagcagaactatcgctcttccgggcgtattctgaaagcggcgaacatcctgatcgccaataacccgcacgtctttgaaaagcgtctgttctccgaactgggttacggcacagagctaaaagttttaagcgcgaataacgaggaacatgaagccgagcgcgttactggcgagctgatcgcccatcacttcgtcaataaaacgcagtacaaagattacgccattctttatcgcggcaaccatcagtcgcgggtatttgaaaaattcctgatgcaaaaccgcatcccgtacaaaatatccggtggtacgtcgtttttctctcgtcctgaaatcaaggacttgctggcttatctgcgcgtgctgactaacccggacgatgacagcgcatttctgcgtatcgttaacacgccgaagcgagagattggcccggctacgctgaaaaagctgggtgagtgggcgatgacgcgcaataaaagcatgtttaccgccagctttgatatgggcctgagtcagacgcttagcggacgtggttatgaagcattgacccgcttcactcactggttggcagaaatccagcgcctggcggagcgggagccgattgctgcggtgcgtgatctgatccatggcatggattatgaatcctggctgtacgaaacatcgcccagcccgaaagccgccgaaatgcgcatgaagaacgtcaaccaactgtttagctggatgacggagatgctggaaggcagcgaactggatgagccgatgacgctcacccaggtggtgacgcgctttactttgcgcgacatgatggagcgtggtgagagtgaagaagagctggatcaggtgcaactgatgactctccacgcgtcaaaaggactggagtttccttatgtctacatggtcggtatggaagaagggtttttgccgcaccagagcagtatcgatgaagataatatcgatgaggagcggcggctggcctatgtcggcattacccgcgcccagaaggaattgacctttacgctgtgtaaagaacgccgtcagtacggcgaactggtgcgcccggagccgagccgctttttgctggagctgccgcaggatgatctgatttgggaacaggagcgcaaagtggtcagcgccgaagaacggatgcagaaagggcaaagccatctggcgaatctgaaagcgatgatggcggcaaaacgagggaaataa

SEQ ID NO: 43860 - protein, 673 aa, Escherichia coli O157:H7 EDL933
  misc_feature (68)..(68): The Xaa at location 68 stands for Gly, or Trp.
MRLNPGQQQAVEFVTGPCLVLAGAGSGKTRVITNKIAHLIRGCGYQARHIAAVTFTNKAAREMKERVXQTLGRKEARGLMISTFHTLGLDIIKREYAALGMKANFSLFDDTDQLALLKELTEGLIEDDKVLLQQLISTISNWKNDLKTPAQAAAEAKGERDRIFAHCYGLYDAHLKACNVLDFDDLILLPTLLLQRNEEVRERWQNKIRYLLVDEYQDTNTSQYELVKLLVGSRARFTVVGDDDQSIYSWRGARPQNLVLLSQDFPALKVIKLEQNYRSSGRILKAANILIANNPHVFEKRLFSELGYGTELKVLSANNEEHEAERVTGELIAHHFVNKTQYKDYAILYRGNHQSRVFEKFLMQNRIPYKISGGTSFFSRPEIKDLLAYLRVLTNPDDDSAFLRIVNTPKREIGPATLKKLGEWAMTRNKSMFTASFDMGLSQTLSGRGYEALTRFTHWLAEIQRLAEREPIAAVRDLIHGMDYESWLYETSPSPKAAEMRMKNVNQLFSWMTEMLEGSELDEPMTLTQVVTRFTLRDMMERGESEEELDQVQLMTLHASKGLEFPYVYMVGMEEGFLPHQSSIDEDNIDEERRLAYVGITRAQKELTFTLCKERRQYGELVRPEPSRFLLELPQDDLIWEQERKVVSAEERMQKGQSHLANLKAMMAAKRGK

SEQ ID NO: 43861 - DNA, 2187 bp, Xylella fastidiosa 9a5c
  CDS (1)..(2187): transl_table=11
gtgaacgtctctcatgtgcttgatcacttaaatcagaaccagcgcgaggccgttgctgcggctcccggccactacctgatcctcgctggtgccggatcaggaaaaacccgcgttctcactcatcgcatcgtttggctcaacgaggtacatggagtacccacccacagcatgatggccgtcaccttcacgaacaaggccgccggcgaaatacaacaacggattgatctacaactgcgccacggcaaacgcggcatgtggatcggaaccttccatagcctggcgcatcgcttactgcgcctgcattggaacgacgcaacattacccgaaaacttccaggtcatagacagcgacgatcaattacgcctcgtcaaacgagtgatccagtccttgggattgaatgacaccctcttcccccccaaacaggcgatgtggtggattaatacacagaaagatgaaggacgccgccccgagcacatccagcccgagtcacacgacgattggatcgagacgcagcgccgcatctatgccgagtatcaagagcgctgtaaccgcgctggtttggtcgattttgcggaactgctgctgcgggcacatgaactgctacgcgatactcctgcactgctgacacactaccgttcgcgcttccgtgagatcctgatcgacgaattccaagataccaacgccatccagtacgcgtttgtgcgcatccttgccaatgagactggccacgtcatcgccgtcggcgatgacgaccaagccatctacggctggcgcggcgccaaagttgagcatgtacaacacttcctgaaagattttccaaacgtgcagaccatccgcttggagcaaaattaccgctccagcgccaatatccttgacgctgccaacgcaatcattgcccataacccagaccggattgggaaacgcctctggactgaatccggtgttggtgaatccatcgacctatacgccgcctacaacgagattgatgaagcccgctacatcgtcgaacgcgcctgccagtgggtacgcgacggcggcagctacggcgaaatcgcagtgctttaccgtagtaacgcacagtcccgcgcgtttgaagaagtactgcaatccgaacatatcccctaccgtgtttacggcggcatgcgcttcttcgagcgtgccgaaatcaaggatgccctagcctatctgcgtctgcttgccaatcgtagcgatgatgctgcgttcgaacgcgttgtaaatacccccgtacgcggcatcggtgagcgcaccttagatgaagtaagacacctagcacgtacccaaggcttagcactatgggatgcggcaatggcatgtacccaatcaaccacgctgaccgcgcgcgcacgtaatgccttggcgagtttcctcaatttactgcaacaacttgcggtggaaaccagccagatgggtttagccgaacggattgaccatatgctgctgcgttcggagttacgcgagcactggaagaaagaagcgcgtggttctctggatgccgaatcacgtcaagaaaacttagacgaacttgtttcggtcgcttcacgttttgtccttccgcaaaacgacgaagacacgcccatcatgaccgaattggacgcgttcctatcctatacatgcctggaaagtggcgatggtcaagtccaggccggggaggaaggcgtacaactgatgaccctacactcagccaaaggcttggaattccccctggtcttcttggtgggcttggaaaatggattattccccagcgcgcgttccctggatgaacacggtcgactggaggaagaacgccgcttagcgtatgtcggtatcacccgtgcccgtcacaaactcatcctcagctatgccgaagcacggcgtatccacggtaaagataactacaacatcccctcacgctttttacgcgagatcccgcgggatctattgcatgaagtacgccctaccatacaagtctcacgccagaccccattaggagcagtgcagcgtccagcccatgatgaacgcgacgcagcacctatcaagctcggcgtgaacgtcatgcaccctacatttgggtgcggcgtggtcgtcgactacgaaggcagcggcgcgcacacccgcgtacaaatcaaattcgatgacgtcggcacaaaatggttggtcatggcatacgccaaactcagcgtggtatag

SEQ ID NO: 43862 - protein, 728 aa, Xylella fastidiosa 9a5c
MNVSHVLDHLNQNQREAVAAAPGHYLILAGAGSGKTRVLTHRIVWLNEVHGVPTHSMMAVTFTNKAAGEIQQRIDLQLRHGKRGMWIGTFHSLAHRLLRLHWNDATLPENFQVIDSDDQLRLVKRVIQSLGLNDTLFPPKQAMWWINTQKDEGRRPEHIQPESHDDWIETQRRIYAEYQERCNRAGLVDFAELLLRAHELLRDTPALLTHYRSRFREILIDEFQDTNAIQYAFVRILANETGHVIAVGDDDQAIYGWRGAKVEHVQHFLKDFPNVQTIRLEQNYRSSANILDAANAIIAHNPDRIGKRLWTESGVGESIDLYAAYNEIDEARYIVERACQWVRDGGSYGEIAVLYRSNAQSRAFEEVLQSEHIPYRVYGGMRFFERAEIKDALAYLRLLANRSDDAAFERVVNTPVRGIGERTLDEVRHLARTQGLALWDAAMACTQSTTLTARARNALASFLNLLQQLAVETSQMGLAERIDHMLLRSELREHWKKEARGSLDAESRQENLDELVSVASRFVLPQNDEDTPIMTELDAFLSYTCLESGDGQVQAGEEGVQLMTLHSAKGLEFPLVFLVGLENGLFPSARSLDEHGRLEEERRLAYVGITRARHKLILSYAEARRIHGKDNYNIPSRFLREIPRDLLHEVRPTIQVSRQTPLGAVQRPAHDERDAAPIKLGVNVMHPTFGCGVVVDYEGSGAHTRVQIKFDDVGTKWLVMAYAKLSVV

SEQ ID NO: 43863 - DNA, 2484 bp, Agrobacterium tumefaciens str. C58
  CDS (1)..(2484): transl_table=11
ttgggccgcatgagcaacagtttcgacgatatgccgttcttcgatgaagaacccgtggcaccgcgcagggcgaccaacaatgccccttcggaaaacggcggcgggcttggcattgccgcccgcgccatggcggcgcgcgaccaggtgcggccggcacacgattatctttccggcctcaacccggaacagcgcgaggccgtggaaacgcttgacggaccggttctcgttctcgccggcgccggcaccggcaagacccgcgttctgacgacccgcatcgcccatattctcgccaccggccgcgcctatccaagccagatccttgccgtgaccttcaccaacaaggcggcccgcgagatgaaggaacgtatcggcgtcctcgtcggcggcgctgtcgagggcatgccgtggcttggcaccttccactccatcggcgtcaagcttctgcgccgccatgccgagctcatcggcctgaaatcggatttcaccattctcgacacggatgatgtggtgcggctgatcaagcagctcattcaggccgaaggtcttgatgacaagcgctggccggcaaaacagttcgccggcatgatcgacggctggaagaacaaggggctgacgccaccggatattcccgagggtgacagccgcgcctttgccaacggcaagggccgcgaactttacgccgcctatcaggcccggctgaaaacgttgaacgcctgcgatttcggtgatctcttgctgcacccgatcagcatcttccgccgccatacggatattctgaaagagtatcaccagaagttccgttatattctggtggacgaatatcaggacaccaacacggcgcaatatatgtggctgcggctgcttgcccagcgcgccaaggacgagccgcagaatgtctgctgcgtcggtgacgacgaccagtcgatctatggctggcgcggcgcggaagtggacaatatcctgcgcttcgacaaggattttcccggtgccaaggtcatcaagcttgagcgtaactaccgttccaccgaacatattctcggcgctgccggccatctgatcgcccacaacgagggccgtctcggcaagacgttgtttaccgagcgcagcagtccggacgatgaaaaggtcgtggtgcacgccgcctgggattcggaagaagaggcccgcgcggtcggagaggaaatcgagcaactccagcgtaagaactacaagctgaacgacatggccatcctcgttcgcgcttccttccagatgcgcgaattcgaagaccgcttcgtgacgcttggcctcaattaccgcgtcatcggcggcccgcgcttttatgagcgcctcgaaatccgcgatgccatggcctatttccggctggtctgccaaccggccgacgatctcgccttcgagcggatcgtcaatacgccaaagcgtggccttggcgatacgacgatccgtaacctgcacgactatgcccgcgcccgcgatatcccgatgctggcagccgccgccgacatcatcgagaccgacgagttgaagccgaaagcgcgcaaggcgctgttcgatgtggtgcaggatttccgccgctggcagggcctgctggaaaacaccgaacacaccacgcttgccgaacagattctcgacgaaagcggctataccgccatgtggcaggccgacaagacggccgaagcaccgggacggcttgagaacctgaaggaactcatccgctcgatggaatccttcgaaagcatgcgtggatttctggaacacgtcgccctggttatggatgcggaacagaatgccgagctggatgccgtctccatcatgacgctgcattccgccaagggtctggaattcgacaccgtcttcctgcccggttgggaagaaggcctgtttccccaccagcgggcgctggacgaaggcggtcgctccggtctggaggaagaacgtcgtctggcttatgtcggcatcacccgcgccaagaagctctgccatatctggttcgtctcgaaccggcgcattcacgggctgtggcaatccaccctgccctcgcgtttcctcgacgaactgccgcccgcccatgtggatgtcgcggcttccgacagcaattatggcggttatggcggacgcggcggttacggccagtcccgtttcgacaaggccgatcccttcaccaacaattactccacccccggctggaaacgcgcccagcagaaccgcagcgacgccacccgcgacaattggggcacacgctccggccatgcggtggagcgcatcggttacggcgaaagcggcccgcgcacccgcaccatcgacggcgaactggtggcgaaatccgtggctgacaagccctcgaaattcttcgtcggcgaccgtgttttccacctcaaattcggcaatggcaatatttccgcgatcgaaggcaataaattgaccatcaacttcgaccgtgccggcgaaaagcgcgtgctggatggatttgtggaaaaggtttga

SEQ ID NO: 43864 - protein, 827 aa, Agrobacterium tumefaciens str. C58
MGRMSNSFDDMPFFDEEPVAPRRATNNAPSENGGGLGIAARAMAARDQVRPAHDYLSGLNPEQREAVETLDGPVLVLAGAGTGKTRVLTTRIAHILATGRAYPSQILAVTFTNKAAREMKERIGVLVGGAVEGMPWLGTFHSIGVKLLRRHAELIGLKSDFTILDTDDVVRLIKQLIQAEGLDDKRWPAKQFAGMIDGWKNKGLTPPDIPEGDSRAFANGKGRELYAAYQARLKTLNACDFGDLLLHPISIFRRHTDILKEYHQKFRYILVDEYQDTNTAQYMWLRLLAQRAKDEPQNVCCVGDDDQSIYGWRGAEVDNILRFDKDFPGAKVIKLERNYRSTEHILGAAGHLIAHNEGRLGKTLFTERSSPDDEKVVVHAAWDSEEEARAVGEEIEQLQRKNYKLNDMAILVRASFQMREFEDRFVTLGLNYRVIGGPRFYERLEIRDAMAYFRLVCQPADDLAFERIVNTPKRGLGDTTIRNLHDYARARDIPMLAAAADIIETDELKPKARKALFDVVQDFRRWQGLLENTEHTTLAEQILDESGYTAMWQADKTAEAPGRLENLKELIRSMESFESMRGFLEHVALVMDAEQNAELDAVSIMTLHSAKGLEFDTVFLPGWEEGLFPHQRALDEGGRSGLEEERRLAYVGITRAKKLCHIWFVSNRRIHGLWQSTLPSRFLDELPPAHVDVAASDSNYGGYGGRGGYGQSRFDKADPFTNNYSTPGWKRAQQNRSDATRDNWGTRSGHAVERIGYGESGPRTRTIDGELVAKSVADKPSKFFVGDRVFHLKFGNGNISAIEGNKLTINFDRAGEKRVLDGFVEKV

SEQ ID NO: 43865 - DNA, 2121 bp, Agrobacterium tumefaciens str. C58
  CDS (1)..(2121): transl_table=11
gtggcaatttctgaagcgaccctcgtggatgcgcgaatattagggaatgcgaggatggcggttgcctatctggacaagttgaacgagcagcagcgcaaggcggtggaacacggtgtcggcctggcggatggagagacggccggtccgctgctgatcattgccggcgccggttccggcaagaccaatacgctcgcccaccgcgtcgcccatctgatcgtgaatggcgccgatccccgccgcattctgctgatgacgttttcgcggcgggctgcctccgaaatgtcgcggcgtgtcgagcggatctgcaagcaggttatcggggcaaattcggcaatcatgaccgatgcactggcctggtcaggcacgtttcacggtatcggcgcacgcctgttgcgcatctatgccgaacagatcgggctcaatatcgatttcaccatccacgaccgcgaggacagcgccgacctgatgaaccttgtccggcacgaactcggtttttccaagacagaaagccgctttccaacgaaggggacatgccttgcgatctattcgcgcgccgtgaattcccagacgccgttaaaagacattcttcgccaacactatccatgggtcgccgactggcagagcgaactgaaggaactgtttgcagcctatgtcgaggccaagcagatccagaacgtgctcgattacgacgatctcctgctctactgggcgcagatggtcagcgatcccattctggctgatgatatcggcaaccgtttcgaccatgtgatggtggatgaatatcaggataccaaccggctgcaggcctcggtgctgatggcaatgaaacccggtggccgcggcctgaccgtggtgggcgacgatgcgcagtcgatctattcgttccgggccgcgacggtgcgcaacatcctcgattttccggcgtgcttcaacccggcggccgatatcatcacgctggatcgcaactatcgctcgacgcagcctattctggccgccgccaatggcgtcatcgacctggcgcgtgaacgttttaccaagaacctgtggacagagcggcagtcgctcgagcgcccgaagctcgtgacggtgaaggatgaaaccgaacaggcgaatttcatcatcgaccagattcttgccaatcgcgaaaccggcacgacgctgaaacagcaggccgtgctgttccgcacctctagccacagcggcccgctcgaagttgaactcacccgccgcaatatccccttcgtcaaattcggcggcctgaaattcctcgacagcgcccatgtaaaggacatgctggcggtgctccgtttcgcccagaacccgcgcgaccgcgtcgccggtttccggctgctgcagatgctgccaggcatcgggccgaagaaggccggcaatatcctcgatacgatagccccggacccggagcccctgcttgcccttgccgaaattccaccgccgccgaagaccggtgacgactggacggctttcacgcaattgctagtggggctgcggcggggcccgaacggctggccgggcgaaatcggcttggcgcgcctgtggtacgagccccatctcgaacgcatccatgaggatgccgacacccgcaaggccgatctgcagcaactcgagcagatcgccggcggctatccttcacgcgagcgttttctgaccgagctgacgcttgacccgccggacgccaccagcgatcaggccggcgtcccgcttctcgacgaagactatctcagcctctctaccatccattcggccaagggccaggaatggcgttccgtgttcatcctcaacgtggtcgatggctgtataccctccgacctcggggtcggcaccagccaggaactggaggaagagcgccggctactctacgtcgccatgacccgcgccaaggacaacctgtcgctgatcaccccgcaacgtttcttcactggtgggcagagttctcagggcgaccggcatgtctacgctgccagaacccgcttcataccggcgacattgctgcagttttttgagacgatgagctggccgttggtttcgattgcagcttcggagcggagcgctcagcagatccggattgatgtgggggcaaggatgcgggcgatgtggaagtaa

SEQ ID NO: 43866 - protein, 706 aa, Agrobacterium tumefaciens str. C58
MAISEATLVDARILGNARMAVAYLDKLNEQQRKAVEHGVGLADGETAGPLLIIAGAGSGKTNTLAHRVAHLIVNGADPRRILLMTFSRRAASEMSRRVERICKQVIGANSAIMTDALAWSGTFHGIGARLLRIYAEQIGLNIDFTIHDREDSADLMNLVRHELGFSKTESRFPTKGTCLAIYSRAVNSQTPLKDILRQHYPWVADWQSELKELFAAYVEAKQIQNVLDYDDLLLYWAQMVSDPILADDIGNRFDHVMVDEYQDTNRLQASVLMAMKPGGRGLTVVGDDAQSIYSFRAATVRNILDFPACFNPAADIITLDRNYRSTQPILAAANGVIDLARERFTKNLWTERQSLERPKLVTVKDETEQANFIIDQILANRETGTTLKQQAVLFRTSSHSGPLEVELTRRNIPFVKFGGLKFLDSAHVKDMLAVLRFAQNPRDRVAGFRLLQMLPGIGPKKAGNILDTIAPDPEPLLALAEIPPPPKTGDDWTAFTQLLVGLRRGPNGWPGEIGLARLWYEPHLERIHEDADTRKADLQQLEQIAGGYPSRERFLTELTLDPPDATSDQAGVPLLDEDYLSLSTIHSAKGQEWRSVFILNVVDGCIPSDLGVGTSQELEEERRLLYVAMTRAKDNLSLITPQRFFTGGQSSQGDRHVYAARTRFIPATLLQFFETMSWPLVSIAASERSAQQIRIDVGARMRAMWK

SEQ ID NO: 43867 - DNA, 2163 bp, Yersinia pestis CO92
  CDS (1)..(2163): transl_table=11
atggacgtttctgatctgctcgacagcctgaatgaaaaacaacgtgacgccgtggccgcgccgcgcggcaacttgttggtactggccggtgcaggcagtggcaaaacgcgggtgctggttcaccgtatcgcctggctgttgtcggtagagaatgcctcgccgtattcgattatctcggtaacctttaccaataaagcggcggctgaaatgcgccaccgtattgaacatctgattggcaccagccaaggcgggatgtggatcgggactttccacggtttggcgcaccgtctgctgcgtgctcaccatctggatgccaatctgccacaagattttcaaatcctggatagcgatgaccaactgcggttattgaaacgcctggtcaaagcactcaatttggatgagaaacaatggcccccgcgtcaggcgatgtggtacatcaacggcaaaaaagacgaagggctgcgcccgcaacatattgagagctacggtaatccggttgaggccacctggctacgtatctatcaggcttatcaggaagcgtgcgaccgcgcgggtctggttgattttgccgagctgttgctacgagcgcacgagctgtggctgaacaaaccacatattcttaatcattatcgtgaacgctttaccaacattttggtggatgagtttcaggataccaacaacatccaatatgcctggatccgcttgttggccggtgaacgttccaatgtgatgatcgtcggcgacgatgaccagtcaatctatggttggcgcggcgcgcaggtcgagaatatccaacgtttcttgaaggatttccccggtgcggagaccatccgcctggagcagaattaccgctcgaccagcatcattctggctgccgccaatgccctgattgccaacaatgacggccgcatgggtaaaaatctgtggaccgatggcgcggagggcgaacctatctccctctattgtgcgtttaacgagttagatgaagcccgttttgtggtcaatcgtatcaaagcctggcaggacaacggcggtgcgctgaatgattgtgccattttgtaccgtagcaacgcccaatcgcgcgtattagaagaagcgttactgcaaacggcaaccccgtaccgtatttatggggggcagcgcttcttcgaccgccaggaaattaaagactcactggcttatctgcgcctgatctccaatcgtaatgacgacgccgcgtttgaacgggtggtgaatacacccactcgggggattggcgatcgcacattggatgtggtgcgtcaaaccgcccgtgaccgccagttaacgctatggcaatcaacccgtgccatgttgcaggaaaaagtgctggcagggcgtgccgcgtccgcattacaacgctttgtcgagctgatcgattcactggcgcgcgaaacggctgatatgccgctacacgtgcaaactgatcgcgttattcgtgattctggcttgtggtcgatgtacgaacaggaaaaaggcgagaaaggtcaggcacgtatcgagaaccttgaagagctggttacggcgacccgtcaatacagctatcaggatgaagatcaggatctgatgccgctacaggccttcttatcccatgcggcactggaagccggagatggccaggccgatgcctatcaggatgcggtgcaattaatgactctccattcagcgaaaggcttggagtttccacaggtatttattgtgggaatggaagaagggatgttcccgagccaaatgtcattggatgagggggggcgtttggaagaggagcggcgtttggcctacgtggggttaacccgtgcgatgcagaaactgacgttatgttacgccgaaagccgccgcctatacggtaaagaggtcaatcaccgcccttcacgctttatcggcgaactgccgcaggagtgcgtcgaagaggtccggctgcgcgccagtgtttcccgcccggtgaatcaccgccgaatggggactccgatgcacgagaatgacagcggtttctcattgggccagcgagtgcggcaccctaaatttggcgagggtactattgtgaatttggaaggcagtggtgagcacaaccggttgcaggttgccttccccggagaggggattaagtggctggtcgcggcctatgcgcgtctggaacccgtgtaa

SEQ ID NO: 43868 - protein, 720 aa, Yersinia pestis CO92
MDVSDLLDSLNEKQRDAVAAPRGNLLVLAGAGSGKTRVLVHRIAWLLSVENASPYSIISVTFTNKAAAEMRHRIEHLIGTSQGGMWIGTFHGLAHRLLRAHHLDANLPQDFQILDSDDQLRLLKRLVKALNLDEKQWPPRQAMWYINGKKDEGLRPQHIESYGNPVEATWLRIYQAYQEACDRAGLVDFAELLLRAHELWLNKPHILNHYRERFTNILVDEFQDTNNIQYAWIRLLAGERSNVMIVGDDDQSIYGWRGAQVENIQRFLKDFPGAETIRLEQNYRSTSIILAAANALIANNDGRMGKNLWTDGAEGEPISLYCAFNELDEARFVVNRIKAWQDNGGALNDCAILYRSNAQSRVLEEALLQTATPYRIYGGQRFFDRQEIKDSLAYLRLISNRNDDAAFERVVNTPTRGIGDRTLDVVRQTARDRQLTLWQSTRAMLQEKVLAGRAASALQRFVELIDSLARETADMPLHVQTDRVIRDSGLWSMYEQEKGEKGQARIENLEELVTATRQYSYQDEDQDLMPLQAFLSHAALEAGDGQADAYQDAVQLMTLHSAKGLEFPQVFIVGMEEGMFPSQMSLDEGGRLEEERRLAYVGLTRAMQKLTLCYAESRRLYGKEVNHRPSRFIGELPQECVEEVRLRASVSRPVNHRRMGTPMHENDSGFSLGQRVRHPKFGEGTIVNLEGSGEHNRLQVAFPGEGIKWLVAAYARLEPV

SEQ ID NO: 43869 - DNA, 2382 bp, Synechocystis sp. PCC 6803
  CDS (1)..(2382): transl_table=11
gtgcccatgactgttgtccccgactaccttgcccacctcaatccttcccaacggcgggcggtggagcatttttgtggccctcttttggtggtggccggggccggctcagggaaaactagggcactaacctaccgcattgcccatctaattcgtcagcatcgcatcaatccggaaaatatcctggcggtaacctttaccaataaagccgccaaggaaatgaaggaacgtttggaaaagatttttgcccaagcctgggcccaacaggaatttagccaacggtgggaattgttggggaaatatgaacaaaaacagttgctttccagggtgtacaaaacagttacgaaacccctctggattggcactttccacagtctatgttctcgtattctccgctacgacattgataaatatcaggacagcagtggccgccgttggacaaaacagttttccatttttgatgaaagtgacgtgcaaagtttgtttaagaccattgtcactaaggatatggatttggacgaaaaacagttcaatcctaagagtattcgctaccaggtcagtaatgccaaaaacctcgggcaatcaccggagacctatctaagggaaaatcccagttataaaggtagggtcattgcggaagtttaccaagcttaccaaaatcaattggccgctaataacgctctagattttgatgatttaattctcatccctacccgtttatttcaacaaaatgaatcagttttaggctactggcaccgaaaatttaaccatattttggtggatgaataccaagacactaatcgcatccaatatgatttaattcgtctgctgagcaccaatggggaagaacggcagtcggagtgggattggcgggggcgttccacttttgtggtgggggatgcagaccaatctatttacagtttccgcatggcagactttaccatcctgctcaatttccaagaggattttggcgatcgcctgttggatggggaaacgaccaccatggtcaaactagaggaaaattaccgttctcgggaaaatatcctccaagcggctaaccatttaattgaacataatagccaacggattgacaagatcctcaaggctacccggagtggcggagatgatattatcctttaccaggcggatgatgaaagggatgagtcccgttttgtgattaataaaattctgagcttaaggaaaaataacccagaattaaattttggtgattttgctattttatatcgcaccaatgcccaatcccgggcctttgaagaacagctattaaataataatattcgctacaatattgtcggtggttttcgcttctacgatcgccaggaaattaaagatgccattgcctatctccgggtgttagttaatccggcggatacggtcagcttgttgcgtatcatcaatactccccggcggggcatcggtaaatccaccattgaaggttttgttaatgcctctaaggaattggacattcccctgtgggaaattattaccgacgaaacttcggtgaatactctggccgggcgatcaggtaaaaaaaccctgcaatttgcccgcatgctccaggaaatccaaagccaaattggtgagctttctgcgtcggaagccctcagcttagtgttggaaaaatccaattatgtggacgacttaaagcaaaaaggcaccgaagaagcggataatcgcctggccaacctgggggaattggacaatgcagtgcgacagtttgaagcagaaagtgaagaccctagcctagtggattttttggcttcagcatccctcacttccgaccttgatgacctggaggaatccggagacgaagtgtccctcatgactctccactctgctaagggcctggaatttccagtggtcttcttagtggggttggagcagggcacttgcccccacgcccgcagtttaaatgatcctttggatctagaagaggaacgccgtttatgttacgtgggcattaccagagcccaggaaaatctctttttgacccatgctcgcatgcgttacatctggggttctttagaaaccaaaataccgtcccaatttctccaggaattaccaccggatttattggccgatggctcaactggtcgtagaactggtcgcaatgctcctgccgccgatcccaagggaccttccattgcccaaaaacaagcccgaaaaaaaactggttcccagtccactcaaccggctaaagacctaatctggaatgttggcgatcgggtaatgcacaacaattttggagaaggcactgtgacccacattttaggcaaaggccataaagctaatttggccatcaaatttcccggcattggtgtgaaaattattgaccccagtttcgcccctctacgccgcctttga

SEQ ID NO: 43870 - protein, 793 aa, Synechocystis sp. PCC 6803
MPMTVVPDYLAHLNPSQRRAVEHFCGPLLVVAGAGSGKTRALTYRIAHLIRQHRINPENILAVTFTNKAAKEMKERLEKIFAQAWAQQEFSQRWELLGKYEQKQLLSRVYKTVTKPLWIGTFHSLCSRILRYDIDKYQDSSGRRWTKQFSIFDESDVQSLFKTIVTKDMDLDEKQFNPKSIRYQVSNAKNLGQSPETYLRENPSYKGRVIAEVYQAYQNQLAANNALDFDDLILIPTRLFQQNESVLGYWHRKFNHILVDEYQDTNRIQYDLIRLLSTNGEERQSEWDWRGRSTFVVGDADQSIYSFRMADFTILLNFQEDFGDRLLDGETTTMVKLEENYRSRENILQAANHLIEHNSQRIDKILKATRSGGDDIILYQADDERDESRFVINKILSLRKNNPELNFGDFAILYRTNAQSRAFEEQLLNNNIRYNIVGGFRFYDRQEIKDAIAYLRVLVNPADTVSLLRIINTPRRGIGKSTIEGFVNASKELDIPLWEIITDETSVNTLAGRSGKKTLQFARMLQEIQSQIGELSASEALSLVLEKSNYVDDLKQKGTEEADNRLANLGELDNAVRQFEAESEDPSLVDFLASASLTSDLDDLEESGDEVSLMTLHSAKGLEFPVVFLVGLEQGTCPHARSLNDPLDLEEERRLCYVGITRAQENLFLTHARMRYIWGSLETKIPSQFLQELPPDLLADGSTGRRTGRNAPAADPKGPSIAQKQARKKTGSQSTQPAKDLIWNVGDRVMHNNFGEGTVTHILGKGHKANLAIKFPGIGVKIIDPSFAPLRRL

SEQ ID NO: 43871 - DNA, 2196 bp, Listeria monocytogenes EGD-e
  CDS (1)..(2196): transl_table=11
ttgaatgcaaaagaattagtggacggattgaatccggaacaacgaagagcagtagaaagtacagaaggacctttattgattatggctggtgccggaagtggtaaaactcgagttttgacccatcggatagcttatttagtgagagaacgtggcgtaaatccgtataacattttagcgattacgtttacgaataaagcagctcgcgaaatgaagtcgcggattggcaatttaatgggcggagaagcagaatctatttggatatctacttttcactcgatgtgcgtacgaattttacgccgtgatattgaccgcattggctatgaacgtaattttactattttagatggcagtgaccaattatcggttattaaaggtattttgaaagaaaagaatgtcgatcccaagaagtttgagccaaggggtattttggcttctataagtaatgcaaaaaatgaactgataacagcaagcgaatatattaaagaagcaagtggtttttatgacaaaatggtcggcgaagtctacgagaaatacgagaagaaacttaagaaaaatcaagcactcgattttgatgatttaattatggtcaccattcaattatttgaacgtgtgccagatgttttagaatattatcagcgtaaattccagtatattcacgtggatgagtaccaagataccaaccacgcgcagtatttacttgtgaaacagcttgcttctcgtttcaaaaacttatgcgtcgtaggtgactcggatcaatctatttatggttggcgcggggcggacattagtaacatcatgtccttcgaaaaagattacccaaatgcgaaaaccattttgctagaagaaaattatcgttcaaccaaacgtattttagaagcggcgaaccgtgtgattgaaaacaatggtaaccgtaaaccaaaaaatctttggacaagtaatgcagaagggaagaagattttttatcataaagcattaacggaaaaagaagaagcggcctatgtagttatgaaaattcaagaagaagtaaataactcgaatcgaccactttctgactttgcgattctttatagaactaatgcacagtcccgtgtaatggaagaatatttcatgaagtcgaatatggcgtacacgatggtcggcggtacaaagttctatgacagaaaagaaattaaagacattttggcgtatttacgtcttattagcaataatgaagatgatattagtttgacccgtattgttaatgttccaaaacgtggtgttggaccaggcacattagacaaactaaacaatgttgcaacaacctatgatctcagtctgttcgaagtgcttaaccgcatcgaattagcgggaatttcgcctaaaataagcaaagatttagttgctttccatgatttgattcgtggttttacgcaaatgcaagattttttatccgtaaccgaactcgtagaagaaatccttgaaaaaacaggttaccgagcaatgctaaaaaacgaacggacaattgaagcgcagacacgtttagaaaatatcgacgagtttttatctgtaacacaaaactttgaaaaggaaaatgacgataaaacgttaattgcctttttaactgatttagcactcgttgctgacgtcgataagttagaagaagacaatgaagaacaaaatggggctgtcacattgatgacacttcactctgccaaaggactagaatttccagttgtctttttagttgggatggaagaagggattttcccacattccagagcgatttatgaggaagatgaaatggaagaggagcgtcgtcttgcttacgttggtatcactcgagcggaagaagaacttttcctaacgagcgcttactcacggatgctttatggacgcccatcatctaatcaggaatctcgttttattggagaaatccctcgagatttactggaattaggtaatgaaaacaaactaaaagctgataaaccatatgctaaacctcgtattccacaaaaaacaacaaccgcctacaaatcttcaggcgcagaaacacttggttggacagtcggcgacaaggctagtcataaaaaatggggcgtaggaacagtcgtcagtgtcaaaggggaaggtagcggaatggaactagatattgcattcccgagcccaactggcgtcaaacgattgctcgcagaatttgcgccaattgaaaaagtataa

SEQ ID NO: 43872 - protein, 731 aa, Listeria monocytogenes EGD-e
MNAKELVDGLNPEQRRAVESTEGPLLIMAGAGSGKTRVLTHRIAYLVRERGVNPYNILAITFTNKAAREMKSRIGNLMGGEAESIWISTFHSMCVRILRRDIDRIGYERNFTILDGSDQLSVIKGILKEKNVDPKKFEPRGILASISNAKNELITASEYIKEASGFYDKMVGEVYEKYEKKLKKNQALDFDDLIMVTIQLFERVPDVLEYYQRKFQYIHVDEYQDTNHAQYLLVKQLASRFKNLCVVGDSDQSIYGWRGADISNIMSFEKDYPNAKTILLEENYRSTKRILEAANRVIENNGNRKPKNLWTSNAEGKKIFYHKALTEKEEAAYVVMKIQEEVNNSNRPLSDFAILYRTNAQSRVMEEYFMKSNMAYTMVGGTKFYDRKEIKDILAYLRLISNNEDDISLTRIVNVPKRGVGPGTLDKLNNVATTYDLSLFEVLNRIELAGISPKISKDLVAFHDLIRGFTQMQDFLSVTELVEEILEKTGYRAMLKNERTIEAQTRLENIDEFLSVTQNFEKENDDKTLIAFLTDLALVADVDKLEEDNEEQNGAVTLMTLHSAKGLEFPVVFLVGMEEGIFPHSRAIYEEDEMEEERRLAYVGITRAEEELFLTSAYSRMLYGRPSSNQESRFIGEIPRDLLELGNENKLKADKPYAKPRIPQKTTTAYKSSGAETLGWTVGDKASHKKWGVGTVVSVKGEGSGMELDIAFPSPTGVKRLLAEFAPIEKV

SEQ ID NO: 43873 - DNA, 2196 bp, Listeria innocua Clip11262
  CDS (1)..(2196): transl_table=11
ttgaatgcaaaagaattagttgacggattaaacccagaacaacgaaaagcagtagaaagtacagaaggacctttattaattatggctggtgcagggagtggtaaaacacgtgttttaacccatcgcatcgcttatttagtaagagaacgtggcgtgaatccttataatattttagcgattacgtttaccaataaagcagcgcgtgaaatgaaatcacggattggtaatttaatgggcggagaagcggaatcaatttggatttccacttttcactccatgtgcgtaagaattttacgtcgtgatatagaccggattggctacgaacgcaattttactattttagacggaagtgaccaattatcggttattaaaggcattttaaaagaaaaaaatgtcgaccctaagaagtttgagccacgaggtattttggcttctattagcaatgcaaaaaacgaacttataactgcaagcgaatatataaaagaagcaagtggtttctacgataaaatggtcggcgaagtctatgaaaaatatgaaaagaaactgaagaaaaatcaagcgctcgattttgatgatttaattatggtgacgattcaattatttgaacgtgttccagatgttttagaatattatcagcgcaagtttcaatacattcacgtggatgagtaccaagataccaaccacgcgcagtacttacttgtaaaactacttgcctctagatttaagaatttatgtgtcgttggtgactctgaccaatcaatctacggctggcgcggggcagatattagtaatattatgtctttcgaaaaagattacccaagtgccaaaaccattttactagaagagaattaccgttcgaccaaacgtattttagaagcggcgaaccgtgtaatcgaaaataacggcaatcgtaaaccaaaaaatctttggactagtaatgcggaagggaagaagattttttaccataaggcgttaactgagaaagaagaagcggcttacgtcgttatgaaaattcaagaagaagtaaataattcgagtcgtcctctttctgattttgcgattctttatagaaccaatgcccagtcccgtgtaatggaagaatatttcatgaagtcaaatatggcttacacaatggtcggcggtacgaaattctatgatagaaaagaaattaaagacattttggcttatttacgacttattagtaataatgaagatgatattagtctgacacgtatcatcaacgtaccaaaacgcggagttggaccaggcacattagaaaaactaaacaatgttgccgcagcttacgatttaagtttgtttgaagtacttaatcgcattgaattagccgggatttctgctaaaataagcaaagatttagttgctttccatgatttggttcgcggattcacccaaatgcaagatttcctatctgtaactgaacttgtagaagaaattctcgaaaaaacaggttaccgagcaatgctgaaaaacgaacgaactattgaagctcaaactcgcttagaaaatatcgatgagtttttatctgttacacaaaactttgaaaaagaaaatgacgataaaacattactcgcatttttaacggatttagcactggttgctgacgtcgataagttagaagaagataatgaagaacaaaacggtgcggtgacgctgatgacgcttcactctgccaaagggctagaattcccagttgtctttttagttgggatggaagaaggaattttcccacattctagagccatttatgaagaagaagaaatggaagaagaacgccgccttgcttacgttggtatcactcgtgcagaagaagaacttttcctaacgagcgcgtattcccggatgctttatggtcgtccatcatccaaccaagaatctcgctttattggggaaattcctcgtgacttactagaattaggcaacgaaaataaattaacagctgataaaccgtatgccaaaccgcgcatgccgcaaaaagcaactactgcctataaatcttctggagcggaaacactcggttggacagtcggcgataaagctagtcataagaaatggggcgtaggaacagtcgtaagtgtcaaaggagaaggtagcggaatggaacttgatattgcattcccaagcccaactggagtcaaacgattgctcgcagaatttgcgccaattgaaaaagtataa

SEQ ID NO: 43874 - protein, 731 aa, Listeria innocua Clip11262
MNAKELVDGLNPEQRKAVESTEGPLLIMAGAGSGKTRVLTHRIAYLVRERGVNPYNILAITFTNKAAREMKSRIGNLMGGEAESIWISTFHSMCVRILRRDIDRIGYERNFTILDGSDQLSVIKGILKEKNVDPKKFEPRGILASISNAKNELITASEYIKEASGFYDKMVGEVYEKYEKKLKKNQALDFDDLIMVTIQLFERVPDVLEYYQRKFQYIHVDEYQDTNHAQYLLVKLLASRFKNLCVVGDSDQSIYGWRGADISNIMSFEKDYPSAKTILLEENYRSTKRILEAANRVIENNGNRKPKNLWTSNAEGKKIFYHKALTEKEEAAYVVMKIQEEVNNSSRPLSDFAILYRTNAQSRVMEEYFMKSNMAYTMVGGTKFYDRKEIKDILAYLRLISNNEDDISLTRIINVPKRGVGPGTLEKLNNVAAAYDLSLFEVLNRIELAGISAKISKDLVAFHDLVRGFTQMQDFLSVTELVEEILEKTGYRAMLKNERTIEAQTRLENIDEFLSVTQNFEKENDDKTLLAFLTDLALVADVDKLEEDNEEQNGAVTLMTLHSAKGLEFPVVFLVGMEEGIFPHSRAIYEEEEMEEERRLAYVGITRAEEELFLTSAYSRMLYGRPSSNQESRFIGEIPRDLLELGNENKLTADKPYAKPRMPQKATTAYKSSGAETLGWTVGDKASHKKWGVGTVVSVKGEGSGMELDIAFPSPTGVKRLLAEFAPIEKV

SEQ ID NO: 43875 - DNA, 2319 bp, Nostoc sp. PCC 7120
  CDS (1)..(2319): transl_table=11
atgactaccgactttctcagtcatctgaatcccagccaacgtcaagccgtggaacactattgcggccccttgttagttgttgctggtgctggttccggtaaaacacgagcgttaacttatcggattgctaatttaatactgaagcaccgtgttgctcccgaaaatattttggcggtgactttcaccaacaaagccgccagggagatgaaagaacggattcaacggctgtttgcagaacaattagcattgacagaacatggaaagcgtttagatttactaccagaacacgaacaaactaaattgcgatcgcgtgtttataaaactactattaaagaactgtggtgtggtactttccatagtttgttttcccgtattctccgctttgatatcgaaaaataccaagatgaaaaagggcgacaatggaaccgaaatttttccatttttgatgaatctgatgtacagggtctcatcaaagaaatcgtcactaaacaattaaatctcgatgataagaagtttgagcctcgttctgtccgctacgccattagtaatgcaaaaaatcaaggactttcaccccaggaatttgaaaaagaccaaccaaattatcgtgggagagtaattgctgatgtctataatcgctatcaagataaactagcagaaaacaacgctcttgattttgatgatttaattttaattcctacgagattatttcaacaaaatgagcaggttttaggttactggcatcgcaagttctgtcatattcttgtagacgaatatcaagatactaaccgcactcaatatgacctaattcgtctgttgacaactaatggcgaagagaaaaaaagtgcatgggagtggcaaaatcgctctgtttttgttgtaggtgatgcagaccaatctatttacagctttagaatggcagatttcaccatattactggattttcagaatcagtttggtgatggtttgccagatgaagacacccgcacaatggtgaagttggaagaaaactatcgttcttgtgaaaacattctccaagttgctaacgaactaattgaaaataatactcaaagaatcgataaagtcctcaaaccaacgcggggagcaggcgaagaaatttactgtcacaaggcagataatgaattagaagaagctgattttgtaattcgtcaaatccgcacattagaacatcaaaacccggaattggattggggaagctttgcaattttgtatcggacaaatgcccaatctcgtccctttgaagaattgttagtgaggaatcagattccttacactgttgtgggtgggatgaaattctatgaccgcaaagaaattaaagatgttatagcttatttaagagcgatctctaacccctcggatacagttagtttattacgagtaatcaacacccctcggcgcggtattggtaaagcaactattgataacttaatcaatgcttcccaacaattaggtactactctctgggaaatcttaagtgatgaaacatcagtcaatacattggctgggcgatcggcaaaaggggtgaataactttgccaaaatgattaaccgttggcaagaacaaatagctacagccccagttacagaaatagttatggggattttagaagattctggttacgtacaagatttacaaagccaaggaacagacgaatctgaagaccgcatccaaaacgtacaggaactttataacgctgtcttgcaattccaagaagagaatgaagatgtttctttaacagctttcctgcaaagtacagcccttagttctgatttagataacctcaaggaaggtcaaacagccgtttccctcatgactctgcacgcttccaaaggtttggaatttcctgtagtcttcttggtaggtttagaacagggattattccccggctaccgttcactaagtgaccccgcagccttagaagaagagcgtcgcctctgttatgtagggattactcgcgcccaagaacggctgtatttatccttcgcccgtgaacgccgcttatacggctcacgagaacccgccatgcgatcacaatttctcgatgaattaccagccgaattaatcacaacccaataccaagtccggcaaacttatactagacccccatctactaccaatggtaaagaaacagccaatcaagattggcaagtaggggacagagtattacacaaaagttttgggattggggaaataacccacgtttttggtgctggtagcaagctttctgtggctattaaatttacgagcttgggtcagaaaattgttgaccctagagtcgcccaattacaaaaggtggattag

SEQ ID NO: 43876 - protein, 772 aa, Nostoc sp. PCC 7120
MTTDFLSHLNPSQRQAVEHYCGPLLVVAGAGSGKTRALTYRIANLILKHRVAPENILAVTFTNKAAREMKERIQRLFAEQLALTEHGKRLDLLPEHEQTKLRSRVYKTTIKELWCGTFHSLFSRILRFDIEKYQDEKGRQWNRNFSIFDESDVQGLIKEIVTKQLNLDDKKFEPRSVRYAISNAKNQGLSPQEFEKDQPNYRGRVIADVYNRYQDKLAENNALDFDDLILIPTRLFQQNEQVLGYWHRKFCHILVDEYQDTNRTQYDLIRLLTTNGEEKKSAWEWQNRSVFVVGDADQSIYSFRMADFTILLDFQNQFGDGLPDEDTRTMVKLEENYRSCENILQVANELIENNTQRIDKVLKPTRGAGEEIYCHKADNELEEADFVIRQIRTLEHQNPELDWGSFAILYRTNAQSRPFEELLVRNQIPYTVVGGMKFYDRKEIKDVIAYLRAISNPSDTVSLLRVINTPRRGIGKATIDNLINASQQLGTTLWEILSDETSVNTLAGRSAKGVNNFAKMINRWQEQIATAPVTEIVMGILEDSGYVQDLQSQGTDESEDRIQNVQELYNAVLQFQEENEDVSLTAFLQSTALSSDLDNLKEGQTAVSLMTLHASKGLEFPVVFLVGLEQGLFPGYRSLSDPAALEEERRLCYVGITRAQERLYLSFARERRLYGSREPAMRSQFLDELPAELITTQYQVRQTYTRPPSTTNGKETANQDWQVGDRVLHKSFGIGEITHVFGAGSKLSVAIKFTSLGQKIVDPRVAQLQKVD

SEQ ID NO: 43877 - DNA, 2490 bp, Ralstonia solanacearum GMI1000
  CDS (1)..(2490): transl_table=11
atgacgggcgaaagcctggaattatacggcctgtcggtggccggcatgggcgaagcgggcgaggcggccggtataatttccggattccgcaaaggctctccccgcatgtccgaactgctcgctcacctgaaccccgaacaacgcgccgccgtcacgcttcccgacgagtcggcgctgatcctggccggggcgggcagcggcaagacgcgcgtgctgaccacccgcatcgcctggctgatccagagcgcccgggtgtcgccgtcgggtgtgctggccgtcacctttaccaacaaggcggccaaggagatgaccgcccggctgtccgccatgctgccgatcaacacgcgcggcatgtggatcggcaccttccacggcctgtgcaaccggctgctgcgcgcgcactaccgcgacgccgggctgccgcagaccttccagatcctcgatacgcaagaccagctctcggccgtcaagcgcctgctcaagtcgctgaacatcgacgacgagaagtttccgccgaagaacgtccagtacttcatcaatggcgccaaggaacagggcctgcgcgcaggcgacctggagatcgccaatgagttcgaccgccgcatggccgacctgtacgccgcctacgatgcgcagtgccagcgcgaaggcgtggtcgatttttcagagctgctgctgcgctgctatgagctgctgcgttacaacgatgcgatccgcgcgcactaccagcggcgcttcaagcacatcctggtcgacgagttccaggacaccaaccgcctgcaatacgcctggctgaagatcctggccggcctgggcgaggcgggcgtcacgcccaacgccatctttgccgtgggcgacgacgaccagagcatctacgccttccgcggcgccaacgtcggcaacatggtggacttcgagcgcgaattccgtgtcgcgcaccgcatcaagctggagcagaactaccgttcgcacggcaacatcctggacacggccaaccacctgatcgcccacaacacccgccgcctgggcaagaacctgcgcaccgacgccggccacggcgagccggtgcgcgtctacccgtccgccaccgacgggcaggaggccggctggatcgtcgaagaaatccgcgagcgcatcgccagcggcacggcgcgttccgagatcgccatcctgtatcgcagcaacgcgcagtcgcgggtgatcgagcatgcgttgttctcggtgggtattccctacaaggtgtatggcgggctgcgcttcttcgagcgcgccgaaatcaagcacgcgctggcctacctgcagctgctggagaaccctgacaacgatgccgccttcggccgcgtggtcaacttcccggcgcgcggcgtcggggcgcggtcgctggagcagctgcaggatgcggccaagctgtatggcgtgtcgctggcggcgtcggtgccgtacctgactggcgcggcggggacgaagctggcggcgttcgtgcggctgatcgagcagatgcgcgccgacacgcgccagatgacgctgcccgagatcgtccagcacgtgatccacgccagcggcctcatcacgcattaccagggcgagaaggaaggtctcgaccgcatcgagaacctgcaggaactggtgaccgccgcccaggccttcgtggccgaggagggctacggcgtcgatgccatcgccaccgcgctgccgatgcgccacgacgcgatgctgcgcatcgagggcggcgagacggacagcgatgccgtcaccgagctggtcgccgatgaaacgccgacggagatgaccccgctggtcgccttcctgacgcatgcctcgctggaggccggcgacaaccaggcccaggccggccaggacgcggtgcaactgatgaccgtgcacgccgccaaggggttggagttccacgttgtcttcattaccggcctggaggagggcctgttcccgcacgagaacagcctgctggacaccgacggcctggaagaagagcgtcgcctgatgtacgtagccatcacccgggcgcgcgagcgcctgtacctgtcgtttgcacagagccgcgtgctgcacgggcagatccgctaccacattcgctcgcgcttcttcgacgagctgccggaagccacgctgaagtggctgacgccgcagcataccggctacagccccacgcgtcgcgcgcagggcgggcagggcatgcagggcgatagcgcctggggccgcgagtggttcaagcgccccgagcgcggcgacaacgaggcctacaccggccgcccgaccggcggcatggacaccggcaacacctacgccgacaccaagcgcgcggccggaacgggtttccgcgtcggccagtcggtgttccacaacaagttcggggaaggcgtcatcacgacgctggaaggcgagggcgccgatgcgcgcgcccacatcaagttcagccgccacggcgtgaaggtgctggcgctgggcatcgccaagctggacccgatcaactga

SEQ ID NO: 43878 - protein, 829 aa, Ralstonia solanacearum GMI1000
MTGESLELYGLSVAGMGEAGEAAGIISGFRKGSPRMSELLAHLNPEQRAAVTLPDESALILAGAGSGKTRVLTTRIAWLIQSARVSPSGVLAVTFTNKAAKEMTARLSAMLPINTRGMWIGTFHGLCNRLLRAHYRDAGLPQTFQILDTQDQLSAVKRLLKSLNIDDEKFPPKNVQYFINGAKEQGLRAGDLEIANEFDRRMADLYAAYDAQCQREGVVDFSELLLRCYELLRYNDAIRAHYQRRFKHILVDEFQDTNRLQYAWLKILAGLGEAGVTPNAIFAVGDDDQSIYAFRGANVGNMVDFEREFRVAHRIKLEQNYRSHGNILDTANHLIAHNTRRLGKNLRTDAGHGEPVRVYPSATDGQEAGWIVEEIRERIASGTARSEIAILYRSNAQSRVIEHALFSVGIPYKVYGGLRFFERAEIKHALAYLQLLENPDNDAAFGRVVNFPARGVGARSLEQLQDAAKLYGVSLAASVPYLTGAAGTKLAAFVRLIEQMRADTRQMTLPEIVQHVIHASGLITHYQGEKEGLDRIENLQELVTAAQAFVAEEGYGVDAIATALPMRHDAMLRIEGGETDSDAVTELVADETPTEMTPLVAFLTHASLEAGDNQAQAGQDAVQLMTVHAAKGLEFHVVFITGLEEGLFPHENSLLDTDGLEEERRLMYVAITRARERLYLSFAQSRVLHGQIRYHIRSRFFDELPEATLKWLTPQHTGYSPTRRAQGGQGMQGDSAWGREWFKRPERGDNEAYTGRPTGGMDTGNTYADTKRAAGTGFRVGQSVFHNKFGEGVITTLEGEGADARAHIKFSRHGVKVLALGIAKLDPIN

SEQ ID NO: 43879 - DNA, 2475 bp, Agrobacterium tumefaciens str. C58
  CDS (1)..(2475): transl_table=11
atgagcaacagtttcgacgatatgccgttcttcgatgaagaacccgtggcaccgcgcagggcgaccaacaatgccccttcggaaaacggcggcgggcttggcattgccgcccgcgccatggcggcgcgcgaccaggtgcggccggcacacgattatctttccggcctcaacccggaacagcgcgaggccgtggaaacgcttgacggaccggttctcgttctcgccggcgccggcaccggcaagacccgcgttctgacgacccgcatcgcccatattctcgccaccggccgcgcctatccaagccagatccttgccgtgaccttcaccaacaaggcggcccgcgagatgaaggaacgtatcggcgtcctcgtcggcggcgctgtcgagggcatgccgtggcttggcaccttccactccatcggcgtcaagcttctgcgccgccatgccgagctcatcggcctgaaatcggatttcaccattctcgacacggatgatgtggtgcggctgatcaagcagctcattcaggccgaaggtcttgatgacaagcgctggccggcaaaacagttcgccggcatgatcgacggctggaagaacaaggggctgacgccaccggatattcccgagggtgacagccgcgcctttgccaacggcaagggccgcgaactttacgccgcctatcaggcccggctgaaaacgttgaacgcctgcgatttcggtgatctcttgctgcacccgatcagcatcttccgccgccatacggatattctgaaagagtatcaccagaagttccgttatattctggtggacgaatatcaggacaccaacacggcgcaatatatgtggctgcggctgcttgcccagcgcgccaaggacgagccgcagaatgtctgctgcgtcggtgacgacgaccagtcgatctatggctggcgcggcgcggaagtggacaatatcctgcgcttcgacaaggattttcccggtgccaaggtcatcaagcttgagcgtaactaccgttccaccgaacatattctcggcgctgccggccatctgatcgcccacaacgagggccgtctcggcaagacgttgtttaccgagcgcagcagtccggacgatgaaaaggtcgtggtgcacgccgcctgggattcggaagaagaggcccgcgcggtcggagaggaaatcgagcaactccagcgtaagaactacaagctgaacgacatggccatcctcgttcgcgcttccttccagatgcgcgaattcgaagaccgcttcgtgacgcttggcctcaattaccgcgtcatcggcggcccgcgcttttatgagcgcctcgaaatccgcgatgccatggcctatttccggctggtctgccaaccggccgacgatctcgccttcgagcggatcgtcaatacgccaaagcgtggccttggcgatacgacgatccgtaacctgcacgactatgcccgcgcccgcgatatcccgatgctggcagccgccgccgacatcatcgagaccgacgagttgaagccgaaagcgcgcaaggcgctgttcgatgtggtgcaggatttccgccgctggcagggcctgctggaaaacaccgaacacaccacgcttgccgaacagattctcgacgaaagcggctataccgccatgtggcaggccgacaagacggccgaagcaccgggacggcttgagaacctgaaggaactcatccgctcgatggaatccttcgaaagcatgcgtggatttctggaacacgtcgccctggttatggatgcggaacagaatgccgagctggatgccgtctccatcatgacgctgcattccgccaagggtctggaattcgacaccgtcttcctgcccggttgggaagaaggcctgtttccccaccagcgggcgctggacgaaggcggtcgctccggtctggaggaagaacgtcgtctggcttatgtcggcatcacccgcgccaagaagctctgccatatctggttcgtctcgaaccggcgcattcacgggctgtggcaatccaccctgccctcgcgtttcctcgacgaactgccgcccgcccatgtggatgtcgcggcttccgacagcaattatggcggttatggcggacgcggcggttacggccagtcccgtttcgacaaggccgatcccttcaccaacaattactccacccccggctggaaacgcgcccagcagaaccgcagcgacgccacccgcgacaattggggcacacgctccggccatgcggtggagcgcatcggttacggcgaaagcggcccgcgcacccgcaccatcgacggcgaactggtggcgaaatccgtggctgacaagccctcgaaattcttcgtcggcgaccgtgttttccacctcaaattcggcaatggcaatatttccgcgatcgaaggcaataaattgaccatcaacttcgaccgtgccggcgaaaagcgcgtgctggatggatttgtggaaaaggtttga

SEQ ID NO: 43880 - protein, 824 aa, Agrobacterium tumefaciens str. C58
MSNSFDDMPFFDEEPVAPRRATNNAPSENGGGLGIAARAMAARDQVRPAHDYLSGLNPEQREAVETLDGPVLVLAGAGTGKTRVLTTRIAHILATGRAYPSQILAVTFTNKAAREMKERIGVLVGGAVEGMPWLGTFHSIGVKLLRRHAELIGLKSDFTILDTDDVVRLIKQLIQAEGLDDKRWPAKQFAGMIDGWKNKGLTPPDIPEGDSRAFANGKGRELYAAYQARLKTLNACDFGDLLLHPISIFRRHTDILKEYHQKFRYILVDEYQDTNTAQYMWLRLLAQRAKDEPQNVCCVGDDDQSIYGWRGAEVDNILRFDKDFPGAKVIKLERNYRSTEHILGAAGHLIAHNEGRLGKTLFTERSSPDDEKVVVHAAWDSEEEARAVGEEIEQLQRKNYKLNDMAILVRASFQMREFEDRFVTLGLNYRVIGGPRFYERLEIRDAMAYFRLVCQPADDLAFERIVNTPKRGLGDTTIRNLHDYARARDIPMLAAAADIIETDELKPKARKALFDVVQDFRRWQGLLENTEHTTLAEQILDESGYTAMWQADKTAEAPGRLENLKELIRSMESFESMRGFLEHVALVMDAEQNAELDAVSIMTLHSAKGLEFDTVFLPGWEEGLFPHQRALDEGGRSGLEEERRLAYVGITRAKKLCHIWFVSNRRIHGLWQSTLPSRFLDELPPAHVDVAASDSNYGGYGGRGGYGQSRFDKADPFTNNYSTPGWKRAQQNRSDATRDNWGTRSGHAVERIGYGESGPRTRTIDGELVAKSVADKPSKFFVGDRVFHLKFGNGNISAIEGNKLTINFDRAGEKRVLDGFVEKV

SEQ ID NO: 43881 - DNA, 2067 bp, Agrobacterium tumefaciens str. C58
  CDS (1)..(2067): transl_table=11
atggcggttgcctatctggacaagttgaacgagcagcagcgcaaggcggtggaacacggtgtcggcctggcggatggagagacggccggtccgctgctgatcattgccggcgccggttccggcaagaccaatacgctcgcccaccgcgtcgcccatctgatcgtgaatggcgccgatccccgccgcattctgctgatgacgttttcgcggcgggctgcctccgaaatgtcgcggcgtgtcgagcggatctgcaagcaggttatcggggcaaattcggcaatcatgaccgatgcactggcctggtcaggcacgtttcacggtatcggcgcacgcctgttgcgcatctatgccgaacagatcgggctcaatatcgatttcaccatccacgaccgcgaggacagcgccgacctgatgaaccttgtccggcacgaactcggtttttccaagacagaaagccgctttccaacgaaggggacatgccttgcgatctattcgcgcgccgtgaattcccagacgccgttaaaagacattcttcgccaacactatccatgggtcgccgactggcagagcgaactgaaggaactgtttgcagcctatgtcgaggccaagcagatccagaacgtgctcgattacgacgatctcctgctctactgggcgcagatggtcagcgatcccattctggctgatgatatcggcaaccgtttcgaccatgtgatggtggatgaatatcaggataccaaccggctgcaggcctcggtgctgatggcaatgaaacccggtggccgcggcctgaccgtggtgggcgacgatgcgcagtcgatctattcgttccgggccgcgacggtgcgcaacatcctcgattttccggcgtgcttcaacccggcggccgatatcatcacgctggatcgcaactatcgctcgacgcagcctattctggccgccgccaatggcgtcatcgacctggcgcgtgaacgttttaccaagaacctgtggacagagcggcagtcgctcgagcgcccgaagctcgtgacggtgaaggatgaaaccgaacaggcgaatttcatcatcgaccagattcttgccaatcgcgaaaccggcacgacgctgaaacagcaggccgtgctgttccgcacctctagccacagcggcccgctcgaagttgaactcacccgccgcaatatccccttcgtcaaattcggcggcctgaaattcctcgacagcgcccatgtaaaggacatgctggcggtgctccgtttcgcccagaacccgcgcgaccgcgtcgccggtttccggctgctgcagatgctgccaggcatcgggccgaagaaggccggcaatatcctcgatacgatagccccggacccggagcccctgcttgcccttgccgaaattccaccgccgccgaagaccggtgacgactggacggctttcacgcaattgctagtggggctgcggcggggcccgaacggctggccgggcgaaatcggcttggcgcgcctgtggtacgagccccatctcgaacgcatccatgaggatgccgacacccgcaaggccgatctgcagcaactcgagcagatcgccggcggctatccttcacgcgagcgttttctgaccgagctgacgcttgacccgccggacgccaccagcgatcaggccggcgtcccgcttctcgacgaagactatctcagcctctctaccatccattcggccaagggccaggaatggcgttccgtgttcatcctcaacgtggtcgatggctgtataccctccgacctcggggtcggcaccagccaggaactggaggaagagcgccggctactctacgtcgccatgacccgcgccaaggacaacctgtcgctgatcaccccgcaacgtttcttcactggtgggcagagttctcagggcgaccggcatgtctacgctgccagaacccgcttcataccggcgacattgctgcagttttttgagacgatgagctggccgttggtttcgattgcagcttcggagcggagcgctcagcagatccggattgatgtgggggcaaggatgcgggcgatgtggaagtaa

SEQ ID NO: 43882 - protein, 688 aa, Agrobacterium tumefaciens str. C58
MAVAYLDKLNEQQRKAVEHGVGLADGETAGPLLIIAGAGSGKTNTLAHRVAHLIVNGADPRRILLMTFSRRAASEMSRRVERICKQVIGANSAIMTDALAWSGTFHGIGARLLRIYAEQIGLNIDFTIHDREDSADLMNLVRHELGFSKTESRFPTKGTCLAIYSRAVNSQTPLKDILRQHYPWVADWQSELKELFAAYVEAKQIQNVLDYDDLLLYWAQMVSDPILADDIGNRFDHVMVDEYQDTNRLQASVLMAMKPGGRGLTVVGDDAQSIYSFRAATVRNILDFPACFNPAADIITLDRNYRSTQPILAAANGVIDLARERFTKNLWTERQSLERPKLVTVKDETEQANFIIDQILANRETGTTLKQQAVLFRTSSHSGPLEVELTRRNIPFVKFGGLKFLDSAHVKDMLAVLRFAQNPRDRVAGFRLLQMLPGIGPKKAGNILDTIAPDPEPLLALAEIPPPPKTGDDWTAFTQLLVGLRRGPNGWPGEIGLARLWYEPHLERIHEDADTRKADLQQLEQIAGGYPSRERFLTELTLDPPDATSDQAGVPLLDEDYLSLSTIHSAKGQEWRSVFILNVVDGCIPSDLGVGTSQELEEERRLLYVAMTRAKDNLSLITPQRFFTGGQSSQGDRHVYAARTRFIPATLLQFFETMSWPLVSIAASERSAQQIRIDVGARMRAMWK

SEQ ID NO: 43883 - DNA, 2037 bp, Corynebacterium glutamicum ATCC 13032
  CDS (1)..(2037): transl_table=11
gtgatcaatttgcaggacctcgacgaggatcaacgcatcgctgcttctgcgcctcgcggaccagtgtgcattctcgccggagccggcacgggtaaaactcgaacgattacttatcgcatcgcgcatctgattgatcagggttttgtgagcccgaatcgtgttcttgctgtgacgtttacatcccgcgcggcaggggagatgcgtcatcgcttgaatctcatggggatcggtggcgtgcaggcaaggacattccacgcagcagcgaggaagcagttgttgtatttctggcctcaggtggcgggtaatctgccgtggcgcctgttggataataagtttcaacttgtgggtcgtgcggttcgtggtgcgcggttggaatcgcagactgaaaaagttcgcgatattttgggtgaaattgagtgggcgaaggcgtcgttgattacacctgagcagtatccggatcgtttgggtacgaggacccctccggcgcccgcggagaaaatcgctgaggtgtatcagcgatacgaaaacatgaaggcaacccctgaggggatgttgcttgatttcgacgatctgttgcttcacaccgccggcgcgttggagaattccccggcggtggcggaggagttccgccagcagtatcgcagctttgtggtcgatgagtatcaggatgtgacgcctctgcagcagcgggtgctcgatgcgtggctcggcgatcgcgatgacctgacggttgtcggcgatgcgaaccagacgatttattcgttcacgggggcaacacctgaatttttgcttaatttctcgaggaaatatccggaggcaaccgtcgtcaagctgcagcgcgactaccgctcaacgccgcaggtcaccgcgctggccaataccgtcatcggccaggcgcgggggcgcgttgctggcacgcgcctggagcttcagggaatgcggatcgccgggccggagcccgaattttcggctttcgacgacgaacccaccgaagcccgcgaagttgcgggccgcattttgacgctgcttaaaaacggcgttcaggcctcagaaatcgccgttttgtaccgcatcaacgcgcagtcggcggttttcgagcaagcgcttgccgacgccggcatcgtatatcaggtgcgcggcggcgaaggctttttcacccgcccagaaattcgccaagccctgagtcaactgatccgcacttcccaacgcgacgtcgatgaaagcgatctggtgcgtctgacgcaacgcacactcgtgccacttgggttgagttcggaagagcccagcggtgcccaagagcgggaacgctggcaatcgctcaacgctttagtcgatctggtgaaagaccttgttaaagccacaccagatttggatctcacaggcttgctgctgaaacttcgggaacgccaagaggcgaagcatccgccgaccgtcgaaggtgtcaccttggcatcgctacacgcggcgaaaggcctcgaatgggatgcggtgtttcttgtcggacttgtcgattccacgttaccgatcagccacgccattaaatctggcgatgaagcaatcgaagaggaacgtcgcctgttctatgtcggtgtgacccgtgcccgcgaacacctccactgcagttgggcactcgcgaggcaagaaggcggacggaaatcgagaaagcggagtcgattcctcgatggcatagtcgtggagatggcctccgaatcgggcacacctcgcagcaatcgtccgaaaaactgccgagtgtgcggatcggttctttcaagccctgccgaaaaagctgtcggtcggtgtgcgagttgcccgatccaagcggatgaacgagtcttcgaacagctgcgaacgtggcgcaatgacaccgcgaagcgcgaaaacaaagcggcgtacatggtgttcagcaatgcaacgttgatggcgatcgctgaaatgaaccccaccaacgaaaacgaattgctcagcgtgccgggtgtggggccgatgaagatcgagaactatggcgatgacgtgctcgcgattttgggagcactttag

SEQ ID NO: 43884 - protein, 678 aa, Corynebacterium glutamicum ATCC 13032
MINLQDLDEDQRIAASAPRGPVCILAGAGTGKTRTITYRIAHLIDQGFVSPNRVLAVTFTSRAAGEMRHRLNLMGIGGVQARTFHAAARKQLLYFWPQVAGNLPWRLLDNKFQLVGRAVRGARLESQTEKVRDILGEIEWAKASLITPEQYPDRLGTRTPPAPAEKIAEVYQRYENMKATPEGMLLDFDDLLLHTAGALENSPAVAEEFRQQYRSFVVDEYQDVTPLQQRVLDAWLGDRDDLTVVGDANQTIYSFTGATPEFLLNFSRKYPEATVVKLQRDYRSTPQVTALANTVIGQARGRVAGTRLELQGMRIAGPEPEFSAFDDEPTEAREVAGRILTLLKNGVQASEIAVLYRINAQSAVFEQALADAGIVYQVRGGEGFFTRPEIRQALSQLIRTSQRDVDESDLVRLTQRTLVPLGLSSEEPSGAQERERWQSLNALVDLVKDLVKATPDLDLTGLLLKLRERQEAKHPPTVEGVTLASLHAAKGLEWDAVFLVGLVDSTLPISHAIKSGDEAIEEERRLFYVGVTRAREHLHCSWALARQEGGRKSRKRSRFLDGIVVEMASESGTPRSNRPKNCRVCGSVLSSPAEKAVGRCASCPIQADERVFEQLRTWRNDTAKRENKAAYMVFSNATLMAIAEMNPTNENELLSVPGVGPMKIENYGDDVLAILGAL

SEQ ID NO: 43885 - DNA, 2292 bp, Corynebacterium glutamicum ATCC 13032
  CDS (1)..(2292): transl_table=11
atgaatacttctccttttaccccaggttcccccgatctcatcgatggcttgaatgagcaacagcgtgctgctgtggagcatatcggttctccgctgctgattgtcgctggtgctggttcaggcaagactgctgtgttgaccaggcgtattgcttatttaatgcgttaccgtggtgtgcatccgcagcaaattttggccattacctttaccaataaggctgccgctgagatgcgtgagcgtgtcagtcagctggtgggcccggttgcggagcgcatgtgggtggctacgttccactcggtgtgtgtgcgtattttgcgtcagcaggcgcagttggtggaggggctgaacactaacttcactatttatgattcggatgattcgaggcgtttgctcacgatgatcgccaaggatctggagttggatattaagaagttctcggcgcgtacgttgctgggtgctatttctaatttgaaaaatgagttggttactccgcaggaggctcttgcggatgctgaacgcacgcacaatccttatgaaacagtcgtggccagggcgttttcggagtatcagagcaggcttcgccgtgccaacgctgtggattttgatgatttgattggggagactgttcggattttccgggagcatccacctgttgcggagtattaccgcagacgtttccgccacgtgctgatcgatgagtatcaggacaccaaccacgctcagtatgagctgatttctacgctcgtcggcaagcctgaccaggatccgtctgagctgtgtgttgtgggtgattcggatcagtctatttatgctttccgtggcgccacgatccgcaacattgaagagtttgagcgcgatttctccaacgcccgcaccattttgctggagcagaattaccgttccacccagacgattctttctgctgccaacgcggtgatttctcaaaatgagaaccgtcgacctaaaaacctgtggactgcgctgggggagggcgagcagatcattggttatgttgccgacaatgagcacgatgaagcccgttttattgctagtgagatcgacaatttagttgaccacggcatgagctattccgacatcgcgatcatgtaccgcacgaacaattcctcgcgcgcactagaggatgtcttcatgcgcaccggcgtcccctacaaagtagtcggcggcacgaagttctacgaacgcaaagaaatccgtgacatcatcgcttacctgcgcgttttagaaaaccccgatgacaccgtcaacctccgtcgcatcatcaacacccccaagcgcggcatcggcgatcgcgcgcaggcgttcatcgcgctgcacagcgagaacaatcagatcagcttcgggcaagcgcttctcgacgccgccctcggcaaggtcgacctgcttggagcgcgcggcaagaatgcggtgattaagttcaatgagcttttcgacgccctccgctccgaactccccaccatggtcaatgaggtcaccggcctgccagacatcggccaagtcatcagtcgcatcctcgacatcactggctacaaggcagaacttgaggcatccaacgaccctcaagatggcgcacgcctagacaacctgaacgagcttgtctccgtggcccgcgagttctcctccgacgccgcaaaccgcatggttaatgaagttccagaaggcgaagcccaaccgggcagcttacaggcattcttggagcgagtctccctggttgccgacgccgaccaaatccccgattccgacaacggcgtagtcaccctcatgaccctgcataccgccaagggccttgaattccccatcgtgttcctcacaggctgggaagacggacagttcccacacctgcgttcccttggtgatgccaaagaacttgccgaggaacgccgcctcgcctacgtgggtatcacccgcgcccgcaagcgcctctacatgaccagagccatgctgcgtagctcctggggcaacccggtgaccaacccaccgtcacgtttcctccaagaagtgcccgcagaactcatcgattggaggcgcgaagaaccccagatgtcttccgcctgggctcctcgacccacccgaagcatccccaccaaaactcgcaccaacaataagcagttggatctgtcggtgggggatcgcgtcaatcacgacaagtacggcttgggaaccgtgctctcttcagatggcagcggcccccgagccaccgtcaccatcgatttcggttcctccggcaaggttagattgatgcttcttggtggcgtcccgatggagaagctatag

SEQ ID NO: 43886 - protein, 763 aa, Corynebacterium glutamicum ATCC 13032
MNTSPFTPGSPDLIDGLNEQQRAAVEHIGSPLLIVAGAGSGKTAVLTRRIAYLMRYRGVHPQQILAITFTNKAAAEMRERVSQLVGPVAERMWVATFHSVCVRILRQQAQLVEGLNTNFTIYDSDDSRRLLTMIAKDLELDIKKFSARTLLGAISNLKNELVTPQEALADAERTHNPYETVVARAFSEYQSRLRRANAVDFDDLIGETVRIFREHPPVAEYYRRRFRHVLIDEYQDTNHAQYELISTLVGKPDQDPSELCVVGDSDQSIYAFRGATIRNIEEFERDFSNARTILLEQNYRSTQTILSAANAVISQNENRRPKNLWTALGEGEQIIGYVADNEHDEARFIASEIDNLVDHGMSYSDIAIMYRTNNSSRALEDVFMRTGVPYKVVGGTKFYERKEIRDIIAYLRVLENPDDTVNLRRIINTPKRGIGDRAQAFIALHSENNQISFGQALLDAALGKVDLLGARGKNAVIKFNELFDALRSELPTMVNEVTGLPDIGQVISRILDITGYKAELEASNDPQDGARLDNLNELVSVAREFSSDAANRMVNEVPEGEAQPGSLQAFLERVSLVADADQIPDSDNGVVTLMTLHTAKGLEFPIVFLTGWEDGQFPHLRSLGDAKELAEERRLAYVGITRARKRLYMTRAMLRSSWGNPVTNPPSRFLQEVPAELIDWRREEPQMSSAWAPRPTRSIPTKTRTNNKQLDLSVGDRVNHDKYGLGTVLSSDGSGPRATVTIDFGSSGKVRLMLLGGVPMEKL

SEQ ID NO: 43887 - DNA, 2496 bp, Streptomyces coelicolor A3(2)
  CDS (1)..(2496): transl_table=11
atgagcagcctctttgacgacagcttcctggcgagcctccagaccccccggggtcacgaggaggaacccccgccgccgcccgaggacgatcacggaccggagccggttccgcacgatctgttcggcgggaagttcgacgcgcccccgcagcgggacacccactaccgggacggcgccccgcgccccgccctggacgccgccgcgctcctggaggggctgaacgagaaccagcgggccgccgtcgtccactccggctccccgctgctcatcgtggccggcgccggctccggcaagacccgcgtcctcacccaccgcatcgcccacctgctggccgagcggaacgtccacccgggccagatcctcgcgatcaccttcaccaacaaggccgcgggcgagatgaaggagcgcgtcgagcagctcgtcggcccgcgcgccaacgcgatgtgggtgatgaccttccacagcgcgtgcgtgcgcatcctgcgccgcgagtcgaagaagctcggcttcacctcgtcgttctcgatctacgacgccgccgactccaagcggctcatggcgctggtctgccgcgacctggacctggaccccaagcgcttcccgcccaagtccttcagcgcgaagatcagcaacctgaagaacgagctgatcgacgaggaggacttcgccgcccaggccgccgacggtttcgagaagaccctcgcccaggcctacgccatgtaccagtcgcggctgcgcgaggccaacgccctcgacttcgacgacctgatcatgacgacggtcaacctgctgcgcgccttcccggacgtcgccgagcactaccgccgccgcttccggcacgtcctggtcgacgagtaccaggacaccaaccacgcccagtacgccctggtgcgcgagctggtcggcgtgccctcggagcaccccgtcgacgtgccgccggaggccgaggtgccgcccgccgagctgtgcgtggtgggcgacgccgaccagtcgatctacgccttccgcggcgccaccatccgcaacatcctccagttcgaggaggactacccggacgcgacgacgatcctgctggagcagaactaccgctccacccagaccatcctcagcgccgccaacgcggtcatcgagcgcaacgagtcccgccgccccaagaacctgtggaccaaccagggcagtggcgcgcagatcaccgggtacgtcgccgacaccgagcacgacgaggcgcagttcgtcgccgacgagatagaccgcctcaccgacgcgggcgaggccaaggccggcgacgtcgccgtcttctaccggaccaacgcccagtcccgtgtcttcgaagaggtcttcatccgcaccggcctgccctacaaggtcgtcggcggcgtccgcttctacgagcgcaaggaggtccgggacgtcctggcctacctgcgggtgctggccaacccggaggactcggtgccgctgcgccgcatcctcaacgtccccaagcgcggcatcggcgaccgcgcggaggcgatgatcgacgccctctcccagcgcgagaagatcagcttcccgcaggcgctcaggcgcgtcgacgaggcgtacggcatggccgcgcgctccgcgaacgccgtcaagcggttcaacacgctcatggaggacctccgtacgatcgtcgagtccggcgccggaccggcgaccgtcctggaggccatcctcgaacgcaccggctacctcgccgagttgcaggcctccaccgatccccaggacgagacccgcatcgagaacctccaggaactcgcggccgtcgccctggagttcgagcaggagcgggccgagggcgaggaggccgggacgctggccgacttcctggagaaggtcgcgctcgtcgccgactccgaccagatcccggacgaggaggacggcgacggcgtcgtcaccctgatgaccctgcacaccgccaagggcctggagttcccggtcgtcttcctcaccggcatggaggacggcgtcttcccgcacatgcgcgccctcggccaggccaaggagctggaggaggagcggcggctcgcctacgtcggcatcacgcgcgcccgcgagcggctctacctgacccggtcgacgctgcgcagcgcctggggccagccgtcgtacaacccgccctcgcggttcctggaggagatcccggccccgcacctggaatggaagcggaccggggcgaacggtcccgcgccttccgctccggtctcgggcgtggccgcctcgctgtcgtcgtcccggtcgcggtcccggtcctcggcgtcgggtgcgtccggcttcgccacgggcaggtcggccggcgccgagcagcccacggtctcgctggcggtcggcgaccgcgtcacgcacgaccagttcgggctcggcacggtggtcggcgtcaagggctccggttcgaacgcggaggcgacgatcgacttcggggacaccaagccgaagcggctgctgctgcggtacgcgccggtggagaagctctga

SEQ ID NO: 43888 - protein, 831 aa, Streptomyces coelicolor A3(2)
MSSLFDDSFLASLQTPRGHEEEPPPPPEDDHGPEPVPHDLFGGKFDAPPQRDTHYRDGAPRPALDAAALLEGLNENQRAAVVHSGSPLLIVAGAGSGKTRVLTHRIAHLLAERNVHPGQILAITFTNKAAGEMKERVEQLVGPRANAMWVMTFHSACVRILRRESKKLGFTSSFSIYDAADSKRLMALVCRDLDLDPKRFPPKSFSAKISNLKNELIDEEDFAAQAADGFEKTLAQAYAMYQSRLREANALDFDDLIMTTVNLLRAFPDVAEHYRRRFRHVLVDEYQDTNHAQYALVRELVGVPSEHPVDVPPEAEVPPAELCVVGDADQSIYAFRGATIRNILQFEEDYPDATTILLEQNYRSTQTILSAANAVIERNESRRPKNLWTNQGSGAQITGYVADTEHDEAQFVADEIDRLTDAGEAKAGDVAVFYRTNAQSRVFEEVFIRTGLPYKVVGGVRFYERKEVRDVLAYLRVLANPEDSVPLRRILNVPKRGIGDRAEAMIDALSQREKISFPQALRRVDEAYGMAARSANAVKRFNTLMEDLRTIVESGAGPATVLEAILERTGYLAELQASTDPQDETRIENLQELAAVALEFEQERAEGEEAGTLADFLEKVALVADSDQIPDEEDGDGVVTLMTLHTAKGLEFPVVFLTGMEDGVFPHMRALGQAKELEEERRLAYVGITRARERLYLTRSTLRSAWGQPSYNPPSRFLEEIPAPHLEWKRTGANGPAPSAPVSGVAASLSSSRSRSRSSASGASGFATGRSAGAEQPTVSLAVGDRVTHDQFGLGTVVGVKGSGSNAEATIDFGDTKPKRLLLRYAPVEKL

SEQ ID NO: 43889 - DNA, 2358 bp, Streptomyces coelicolor A3(2)
  CDS (1)..(2358): transl_table=11
atgaggtcgcacggagtgaacgtccgtggcggcacgaccattcccgtcgcgcactcgcaccgcgtgatgcctgtcgcattgatacgactgtcagtgcgtgcctgtggacaaccgactcacccgtcccgcgagacctggcagcatggcggtgtgacagcagcaacgcactccaccctcttcccgcaggtaccggactcggccgacgcggtgctcgaagggctcgacctcgagcagcgcgaggtggcgaccgccctgcgcggcccggtgtgcgtgctggcgggagccggcacgggcaagacccgcgcgatcacccatcgcatcgcctacggggtgcgcgccgggatcctccagccttccagcgtgctcgccgtcaccttcaccaaccgtgcggccggcgagatgcgcggtcggctgcgccagctcggcgcctccggtgtgcaggcccgcaccttccactcggcggcgctgcgacagctccagtacttctggccgaaagcgatcggcggttccctgccccggctcgtcgaccgcaagatccagctcgtcgccgacgcggccgccgcctgccgcatccgcctcgaccgcggcgagctgcgtgacgtcaccgcggagatcgagtggtccaaggtgacccagacggtgcccgccgactacgccccggcggctgccaaggccggccgtgaggcgccccgcgacccggcggagatcgcgcagctgtacgccgcctacgaggacctcaagcgtgcgcgctccgtcatcgacttcgaggacgtgctgctgctgacggtggccgtcctccaggaccggcacgatgtcgccgagcaggtccgcgcccagtaccagcacttcgtggtcgacgagtaccaggacgtcagccccttgcagcagcgtctgctggagctgtggctcggggaccgcgacgacctgtgcgtggtcggcgacgccagccagacgatctattcgttcacgggagcaacccccgaccatctgctcgacttccgcggccgccaccccggcgccaccgtcgtcaagctggtccgcgactaccgttccaccccccaggtcgtccacctcgccaacggcctgctcgcccaggcccggggccgggccgccgatcaccgcctggagctggtctcccagcggcccgcgggccccgagcccggctacgccgagtactccgacgagccggccgaggccgagggcgccgcccgccgcatccgcgaactcatcgactcgggcgttccggccgccgagatcgcggtcctgttccggaccaactcccagtcggagacctatgagcaggcactcgccgacgccggggtcccgtaccagttgcggggcgcggagcgcttcttcgaccggcccgaggtgcgcaaggccggcagtgccctgcgggccgccgcccgcttcggcggcaacgactccctcctcgacgacgccgtcgacctgccctcgcaagtgcgcgcggtgctgtccggggagggctggacgacccagcccccggccgggtcgggcgccgtccgggagcggtgggagtcgctggccgccctggtgggactggcccaggacttcgccgccgccagagcgggagccacgctgagcgacctcgtcgtggaactcgacgagcgcgcgggcgcccagcacgccccgacggtgcagggcgtcaccctcgcctccctgcactcggccaagggcctggagtgggacgtcgtgttcctggtcggcgtcgccgagggcatgatgccgatcacctacgcaaagaccgacgagcagatcgaggaggaacgtcgccttctctacgtcggtgtcacccgcgcgcgtgaacgcctgcacctgtcctgggcactggcccggtcgcccgggggccggccgaaccgcaggcccagccgctttctgaaggggctgcggcccggttcgggcacggcgggcggacaggcggccgccgcgggtgccgggggcgtggagcgcgggatccgagggggcggcggtggtggcgcggccgccgcgccgagacggacccagcggacgcccgcccgctgccgggtctgcggacgcacgctcaccgacgccggtgagatgaagctgatgcgctgcgaggggtgcccgtcagacatggacgagggcgtctacgagcggttgcgggagtggcgggcggtgcaggcggggcgcagcggacagcccgcgttctgcgtcttcaccgacaagacgctgatggcgatcgccgagtccgtcccggaggacgagcgggagctggccaggatcccgggggtcgggatgcgcaagctcaatcgctacgggaccgacgtcctggccatctgcgcaggccaggaaggcgtggggcttgacgaggacgactga

SEQ ID NO: 43890 - protein, 785 aa, Streptomyces coelicolor A3(2)
MRSHGVNVRGGTTIPVAHSHRVMPVALIRLSVRACGQPTHPSRETWQHGGVTAATHSTLFPQVPDSADAVLEGLDLEQREVATALRGPVCVLAGAGTGKTRAITHRIAYGVRAGILQPSSVLAVTFTNRAAGEMRGRLRQLGASGVQARTFHSAALRQLQYFWPKAIGGSLPRLVDRKIQLVADAAAACRIRLDRGELRDVTAEIEWSKVTQTVPADYAPAAAKAGREAPRDPAEIAQLYAAYEDLKRARSVIDFEDVLLLTVAVLQDRHDVAEQVRAQYQHFVVDEYQDVSPLQQRLLELWLGDRDDLCVVGDASQTIYSFTGATPDHLLDFRGRHPGATVVKLVRDYRSTPQVVHLANGLLAQARGRAADHRLELVSQRPAGPEPGYAEYSDEPAEAEGAARRIRELIDSGVPAAEIAVLFRTNSQSETYEQALADAGVPYQLRGAERFFDRPEVRKAGSALRAAARFGGNDSLLDDAVDLPSQVRAVLSGEGWTTQPPAGSGAVRERWESLAALVGLAQDFAAARAGATLSDLVVELDERAGAQHAPTVQGVTLASLHSAKGLEWDVVFLVGVAEGMMPITYAKTDEQIEEERRLLYVGVTRARERLHLSWALARSPGGRPNRRPSRFLKGLRPGSGTAGGQAAAAGAGGVERGIRGGGGGGAAAAPRRTQRTPARCRVCGRTLTDAGEMKLMRCEGCPSDMDEGVYERLREWRAVQAGRSGQPAFCVFTDKTLMAIAESVPEDERELARIPGVGMRKLNRYGTDVLAICAGQEGVGLDEDD

SEQ ID NO: 43891 - DNA, 2187 bp, Xanthomonas campestris pv. campestris str. ATCC 33913
  CDS (1)..(2187): transl_table=11
gtggatgtctctcatttgctcgatcatttaaaccccgcccagcgcgaggccgtttccgcgccgccggggcattaccttgtgctggccggcgccggctccggcaagacgcgcgtgctgatccatcgcattgcctggctcaatgaagtccagggcgtgccaaaccacggcatcttcgcggtgaccttcaccaacaaggccgccggcgaaatgcgccaccgcaccgacctgcaactgcgcaacggcagccgcgggatgtggatcggcaccttccatgggctggcccatcgcctgctgcgcctgcactggcaggacgcgcggctgccggaaggcttccaggttatggacagcgacgaccagctacggctggtcaagcgcgtggtgcagtcgctggagctggacgagaccaagtatccgcccaagcagatgggctggtggatcaacgagcagaaggacgaaggccgccgcccgcaacacatccagcccgagcccaacgacgactggaccgaggtgcgccggcaggtgtacgccgcctaccaggaacgctgcgaccgctccgggctgctggatttcgccgagctgctgctgcgcgcgcacgaattactgcgcgacaccccggccttgctggcgcattaccgcgcgcgcttccgcgaaattctggtcgacgagttccaggacaccaacgccatccagtacgccttcgtgcgcgtgcttgccggcgagagcggccacgtattcgtggtgggcgacgacgaccaggccatctacggctggcgcggtgccaaggtcgagaacgtgcagcgcttcctcaaggatttccccggtgcgcagacggtgcggctggagcagaactaccggtccagcgccaatattctgggcgcggccaatgcggtgatcgcgcataaccccgaccgcatcggcaagcagttgtggaccgattccggcgatggcgacccgatcgatctgtacgcggcctacaacgaagtcgacgaggcccgctatgtagtcgagcgcgcgcgccagtgggtgcgcgatggcggcagctatggcgaagtggcggtgctctatcgcagcaatgcgcaatcgcgcgcgctggaagaagcactgattgccgaacaactgccgtaccgcgtgtatggcggcatgcgctttttcgaacgcgccgaaatcaaggacgcgctggcgtacctgcgcatgctcaccaaccgcagcgacgatgcggcgttcgagcgcgcggtcaacacgcccacgcgtggcattggcgatcgcaccctggatgaagtgcgccggctggcacgcgccaatgcgctgtcgctgtgggaagcggcaatgctgtgcacgcaggaaaatactcttgcggcgcgtgcacgcaatgcgctggctacgttcctgagcctggtcggccagctgcaggccgaaaccggcgagatggacctggccgagcgcatcgaccatgtgctgatgcgctcgggcctgcgcgagcattgggccaaggaaagccgcggcgggctggattcggaatcgcgcaccgagaacctggacgaactggtctcggtggcctcgcgcttcacccgcccggacgatgaagacagccagggcatgaccgaactggtggccttcctcgcctacgcctcgctggaagccggcgaaggccaggcgcaggccggcgaagaaggcgtgcagctgatgacgttgcactcggccaagggcctggaatttccgatcgtgttcctggtcgggctggaagacggcctgttccccagcgcacgctcgctggaagaaagcggccggctcgaagaagaacgccgcctggcctacgtgggtatcacccgcgcgcgccagaagctggtgctgtgctacgccgaatcgcggcgcatccacggccaggacaactacaacgtgccgtcgcgctttctgcgcgagatcccgcgcgacctgctgcatgaagtgcggcccaaggtgcaggtctcgcgcaccgcctcgctgggcgccgcacgcggcggcccggtacatgccgtggtggacgccgcgccgatcaagctcggcgccaatgtcgaacaccccaagttcggtggcggcgtggttgtcgactacgaaggcgccggcgcgcatgcacgcgtgcaggtgcaattcgatgaagtgggcgccaagtggctggtgatggcgtacgcgaatctgacggtggtgtag

SEQ ID NO: 43892 - protein, 728 aa, Xanthomonas campestris pv. campestris str. ATCC 33913
MDVSHLLDHLNPAQREAVSAPPGHYLVLAGAGSGKTRVLIHRIAWLNEVQGVPNHGIFAVTFTNKAAGEMRHRTDLQLRNGSRGMWIGTFHGLAHRLLRLHWQDARLPEGFQVMDSDDQLRLVKRVVQSLELDETKYPPKQMGWWINEQKDEGRRPQHIQPEPNDDWTEVRRQVYAAYQERCDRSGLLDFAELLLRAHELLRDTPALLAHYRARFREILVDEFQDTNAIQYAFVRVLAGESGHVFVVGDDDQAIYGWRGAKVENVQRFLKDFPGAQTVRLEQNYRSSANILGAANAVIAHNPDRIGKQLWTDSGDGDPIDLYAAYNEVDEARYVVERARQWVRDGGSYGEVAVLYRSNAQSRALEEALIAEQLPYRVYGGMRFFERAEIKDALAYLRMLTNRSDDAAFERAVNTPTRGIGDRTLDEVRRLARANALSLWEAAMLCTQENTLAARARNALATFLSLVGQLQAETGEMDLAERIDHVLMRSGLREHWAKESRGGLDSESRTENLDELVSVASRFTRPDDEDSQGMTELVAFLAYASLEAGEGQAQAGEEGVQLMTLHSAKGLEFPIVFLVGLEDGLFPSARSLEESGRLEEERRLAYVGITRARQKLVLCYAESRRIHGQDNYNVPSRFLREIPRDLLHEVRPKVQVSRTASLGAARGGPVHAVVDAAPIKLGANVEHPKFGGGVVVDYEGAGAHARVQVQFDEVGAKWLVMAYANLTVV

SEQ ID NO: 43893 - DNA, 2169 bp, Yersinia pestis KIM
  CDS (1)..(2169): transl_table=11
gtgcctatggacgtttctgatctgctcgacagcctgaatgaaaaacaacgtgacgccgtggccgcgccgcgcggcaacttgttggtactggccggtgcaggcagtggcaaaacgcgggtgctggttcaccgtatcgcctggctgttgtcggtagagaatgcctcgccgtattcgattatctcggtaacctttaccaataaagcggcggctgaaatgcgccaccgtattgaacatctgattggcaccagccaaggcgggatgtggatcgggactttccacggtttggcgcaccgtctgctacgtgctcaccatctggatgccaatctgccacaagattttcaaatcctggatagcgatgaccaactgcggttattgaaacgcctggtcaaagcactcaatttggatgagaaacaatggcccccgcgtcaggcgatgtggtacatcaacggcaaaaaagacgaagggctgcgcccgcaacatattgagagctacggtaatccggttgaggccacctggctacgtatctatcaggcttatcaggaagcgtgcgaccgcgcgggtctggttgattttgccgagctgttgctacgagcgcacgagctgtggctgaacaaaccacatattcttaatcattatcgtgaacgctttaccaacattttggtggatgagtttcaggataccaacaacatccaatatgcctggatccgcttgttggccggtgaacgttccaatgtgatgatcgtcggcgacgatgaccagtcaatctatggttggcgcggcgcgcaggtcgagaatatccaacgtttcttgaaggatttccccggtgcggagaccatccgcctggagcagaattaccgctcgaccagcatcattctggctgccgccaatgccctgattgccaacaatgacggccgcatgggtaaaaatctgtggaccgatggcgcggagggcgaacctatctccctctattgtgcgtttaacgagttagatgaagcccgttttgtggtcaatcgtatcaaagcctggcaggacaacggcggtgcgctgaatgattgtgccattttgtaccgtagcaacgcccaatcgcgcgtattagaagaagcgttactgcaaacggcaaccccgtaccgtatttatggggggcagcgcttcttcgaccgccaggaaattaaagactcactggcttatctgcgcctgatctccaatcgtaatgacgacgccgcgtttgaacgggtggtgaatacacccactcgggggattggcgatcgcacattggatgtggtgcgtcaaaccgcccgtgaccgccagttaacgctatggcaatcaacccgtgccatgttgcaggaaaaagtgctggcagggcgtgccgcgtccgcattacaacgctttgtcgagctgatcgattcactggcgcgcgaaacggctgatatgccgctacacgtgcaaactgatcgcgttattcgtgattctggcttgtggtcgatgtacgaacaggaaaaaggcgagaaaggtcaggcacgtatcgagaaccttgaagagctggttacggcgacccgtcaatacagctatcaggatgaagatcaggatctgatgccgctacaggccttcttatcccatgcggcactggaagccggagatggccaggccgatgcctatcaggatgcggtgcaattaatgactctccattcagcgaaaggcttggagtttccacaggtatttattgtgggaatggaagaagggatgttcccgagccaaatgtcattggatgagggggggcgtttggaagaggagcggcgtttggcctacgtggggttaacccgtgcgatgcagaaactgacgttatgttacgccgaaagccgccgcctatacggtaaagaggtcaatcaccgcccttcacgctttatcggcgaactgccgcaggagtgcgtcgaagaggtccggctgcgcgccagtgtttcccgcccggtgaatcaccgccgaatggggactccgatgcacgagaatgacagcggtttctcattgggccagcgagtgcggcaccctaaatttggcgagggtactattgtgaatttggaaggcagtggtgagcacaaccggttgcaggttgccttccccggagaggggattaagtggctggtcgcggcctatgcgcgtctggaacccgtgtaa

SEQ ID NO: 43894 - protein, 722 aa, Yersinia pestis KIM
MPMDVSDLLDSLNEKQRDAVAAPRGNLLVLAGAGSGKTRVLVHRIAWLLSVENASPYSIISVTFTNKAAAEMRHRIEHLIGTSQGGMWIGTFHGLAHRLLRAHHLDANLPQDFQILDSDDQLRLLKRLVKALNLDEKQWPPRQAMWYINGKKDEGLRPQHIESYGNPVEATWLRIYQAYQEACDRAGLVDFAELLLRAHELWLNKPHILNHYRERFTNILVDEFQDTNNIQYAWIRLLAGERSNVMIVGDDDQSIYGWRGAQVENIQRFLKDFPGAETIRLEQNYRSTSIILAAANALIANNDGRMGKNLWTDGAEGEPISLYCAFNELDEARFVVNRIKAWQDNGGALNDCAILYRSNAQSRVLEEALLQTATPYRIYGGQRFFDRQEIKDSLAYLRLISNRNDDAAFERVVNTPTRGIGDRTLDVVRQTARDRQLTLWQSTRAMLQEKVLAGRAASALQRFVELIDSLARETADMPLHVQTDRVIRDSGLWSMYEQEKGEKGQARIENLEELVTATRQYSYQDEDQDLMPLQAFLSHAALEAGDGQADAYQDAVQLMTLHSAKGLEFPQVFIVGMEEGMFPSQMSLDEGGRLEEERRLAYVGLTRAMQKLTLCYAESRRLYGKEVNHRPSRFIGELPQECVEEVRLRASVSRPVNHRRMGTPMHENDSGFSLGQRVRHPKFGEGTIVNLEGSGEHNRLQVAFPGEGIKWLVAAYARLEPV

SEQ ID NO: 43895 - DNA, 2322 bp, Thermosynechococcus elongatus BP-1
  CDS (1)..(2322): transl_table=11
atgggcagtgattttctcacaggactcaatccctcacagcggcaggcggtggagcactactcgggtcccctgttggtggtggcaggggccggttctgggaaaacgcgcacgctcacctatcgaattgcccatttgattcgccatcatcaggtcgcaccagagcatatcttggcggtgacgtttaccaataaggccgcccgcgagatgaaggagcggattgaaaccctttttagccaagagatggcccagcaactctacggcagagactggctggatctgtcccctgcagaacagcggcgggtgcgatcgcgcgtctatcacacctacacccagcccctatggattggcaccttccacagcctgtgtgctcgactcctgcgcttagaaattgaggcctatcaacatccccaagggtatcgctggacgcggcatttcacaatttttgatgagtcggacgtccaaagcctaattaagcaaattgttaccggtgaactcaatctcgatgagcgcaggtatgatccgcgtgctatccgctacaaaattagccatgccaaaaaccgcggactcagcccagatcaattggcgcaggaacagcgatcgcctgctggccgtgtagcagcagaggtttatcgttgctatgaagccgctcttgccaagaataatgccctggattttgatgatttaattttgcgaaccgtgcatctgctgcaacagcgccctgagcgtcttgactattggcatcagcagttccagcatatcctggtggatgagtaccaagataccaaccgcacccaatacgatttcattcggctgttggccaccaatggcactcccccccaagagtttcggaattggggcaatcgctcaatttttgtcgtgggtgatgtggatcaatccatctattcatttcgctgcgctgatttcacaatcctgatgaatttccagcaggattttggcgatcgcctacccgatcagcagacccgcaccatgatcaagttggaagaaaactatcgctccgtcgccaacattttgcaggccgccaattatctcattgagcacaacagtgaacgcattgataaagtgctacgtcccaccaaggctcctggtccccccattcactgtgagtgttgcgacaccgaaaccgatgaagcctatttcattacccaacagattaaggccttgggcagtcaatccctcgagccccagtggggacggtttgcgattctctaccgtaccaatgcccaatctcgcccctttgaggaggctttagttcgcgcaaatatcccctacaccgtggtcggtggcctcaagttctatgagcgcaaggaagtcaaggatattctcgcctacctgcgcctgctgcaaaaccctcaagacaccgtgagtctgcggagaattattaatattccacgacgcggcattggtaaaaccagtttggatcgcctcagtgacgctgcccaaacccttggcatttccctgtgggacttaattgctgatactgaatctatgacaccgttggcggggcgagccagccgggcagtgcagcagtttgtgaccctcataactcgcctgcgatcgctagtggacgatattgaactccctgaactggtgaaaaccgtgattgaagagacaggctaccgccgcgaactggaaaacgaaggcaccgacgaaagcttagagcgactgcaaaacctgatggaactggtcaacgctgcccagcaatttagcgaagacaatgagggggccagcctcagcgattttctcaacagttctgcccttgcctcagatttggataccttgcaagagggagagggggttgtctccctaatgaccttacatgctgccaagggactggaatttcccgttgtctttttagtggggatggagcaaggactgtttcccaacttccgcagtctcaacgaccccatggccctagaagaggaacgccgcctctgctatgtgggcattacccgtgcccaggagcgcctctttctcacctttgcccaaagccgtcgtctctacggtggcagggaagacacaatgccatcgcaatttctgacggagctacccccagaactgctcacggggaatgttcaacgacgccccccaaggaccgctgtcacgacggtatccccgtcgcggttgagcaaggctgcggcctctccttggcgggtgggcgatcgcattctccatcccgtctatggcgaaggggaaattacccatgtctttgatactggtccgaaactctccttggctattcgtttcccacgtcgcgggcaaaaggtcgttgatccccggctgacaccccttgagcggttgtaa

SEQ ID NO: 43896 - protein, 773 aa, Thermosynechococcus elongatus BP-1
MGSDFLTGLNPSQRQAVEHYSGPLLVVAGAGSGKTRTLTYRIAHLIRHHQVAPEHILAVTFTNKAAREMKERIETLFSQEMAQQLYGRDWLDLSPAEQRRVRSRVYHTYTQPLWIGTFHSLCARLLRLEIEAYQHPQGYRWTRHFTIFDESDVQSLIKQIVTGELNLDERRYDPRAIRYKISHAKNRGLSPDQLAQEQRSPAGRVAAEVYRCYEAALAKNNALDFDDLILRTVHLLQQRPERLDYWHQQFQHILVDEYQDTNRTQYDFIRLLATNGTPPQEFRNWGNRSIFVVGDVDQSIYSFRCADFTILMNFQQDFGDRLPDQQTRTMIKLEENYRSVANILQAANYLIEHNSERIDKVLRPTKAPGPPIHCECCDTETDEAYFITQQIKALGSQSLEPQWGRFAILYRTNAQSRPFEEALVRANIPYTVVGGLKFYERKEVKDILAYLRLLQNPQDTVSLRRIINIPRRGIGKTSLDRLSDAAQTLGISLWDLIADTESMTPLAGRASRAVQQFVTLITRLRSLVDDIELPELVKTVIEETGYRRELENEGTDESLERLQNLMELVNAAQQFSEDNEGASLSDFLNSSALASDLDTLQEGEGVVSLMTLHAAKGLEFPVVFLVGMEQGLFPNFRSLNDPMALEEERRLCYVGITRAQERLFLTFAQSRRLYGGREDTMPSQFLTELPPELLTGNVQRRPPRTAVTTVSPSRLSKAAASPWRVGDRILHPVYGEGEITHVFDTGPKLSLAIRFPRRGQKVVDPRLTPLERL

SEQ ID NO: 43897 - DNA, 2646 bp, Bifidobacterium longum NCC2705
  CDS (1)..(2646): transl_table=11
gtgtacgacgagccggaagtcatcgcacgcagcgcacaggaactcgtgggcgacctgaacccgcagcaggcggaagccgtgcaataccgcggtcaggcgctgctgatcggagccggtgcaggctccggcaaaacccgcgtgctgacccgccgcatcgcctggatcttgagccagttcggcgcatggccgagccagattctagccatcaccttcaccaacaaggccgccgccgaaatgcgcgaaagactcggctcgctgatcggcccggtggcccagcgcatgtgggtctccaccttccactccgcctgcgtgcgcattctgaggcgcgacggcaagtccatcggactcaagtccggcttctccatctacgattccgccgactccgagcgactcgtcaaaatcatcgccaccgaattcaacctcgacatcaagcgctacactccacgctcgattctcggccatatctccgacctcaagaacaatctgaccggttggaaggaaaacctcgccgttcacgcgcccgacttcacgcccggccagcgcggctaccagttcggcacggtgggcgaccttgaagccatctacgcggtgatctacgccgaatacgagcatcgcttggccctggccaacgccgtcgacttcgacgatctgatcggccgcacggtcgagttgctgcgcactgacccggccgtcgccgagtactaccatcaccgcttccgttacattctggtcgacgagtatcaggacaccaaccacgcccagtacgtgctcgtgcgcgagctggccggcgtggacacgggggagaaggccatcccgggcgcgcctaacgccggcaagtccggccccgcctggatcaccgtggtgggcgattccgaccagtccatctacgcgttccgtggtgccgacatccgcaacattcaggacttcgagcaggacttcccgaacgccaagaccatcatgctcgaacagaactatcgttcgacgcagaccattctggatgcggccaacgcggtgatcagcaacaacgagggccgcaagcccaagaaactgtggaccgcgctcggcaagggcgagccgatcgtcggctacgcggcggacaacgcccagcaggaggcccagtgggtggccaccgaaatcgcgcgcctgcacgccgaagcgggcatcgcctactccgacatggcgatcatgtaccgcgccaacgcccaatcccgctcgctcgaagaggcgctgatcaacacgaatcagccgtatcagctcgtcggcggcaccaagttctacgaacgtcgcgaaatcaaggatgcgctggcctatttgcaggcgctcgtcaatccggacgacgatgtgaatctacgccgtattctcaacgtgcccaagcgtgggcttggcgaccgcgccgaaggcgtgctgctcgcctacgcgcgcgagcatggcaccagcttcttctacgcactcatgcacttggatgagatcgaggtgccgacacgcaccgccacctcgctacgagcattccgcgatctgatgggcgcgctctcgcagttcacgcgcgcgcacgactccaagcccagcgagatcgtggccgaagtattggagaagtcgggcttaagggccgaactcgagaaatccgtggacccgcaggacgcctcccgtctggagaacctctcccagctgcagtccactgccgccgaattcgaacagaacacgcctgacgccacgttgtccgcattcctggagaccaccgcgcttgtggccgactccgaccaactacccggcgaggcggaggactccggcaaggtgacgcttatgaccttgcacaccgccaagggcctcgaatacccggtggtgttcctgaccggcatggaacagggcaccttcccgcattcgcgttcgatggaagacaccactgaactgcaggaggaacgccgactcgcctatgtgggcatcacgcgcgccaagcagcgactgtatgtcacgcgcgccgccgtccgctcccagtggggccaggccgccgatatgatgcccagccagttcctcgacgagattccggattcgctgattgattggaaacgccgtgaagccggcgtggagcgtatgcgcgccagctgggagaccgatggattcgccgacgatttgggcggctgggatgatgacgatttcggcggcgccgcgtttggcgggtcgtcgacgttcggctcgcgtggttcgtccggttcgggttcgtcctatgggtcgcggtcgcggtatgggtcgtcgtatggctcgggttccggctcttcgtcgtatggttcccgttcatcgtcgtatggttcccgctccggctcgtcctcctatggttcccgctcccgttcccgtcccggttcttcgtccggttcatatggtggcacccgtggcggcaaggtcaccacgcgccgtaccgcaccgaaatccgattcgaccggctctgccgtgcctagctcgaagctcaccaaggacaatggcctgaatatcgccgacttcgccgtgggcgacatgatcagccacgaccagtacggtctcggcaaggtcaccgacgcacaagacaagggccgcaattcggtaatcaccgtggacttcggctccgccggcgtcaaacgcctcatgctccgcgtagcgccgattgagaagttgtag

SEQ ID NO: 43898 - protein, 881 aa, Bifidobacterium longum NCC2705
MYDEPEVIARSAQELVGDLNPQQAEAVQYRGQALLIGAGAGSGKTRVLTRRIAWILSQFGAWPSQILAITFTNKAAAEMRERLGSLIGPVAQRMWVSTFHSACVRILRRDGKSIGLKSGFSIYDSADSERLVKIIATEFNLDIKRYTPRSILGHISDLKNNLTGWKENLAVHAPDFTPGQRGYQFGTVGDLEAIYAVIYAEYEHRLALANAVDFDDLIGRTVELLRTDPAVAEYYHHRFRYILVDEYQDTNHAQYVLVRELAGVDTGEKAIPGAPNAGKSGPAWITVVGDSDQSIYAFRGADIRNIQDFEQDFPNAKTIMLEQNYRSTQTILDAANAVISNNEGRKPKKLWTALGKGEPIVGYAADNAQQEAQWVATEIARLHAEAGIAYSDMAIMYRANAQSRSLEEALINTNQPYQLVGGTKFYERREIKDALAYLQALVNPDDDVNLRRILNVPKRGLGDRAEGVLLAYAREHGTSFFYALMHLDEIEVPTRTATSLRAFRDLMGALSQFTRAHDSKPSEIVAEVLEKSGLRAELEKSVDPQDASRLENLSQLQSTAAEFEQNTPDATLSAFLETTALVADSDQLPGEAEDSGKVTLMTLHTAKGLEYPVVFLTGMEQGTFPHSRSMEDTTELQEERRLAYVGITRAKQRLYVTRAAVRSQWGQAADMMPSQFLDEIPDSLIDWKRREAGVERMRASWETDGFADDLGGWDDDDFGGAAFGGSSTFGSRGSSGSGSSYGSRSRYGSSYGSGSGSSSYGSRSSSYGSRSGSSSYGSRSRSRPGSSSGSYGGTRGGKVTTRRTAPKSDSTGSAVPSSKLTKDNGLNIADFAVGDMISHDQYGLGKVTDAQDKGRNSVITVDFGSAGVKRLMLRVAPIEKL

SEQ ID NO: 43899 - DNA, 2163 bp, Shigella flexneri 2a str. 301
  CDS (1)..(2163): transl_table=11
atggacgtttcttacctgctcgacagccttaatgacaaacaacgcgaagcggtggccgcgccacgcagcaaccttctggtgctggcgggcgcgggcagtggtaagacgcgcgtactggtgcatcgtatcgcctggctgatgagcgtggaaaactgctcgccatactcgattatggctgtgacgtttaccaacaaagcggcggcggagatgcgtcatcgtatcggacaactgatgggcaccagccagggcggcatgtgggtaggcaccttccacgggctggcgcaccgcctgctgcgtgcgcaccatatggacgccaatctgccgcaggatttccagatcctcgatagcgaagaccagctacgcctgcttaagcgtctgatcaaagccatgaacctcgacgagaagcagtggccgccgcgccaggcaatgtggtacatcaacagccagaaagatgaaggcctgcgtccgcatcatattcaaagctacggtaatccggtggagcagacctggcagaaggtgtatcaggcgtatcaggaagcgtgcgatcgcgcgggcctggtggacttcgccgagctgctgctgcgcgctcacgaactgtggcttaacaagccgcatatcctacaacactaccgcgaacgttttaccaatatcctggtggacgaattccaggataccaacaacattcagtacgcgtggatccgcctgctggcgggcgacaccggcaaagtgatgatcgtcggtgatgacgaccagtcaatctacggctggcgcggggcgcaggtggagaatattcagcgtttccttaatgatttccccggtgccgaaattattcgtctggagcaaaactaccgctctaccagcaatattctgagcgccgctaacgccctgattgaaaacaataacgggcgtctgggtaaaaaactgtggaccgatggcgcggacggtgagcctatttccctctattgcgcttttaacgaactcgatgaagcgcgttttgtggttaaccgcatcaaaacctggcaggacaacggcggggcgcttgccgagtgcgccattctctaccgcagtaacgcccagtcgcgtgtgctggaagaagcactgttgcaggcgagtatgccgtaccgtatttacggcgggatgcgcttcttcgaacgccaggaaatcaaagatgcgctctcgtatctgcgcctgattgccaaccgtaacgacgacgcggcctttgagcgtgtggtgaatacgccaacgcggggtattggtgaccggacgctggacgtggtacgtcagacatcgcgcgatcgccagttaacactctggcaggcatgtcgtgaactgttgcaggaaaaagccctcgccggacgtgctgccagcgccttacagcggtttatggaactgatcgacgccttagcgcaggaaactgccgatatgccgctgcatgtacagactgaccgggtaattaaagactccggcctgcgtaccatgtacgagcaggagaagggcgaaaaaggtcagacgcgtatcgaaaacttagaggaactggtgacggcaacgcgccagttcagctacaacgaagaagacgaagatttaatgccgctgcaggcgttcctatcccatgcggcgctggaagcaggcgaagggcaggcggatacctggcaggatgcggtacaactgatgaccatgcactcggcgaaaggtctggagttcccgcaggtgtttatcgtcggtatggaagagggcatgttcccaagccagatgtcgctggatgaaggcgggcgtctggaagaagaacgccgtctggcctacgttggcgtaacccgcgcgatgcagaaactgacgctgacctacgcggaaactcgccgtctgtatggcaaagaggtttaccatcgcccgtcgcgctttattggcgagttgccggaagagtgtgtggaagaggtgcgcctgcgcgccacggtaagccgcccggtcagccatcagcggatgggtacgccgatggtcgagaacgacagcggctacaagctcggccagcgtgtacgccacgctaagtttggtgaaggcaccatcgtcaatatggaaggcagcggtgaacatagccgtttgcaggtggcattccagggccagggaatcaaatggctggtggcagcttacgcccggctggagtcggtgtaa

SEQ ID NO: 43900 - protein, 720 aa, Shigella flexneri 2a str. 301
MDVSYLLDSLNDKQREAVAAPRSNLLVLAGAGSGKTRVLVHRIAWLMSVENCSPYSIMAVTFTNKAAAEMRHRIGQLMGTSQGGMWVGTFHGLAHRLLRAHHMDANLPQDFQILDSEDQLRLLKRLIKAMNLDEKQWPPRQAMWYINSQKDEGLRPHHIQSYGNPVEQTWQKVYQAYQEACDRAGLVDFAELLLRAHELWLNKPHILQHYRERFTNILVDEFQDTNNIQYAWIRLLAGDTGKVMIVGDDDQSIYGWRGAQVENIQRFLNDFPGAEIIRLEQNYRSTSNILSAANALIENNNGRLGKKLWTDGADGEPISLYCAFNELDEARFVVNRIKTWQDNGGALAECAILYRSNAQSRVLEEALLQASMPYRIYGGMRFFERQEIKDALSYLRLIANRNDDAAFERVVNTPTRGIGDRTLDVVRQTSRDRQLTLWQACRELLQEKALAGRAASALQRFMELIDALAQETADMPLHVQTDRVIKDSGLRTMYEQEKGEKGQTRIENLEELVTATRQFSYNEEDEDLMPLQAFLSHAALEAGEGQADTWQDAVQLMTMHSAKGLEFPQVFIVGMEEGMFPSQMSLDEGGRLEEERRLAYVGVTRAMQKLTLTYAETRRLYGKEVYHRPSRFIGELPEECVEEVRLRATVSRPVSHQRMGTPMVENDSGYKLGQRVRHAKFGEGTIVNMEGSGEHSRLQVAFQGQGIKWLVAAYARLESV

SEQ ID NO: 43901 - DNA, 2169 bp, Shewanella oneidensis MR-1
  CDS (1)..(2169): transl_table=11
atggacgtatcttctttactagacggcctgaatgataaacagcgcgaggctgtcgcggcaccgcaatctagcatgttagtgcttgcgggggcgggcagtggtaaaacgcgggtgttaactcaccgtatcgcgtggttaatgcaggttgaacagcagagtccttactcgattttagccgtgacgtttaccaataaagccgcggctgagatgcgcgagcgggttgaaaaagtcgctggcaccaatatggggcggatgtggattggcaccttccacgggctggcgcatcgtttattacgcactcacttccaagatgcgggactaccgcaaagcttccaaattcttgattcggacgatcagctgcgtttgctgaaacgcatccttaaaagtttgaatctggatgaaaaacaatatcctcctcgtcaggcgcagggttatatcaatggtaaaaaagaccaaggattacggcctaagcatatcgatgcgggtggttttccgattgagcaaaacctgctgaagatttatcaggtttatcaagagtcttgcgatcgcgctggccttgtcgattttgccgaaatcctattacgtgcccacgagctttggctcaataagccgcatttgctggcgcattatcaagaacgttttaagcatattctggtggacgagttccaagataccaacgccattcaatacgcttggatccgcatgctagccggccaaaccgccaatgtgatgatcgtcggtgacgacgaccaatccatttacggttggcgcggcgctcaggttgaaaacctgcaccgcttcctgaaggatttcccgacggcgaccacgattcgcctcgaacaaaattatcgctccaagggcaatattttgaaggcgtcaaatgcccttattgccaataaccccgagcgtttaggtaaagagctgtggaccgacgaagccgatggtgagccgatttccctctactgcgcctttaacgaaatggacgaagcgcgctttattgtcggccggatcaatgattggtacgaaaaaggcggcaatttaagtgactgcgcgattttatatcgctcgaatgcccagtcgcgcgtgctcgaagaagccttattacacaaaggcttagcctatcggatttacggtggtttgcgctttttcgaacgccaagagattaaagacgcgatgggttatatgcgtctaatcagcaataaaaatgacgatgccgccttcgagcgcgtggttaatacaccgccccgaggcattggcgatcgcactctagatattttacgcactaccgcgcgccagcaagagctcacgttatggcaagcgtgtttacggctgctggatgaaaaagtgctcgcgggccgagccgcctcagcggtgcgtggctttatggatcttatcgtcaccctgcaggaagacactcaagatatggcgctgtaccggatggcggacacagtgatccaagcttctggccttaaagctatgtacgaagcagaaaagggcgaaaaggcccacgctcgtatcgaaaacttagaggaactcgtcaccgccgcgcgcaccttcgaaatgcctgaagagcttgaggatatgggcgagctgaatgcctttttatcccatgcggccttagaggcgggcgaaggtcaggccgatgcctttaccgatgcagtgcaactgatgactctgcactcggccaaggggctggagtttactatggtatttatggcgggtgtcgaggaggggattttcccgagtaagatggcgctcgaagagggcgacagactcgatgaggaacgccgcctctgttacgtgggcatgacccgcgcgatggaaaaactctatatcacctatgccgaatctcggcggatttatggccgtgaagattatgctcggccatcgcgttttattaaggaaatcccgccgcaatatgtggacgagatccgcttaaaggcgcaggtgtcgacaccgatggccaataatcgttttagtacccaaaaatcggcggttgccaacgataccggctttagcgtcggccaaagagtgcatcatcctaaatttggcgatggcaaagtgactaactttgaaggcagtggcgcacaggcgcgggtacaggtgaattttagcgattttggcagcaaatggttggtggtcgcttacgcccgcttagaggcgcgttga

SEQ ID NO: 43902 - protein, 722 aa, Shewanella oneidensis MR-1
MDVSSLLDGLNDKQREAVAAPQSSMLVLAGAGSGKTRVLTHRIAWLMQVEQQSPYSILAVTFTNKAAAEMRERVEKVAGTNMGRMWIGTFHGLAHRLLRTHFQDAGLPQSFQILDSDDQLRLLKRILKSLNLDEKQYPPRQAQGYINGKKDQGLRPKHIDAGGFPIEQNLLKIYQVYQESCDRAGLVDFAEILLRAHELWLNKPHLLAHYQERFKHILVDEFQDTNAIQYAWIRMLAGQTANVMIVGDDDQSIYGWRGAQVENLHRFLKDFPTATTIRLEQNYRSKGNILKASNALIANNPERLGKELWTDEADGEPISLYCAFNEMDEARFIVGRINDWYEKGGNLSDCAILYRSNAQSRVLEEALLHKGLAYRIYGGLRFFERQEIKDAMGYMRLISNKNDDAAFERVVNTPPRGIGDRTLDILRTTARQQELTLWQACLRLLDEKVLAGRAASAVRGFMDLIVTLQEDTQDMALYRMADTVIQASGLKAMYEAEKGEKAHARIENLEELVTAARTFEMPEELEDMGELNAFLSHAALEAGEGQADAFTDAVQLMTLHSAKGLEFTMVFMAGVEEGIFPSKMALEEGDRLDEERRLCYVGMTRAMEKLYITYAESRRIYGREDYARPSRFIKEIPPQYVDEIRLKAQVSTPMANNRFSTQKSAVANDTGFSVGQRVHHPKFGDGKVTNFEGSGAQARVQVNFSDFGSKWLVVAYARLEAR

SEQ ID NO: 43903 - DNA, 2187 bp, Pseudomonas putida KT2440
  CDS (1)..(2187): transl_table=11
atgcgcacagacgacctctctctcctgctgaattccctcaacgatgcccaacgccaggccgtagcggccacgctcgggcgtcaactggtgcttgccggcgccggttccggtaaaacccgcgtgctggtacaccgcatcgcctggctgatccaggtcgagcaggcgtcgccgcactcgatcctgtcggtgaccttcaccaacaaggccgcagcagaaatgcgccagcggatcgagcaactgctgggcatcaacccggcaggcatgtgggtaggcaccttccacggcctggcccatcgcctgttgcgggcccactggcaggaagcgcggctggtgcagaacttccagatcctcgacagcgacgaccagcagcgcctgatcaagcgggtcatgcgcgagttgggcctggacgagcagaagtggccggcacgccaggcccaatggttcatcaacggacagaaagacgaaggcctgcgcccgcagcatatccaggcggggggcgacctgttcctggcgaccatgcgcgaggtctatacggcctacgagcaggcttgcgagcgcgccggtgtcatcgatttctccgagctgctgcttcgcgccctggacctgtggcgtgaccacccgggcctgctggagcactatcagcgacgcttccgccacgtgctggtggacgagttccaggataccaacgccgtgcagtacgcctggttgcgcctgctggcacgcggtggcgacagcctgatggcggtaggcgatgacgaccagtcgatctacggctggcgcggcgccaagatcgagaacattcaccagtacaccgccgacttccccgacgccgaaatgatccgcctggagcagaactaccgctccaccggcggcatcctcaaggcggccaacgcgctgatcgccaacaacagcgggcgcctgggcaaggaactgtggaccgacatgggcgaaggcgaaccactgaccctgtacgcggcctacaacgagcacgacgaagcgcgctatgtcgtggaaaccatcgagagcctggtcaagcagggcaatgcgcgcaacgagatcgccatcctgtaccgttccaacgcccagtcgcgcgtgctggaagaggccctgctgcgcgagcgcatcccctaccgcatctatggcggccagcgcttcttcgagcgcgccgaaatcaagaatgccatggcttacctgcgcctgatcgaagggcgtggcaacgatgccgctctggagcgggtgatcaacgtgccgccgcgcggtattggcgaaaaaaccgtcgaagccatccgcgagcacgcccgccacagccagctgtccatgtgggaggccatgtgccagctgatcgctgccaaggccctcaaaggccgcgccgccagtgccctgggggcctttatcgagctgatcgaggggctggctgccaaggttgtggacatgccgctgcataccatgacccagaccaccatcgaacagtccggcctgatcacctatcaccaggaagaaaagggtgaaaagggccaggcacgggtagaaaaccttgaggaactggtcagtgcggcgcgcaacttcgagtccaccgacgaagacgccgacctttccccgctctcggccttccttggccacgcctcactcgaagctggcgatactcaggctgacgagcatgaagacagcatccagctgatgaccctgcacagcgccaaaggccttgagttcccatatgtgttcctggtgggcatggaagaaggcttgttcccgcacaagatgagcctggaagaacccggccgcctggaagaggaacgacgcctggcctatgtaggcatcacccgcgccatgcgccagctggtcatgacctatgccgaaacacgccgcctttatggcagcgagacttacaacaaggtgtcgcgtttcgtacgtgaaattccggcaggcctggttcaggaagtacgcctgtccaacagcgtcagccgcccgttcggcggggccaagacggccaccaacagcaacctgttcgccaatgccagcattccgcagaccgcgttcaaccttggccagcgtgtgcagcatgcggtattcggggaaggtgtgatcctcaacttcgagggttctggcgctcaggcgcgggtgcaggtgaattttgccgaaggtagcaaatggctgatgctggggtatgccaagctcgaggctgtctaa

SEQ ID NO: 43904 - protein, 728 aa, Pseudomonas putida KT2440
MRTDDLSLLLNSLNDAQRQAVAATLGRQLVLAGAGSGKTRVLVHRIAWLIQVEQASPHSILSVTFTNKAAAEMRQRIEQLLGINPAGMWVGTFHGLAHRLLRAHWQEARLVQNFQILDSDDQQRLIKRVMRELGLDEQKWPARQAQWFINGQKDEGLRPQHIQAGGDLFLATMREVYTAYEQACERAGVIDFSELLLRALDLWRDHPGLLEHYQRRFRHVLVDEFQDTNAVQYAWLRLLARGGDSLMAVGDDDQSIYGWRGAKIENIHQYTADFPDAEMIRLEQNYRSTGGILKAANALIANNSGRLGKELWTDMGEGEPLTLYAAYNEHDEARYVVETIESLVKQGNARNEIAILYRSNAQSRVLEEALLRERIPYRIYGGQRFFERAEIKNAMAYLRLIEGRGNDAALERVINVPPRGIGEKTVEAIREHARHSQLSMWEAMCQLIAAKALKGRAASALGAFIELIEGLAAKVVDMPLHTMTQTTIEQSGLITYHQEEKGEKGQARVENLEELVSAARNFESTDEDADLSPLSAFLGHASLEAGDTQADEHEDSIQLMTLHSAKGLEFPYVFLVGMEEGLFPHKMSLEEPGRLEEERRLAYVGITRAMRQLVMTYAETRRLYGSETYNKVSRFVREIPAGLVQEVRLSNSVSRPFGGAKTATNSNLFANASIPQTAFNLGQRVQHAVFGEGVILNFEGSGAQARVQVNFAEGSKWLMLGYAKLEAV

SEQ ID NO: 43905 - DNA, 2187 bp, Xylella fastidiosa Temecula1
  CDS (1)..(2187): transl_table=11
gtgaacgtctctcatgtgctttatcacttaaatcagaaccagcgcgaggccgttgctgcagctcccggccactacctgatcctcgccggtgccggatcaggaaaaacccgcgttctcactcatcgcatcgtttggctcaacgaggtaaatggagtacccacccacagcatgatggccgtcaccttcacgaacaaggccgccggcgaaatacaacaacggattgatctacaactgcgccacggtaaacgcggcatgtggatcgggaccttccatagcctggcgcatcgcttactgcgcctgcattggaacgacgcaacattacccgaaaacttccaggtcatagacagcgacgatcaattgcgcctcgtcaaacgagtgatccagtccttgggattgaatgacaccctcttccctcccaaacaggcgatgtggtggattaatacacagaaagatgaaggacgccgcccagagcacatccaacccgagtcacacgacgactggatcgagactcagcgccgcatctataccgagtatcaggagcgctgcaaccgcgctggtttggtcgatttttcggaactgctgctgcgggcacatgaactactacgcgatacccctgcactactgacacactaccgttcgcgcttccgtgagattctgatcgacgaattccaagataccaacgccatccagtacgcgtttgtgcgtgtccttgccaatgacactggccacatcttcgccgtcggcgatgacgaccaagccatctacggctggcgtggtgccaaagttgagcatgtacaacacttcctgaaagattttccaaacgtgcagaccatccgcttggagcaaaattaccgctccagcgccaatatccttgacgctgccaacgcaatcattgcccataacccagaccgaattggcaaacgcctctggactgaatccggtgttggtgaatccatcgacctatacgccgcctacaacgagattgatgaagcccgctacatcgtcgaacgcgcccgccagtgggtacgcgacggcggcagctacggcgagatcgcagtgctttaccgtagtaacgcacagtcccgcgcatttgaagaagtgctgcaatccgaacatatcccctaccgtgtttacggcggcatgcgcttcttcgagcgtgccgaaatcaaggatgccctagcctatctgcgcctgcttgccaatcgtagcgatgatgctgcgttcgaacgcgttgtaaatacccccgtacgcggcatcggtgagcgcaccttagatgaagtaagacacctagcacgtacccaaggcttagcactatgggatgcggcaatggcatgtacccaatcaaccacgctgaccgcgcgcgcgcgtaacgccttggcgagtttcctcaatttactgcaacaacttgcgctggaaaccaaccagatggatttagccgaacgaattgaccatatgctgcagcgttcggagttacgccagcactggaagaaagaagcgcgtggttctctggatgccgaatcacgtcaagaaaacttagacgaacttgtttccgtcgcttcacgctttgtccttccgcaaaacgacgaagacacacccatcatgaccgaattagacgcgttcctatcctacgcgtgcctggaaagtggtgatggtcaagtccaagctggtgaagaaggcgtacaactgatgaccctacactcagccaaaggcttggaattccccctagtcttcttggtgggcttggaaaatggattattccccagcgcgcgttccctggatgaacacggccgactagaggaagaacgccgcttagcgtatgtcggcatcacccgcgcccgtcacaaactcatcctcagctatgcccaagcacggcgtatccacggtaaagataactacaacgtcccctcacgctttttacgcgagatcccgcaggatctattgcatgaagtacgccccaccatccaggtctcacaccagcccccattaggagcaacgcaacgtccagcccatgatgaacgcgacgcagcacctatcaagctcggcgtgaacgtcatacaccctacatttgggtgcggcgtggttgtcgactacgaaggcagcggcgtgcacacccgcgtacaaatcaaattcgatgacgccggtacaaaatggttggtcatggcatacgccaaactcagcgtggtatag

SEQ ID NO: 43906 - protein, 728 aa, Xylella fastidiosa Temecula1
MNVSHVLYHLNQNQREAVAAAPGHYLILAGAGSGKTRVLTHRIVWLNEVNGVPTHSMMAVTFTNKAAGEIQQRIDLQLRHGKRGMWIGTFHSLAHRLLRLHWNDATLPENFQVIDSDDQLRLVKRVIQSLGLNDTLFPPKQAMWWINTQKDEGRRPEHIQPESHDDWIETQRRIYTEYQERCNRAGLVDFSELLLRAHELLRDTPALLTHYRSRFREILIDEFQDTNAIQYAFVRVLANDTGHIFAVGDDDQAIYGWRGAKVEHVQHFLKDFPNVQTIRLEQNYRSSANILDAANAIIAHNPDRIGKRLWTESGVGESIDLYAAYNEIDEARYIVERARQWVRDGGSYGEIAVLYRSNAQSRAFEEVLQSEHIPYRVYGGMRFFERAEIKDALAYLRLLANRSDDAAFERVVNTPVRGIGERTLDEVRHLARTQGLALWDAAMACTQSTTLTARARNALASFLNLLQQLALETNQMDLAERIDHMLQRSELRQHWKKEARGSLDAESRQENLDELVSVASRFVLPQNDEDTPIMTELDAFLSYACLESGDGQVQAGEEGVQLMTLHSAKGLEFPLVFLVGLENGLFPSARSLDEHGRLEEERRLAYVGITRARHKLILSYAQARRIHGKDNYNVPSRFLREIPQDLLHEVRPTIQVSHQPPLGATQRPAHDERDAAPIKLGVNVIHPTFGCGVVVDYEGSGVHTRVQIKFDDAGTKWLVMAYAKLSVV

SEQ ID NO: 43907 - DNA, 2268 bp, Lactobacillus plantarum WCFS1
  CDS (1)..(2268): transl_table=11
gtgtcgaaagaaagcctattggcaggaatgaatgacaagcagcaagaagccgttttagacacagaaggaccgctactaattatggccggtgcgggctcggggaagacccgtgtattgacgcaccgggtagcttatttaattgaagagcaaggggtcaacccctggaatgttttagcgattacgtttacgaacaaggccgcacgcgaaatgcgtgaacgggttggtaagctgttaggtgaatcggcgcaggaggtctgggtctcaacgttccatgccctgtgtgtccgaattttacgacgtgacattgaacaaatcgggtataaccgagcgttcacaatcgccggcactagcgagcaacggaccttagtcaaacgaatcttgacggaacaaaatatcgattcgaaaaaatttgatccgcggtcaatcttatccgcaatttcaaatgcgaaaaatgacttacaaacgccggagatgtataaagaatcggctgccagtccctttgagagtgtcgtggcagacgtttatttgcaataccaacgtgaattagcggctgatcaagccgttgactttgatgatctgattatgctgacgattcaattattcaagcagaatcctgaaacgctggcgtggtaccaaaacaaattccattatattcacgtggatgaatatcaagatactaataatgcacagtatacgttagtcaacttgttagctgacaaatataaaaatttatgtgtagttggggatgcggatcaatctatctatggttggcggggggccaacatggaaaatattctcgatttcgaaaaggattatccgcaagctgacacggtgatgttggagcaaaactatcgttcgaccaagacaattttgtcggcggctaatgcagttattaacaataattcaacgcggcggccgaagaaattatggactgagaatgaaccgggtgacaagatttcttattatcgtggtcagagtgaaagtgatgaaactcactttgtcattgccaagattcaagaaagcatgcagcaggacaaaatggactacggcgattttgcgatcctttatcggacgaacgcacaatcccgggtaatggaagagtcactcgttaaggcgaacatcccttatacaatggtcggtggtaataagttctatgaccgtaaagaaattcgggacgtcttatcctacttgactttggcagtgaacgatcaagattcaatgaactttgaacgggtcgttaatgaacctaagcgcggcattggtcaaacgagtgttgaaaaattgcggttgttcgcggatgaagcgggttattccatgttggaagcagctagcaatgttgacatggctaatggcatttcagcacgagcgaagggtgctttagcgaagtttgcagcgacgatgaatgaattgcgcgctatgcgggaatacttatccgtgacggatttaacacaagagattcttgaccgaacgggttacatgaaggcgttgaaagatgctaaggcaacgaaatcgttagaggcacaagcccgtatcgaaaacattgaagaattcttgtctgtcaccaaacaattcgatgatagttatcaacctgaagatgaagatagtgacaaattcgtggacttcttagcggatttagcactggtttcggatgtggataacgttgaggaagaaccccaagccgtgacgctgatgacgttacatgcagcgaaggggctagaatttccggttgttttcttgattgggatggaagaaggtatcttcccactgtcccgggcaatgatggatgaagacgagctggaagaagaacggcggttagcatacgttgggattacgcgggctgagaagaagctgtacttgaccaatgcatactcacggatgctttacggtcggcggcagaataatccggcttcccgtttcgttgaagaaatcgaaccagaattactcaaaaatgaaaatacgttggatggtgcaagtagcactggtcctaaagtcccatttggtgcggatcgtgaacggcgtgcttttacaccttcatataaaaagaatccagtggggacgcgggccacggtcaagaaggctagtggcacgggtgctgacaagaatagttggtcgatcggtgataaagtcaagcatcgtaagtggggaaccggaacggtcgtgaaggtctccggtgctggtgaagatgctgaactagacattgctttcaaatctgaaggaatcaagcggttattagccgcatttgcaccgatccaaaaagtacaggactag

SEQ ID NO: 43908 - protein, 755 aa, Lactobacillus plantarum WCFS1
MSKESLLAGMNDKQQEAVLDTEGPLLIMAGAGSGKTRVLTHRVAYLIEEQGVNPWNVLAITFTNKAAREMRERVGKLLGESAQEVWVSTFHALCVRILRRDIEQIGYNRAFTIAGTSEQRTLVKRILTEQNIDSKKFDPRSILSAISNAKNDLQTPEMYKESAASPFESVVADVYLQYQRELAADQAVDFDDLIMLTIQLFKQNPETLAWYQNKFHYIHVDEYQDTNNAQYTLVNLLADKYKNLCVVGDADQSIYGWRGANMENILDFEKDYPQADTVMLEQNYRSTKTILSAANAVINNNSTRRPKKLWTENEPGDKISYYRGQSESDETHFVIAKIQESMQQDKMDYGDFAILYRTNAQSRVMEESLVKANIPYTMVGGNKFYDRKEIRDVLSYLTLAVNDQDSMNFERVVNEPKRGIGQTSVEKLRLFADEAGYSMLEAASNVDMANGISARAKGALAKFAATMNELRAMREYLSVTDLTQEILDRTGYMKALKDAKATKSLEAQARIENIEEFLSVTKQFDDSYQPEDEDSDKFVDFLADLALVSDVDNVEEEPQAVTLMTLHAAKGLEFPVVFLIGMEEGIFPLSRAMMDEDELEEERRLAYVGITRAEKKLYLTNAYSRMLYGRRQNNPASRFVEEIEPELLKNENTLDGASSTGPKVPFGADRERRAFTPSYKKNPVGTRATVKKASGTGADKNSWSIGDKVKHRKWGTGTVVKVSGAGEDAELDIAFKSEGIKRLLAAFAPIQKVQD

SEQ ID NO: 43909 - DNA, 2184 bp, Pseudomonas syringae pv. tomato str. DC3000
  CDS (1)..(2184): transl_table=11
atgcgcgatgatctctctgttcttcttaattccctcaacgatgcccaacgtcaggccgtagccgcctcattgggtcgtcagttggtcctggccggtgctggctccggcaaaacccgagtgctggtgcatcgcatcgcctggctgatgcaggtcgagcaagcctccccgcattcggtcctgtcggtgacgttcaccaacaaggcagctgccgagatgcgccaccgcatcgagcagctcatgggcatcagccctgctggcatgtgggtaggcactttccacggcctggcgcaccgcctgttgcgggcgcactggcaggaagccgggctggtgcagaccttccagattctcgacagcgatgaccagcaacgtctggtcaagcgcgtgatgcgcgagctgggtctggacgagcaactctggcctgcgcgtcaggctcagtggttcatcaatggtcagaaagacgaaggcctgcgcccgaaacatattcaggccagcggcgatctgttcctgaccaccatgaaaagcgtttacgaagcctacgaggctgcctgccagcgtgcaggcgtcatcgacttctctgagttgctgctgcgcgcgctggacctgtggcgtgacaaccctggcttgctggcgcactaccagcgccgcttccgccacgtactggtggacgagtttcaagataccaacgccgtgcaatatgcctggctgcgcctgcttgctcagggtggcgacagcctgatggtggtcggcgacgacgatcagtccatctacggctggcgtggcgcgaagatcgagaacatccatcagtattccgatgatttcccggacaccgaagtgatccgcctggagcagaactaccgctccacggcgagcatcctcaaagccgccaacggtttgatcatcaataacagcgggcgtctgggcaaagagttgtggaccgacgtcggcgatggcgagctgatcaatctgtatgccgccttcaacgaacacgacgaagcgcgttacgtggtcgagaccatcgagagcgccctgaaaaccggcatctcacgcaacgacatcgccattctgtaccgttccaacgcccagtctagggtgctggaagaagccctgctgcgcgagcgtattccgtaccgcatctatggcgggcagcgctttttcgagcgcgccgagatcaagaacgcgatggcctatatgcgcctgctggaaggtcgcggcaacgatgccgcgctggagcgggtgatcaacgttccggcacgcggcatcggcgagaaaaccgtcgaagcgattcgcgagcacgcgcggcatgccgacgtgtcgatgtgggaagccatgcgcctgctggtcgccaacaagggcctgactggccgcgctgccggcgcgctgggcgggtttatcgagctgatcgagaacctgtcggccaaggtcatggaaatgccgctgcacctgatgactcagacagtcatcgagcagtccgggctgattacctatcacgaacaggaaaaaggcgagaaaggccaggcccgggtagaaaaccttgaggaactggtcagcgccgctcgggctttcgaaaatcacgagagcgacgaagaattgaccccgctggccgccttcctcggccatgcttcgctggaagctggcgacactcaggcgcaagagcatgaagacagcattcagttgatgacgttgcacagcgccaagggcctggaattcccgcatgtgtttctggtgggcatggaagaaggtctgttcccgcacaagatgagcctggaagaaccgggccgtcttgaagaagagcggcgtctggcctatgtcggcatcacccgtgccatgaaacagctggtgatgacctacgccgagacacgccgcctgtacggcagcgaaacctacaacaaggtttcgcgtttcgtccgcgagattccgcctgcgctgattcaggaagtccgtttgtccaacagcgtgagccgtcctttcggcggcactccgaagttcaacagcggcagcttgttcaacggcaccggcattccggaaaccgagttcgccatgggccagcgcgtgcagcatgcggtgttcggcgaaggcgtgatcctcaacttcgaaggcgctggcgcccaggcacgcgtgcaggtcaacttcgccgaaggcagcaagtggctgatgatgggctatgcgaagctggtggcgttgtag

SEQ ID NO: 43910 - protein, 727 aa, Pseudomonas syringae pv. tomato str. DC3000
MRDDLSVLLNSLNDAQRQAVAASLGRQLVLAGAGSGKTRVLVHRIAWLMQVEQASPHSVLSVTFTNKAAAEMRHRIEQLMGISPAGMWVGTFHGLAHRLLRAHWQEAGLVQTFQILDSDDQQRLVKRVMRELGLDEQLWPARQAQWFINGQKDEGLRPKHIQASGDLFLTTMKSVYEAYEAACQRAGVIDFSELLLRALDLWRDNPGLLAHYQRRFRHVLVDEFQDTNAVQYAWLRLLAQGGDSLMVVGDDDQSIYGWRGAKIENIHQYSDDFPDTEVIRLEQNYRSTASILKAANGLIINNSGRLGKELWTDVGDGELINLYAAFNEHDEARYVVETIESALKTGISRNDIAILYRSNAQSRVLEEALLRERIPYRIYGGQRFFERAEIKNAMAYMRLLEGRGNDAALERVINVPARGIGEKTVEAIREHARHADVSMWEAMRLLVANKGLTGRAAGALGGFIELIENLSAKVMEMPLHLMTQTVIEQSGLITYHEQEKGEKGQARVENLEELVSAARAFENHESDEELTPLAAFLGHASLEAGDTQAQEHEDSIQLMTLHSAKGLEFPHVFLVGMEEGLFPHKMSLEEPGRLEEERRLAYVGITRAMKQLVMTYAETRRLYGSETYNKVSRFVREIPPALIQEVRLSNSVSRPFGGTPKFNSGSLFNGTGIPETEFAMGQRVQHAVFGEGVILNFEGAGAQARVQVNFAEGSKWLMMGYAKLVAL

SEQ ID NO: 43911 - DNA, 2175 bp, Vibrio parahaemolyticus RIMD 2210633
  CDS (1)..(2175): transl_table=11
atgatggatccatctctattactcgacgatttgaacgataaacaacgtgaagccgttgctgcacctctagaaaacttgctcgtccttgctggtgcagggagtggtaagactcgtgttcttgttcaccgtatcgcttggttgatgtcggtagaacaagcgtctccattctcaatcatgtcggtaacctttaccaacaaagcggcagcggagatgcgtggccgtattgaagagttgatgatgggcagtgcgtcaggcatgtggaatggtacctttcacggtatttgtcaccgcattttgcgcgcgcactatcttgatgccaagctaccggaagattttcaaatcatcgacagcgacgatcaacaacgtttactgaagcgtctgatcaaagcacaaaatctggatgaaaagcagtggcctgcacgccaagtggcttggtggattaacggcaaaaaagacgaaggcctgcgcccagcacatatcgatgcttaccacgatcctgtgaccaaaacctacttgcagctatacaccgcttatcaagaagcgtgtgaccgtgcaggtttggtcgactttgcagaaattctgcttcgcgctcatgagctactgcgcgataacaagtttgtccgagagcactaccaggcacgctttaaacacattctggttgacgagttccaagacaccaacaatatccaatacgcttggctacgcatgatgacggggcctgagtgtcatgtgatgatcgtgggtgacgatgaccagtcgatttacggttggcgcggagcaaaagtcgaaaacattgagaaattcacccgtgaattcccaagcgtaaccaccattcgcctagagcagaattaccgttccaccaagaccattttggaagcttccaataccttgatcgccaataacactgagcgtatgggtaaagagctgtggactgacggcgtcgttggtgaaccgatttcggtttacagtgcttacaacgagttggacgaagcccgttttgcggttaacaaaatcaaagagtggcaagacaaaggtggagcattgaatgatgcagcgatgttgtaccgcaacaacgcccagtcccgtgtactggaagaagcgttgattcaagctggtctaccataccgtatttatggtggtatgcgattcttcgagcgtcaggaaatcaaagacgcacttgcctacatgcgtttgatggctaaccgcaatgatgatgctgcatttgaacgtgtggtgaatacgccaactcgtggtttaggtgacaagacactagaaaccattcgccgtgcggcgcgtgatcgtggttgcacgatgtgggaagccagcgttgcgatgttggatgaacaagtgctcgcgggtcgagcggcgggggcattaggtcgctttatcgaacttattaccgcactcgaagacgacacgttagagatgccgttgcacgagcaaacagaccatgtgatcaagtactctggcttgtttgccatgtatgagcaagagaagggcgaaaagtctaaggctcgtattgagaacttggaggaattggtgaccgcaactcgtcaattcgagaagccagaagaagcggaagagatgtcgctgctgactgcgttcttgactcatgcggcgctagaagcgggtgaagggcaagccgacgaatttgaagatgcagttcaattgatgacactgcatagtgcaaaaggcttggaattcccattggtgtttatggtgggcgttgaagaaggcatgttcccaagccagatgtcggcggaagaggctgggcgtttagaggaagagcgccgcctgtgctacgtcggtatgacgcgcgcgatgcaaaaactctacatcacttatgcggaaatgcgccgtttgtatggtcaagataagtaccataagccatcgcgttttattcgtgagttgccggaaacgtgcctggacgaagtgcggatgaaagcgcaagtcagccgacctgcaagtagtggtcgctttagccaaactgcggtgaaagagaacttcaacgagacgggcttttcacttggttcacgcgtaatgcatccaaagtttggcgaaggcaccatcattaactttgaaggcagcggtccacagagtcgcgttcaaatcgcgttcaatggtgaaggcattaaatggttagtgactgcttacgctagactagaaaaactgtaa

SEQ ID NO: 43912 - protein, 724 aa, Vibrio parahaemolyticus RIMD 2210633
MMDPSLLLDDLNDKQREAVAAPLENLLVLAGAGSGKTRVLVHRIAWLMSVEQASPFSIMSVTFTNKAAAEMRGRIEELMMGSASGMWNGTFHGICHRILRAHYLDAKLPEDFQIIDSDDQQRLLKRLIKAQNLDEKQWPARQVAWWINGKKDEGLRPAHIDAYHDPVTKTYLQLYTAYQEACDRAGLVDFAEILLRAHELLRDNKFVREHYQARFKHILVDEFQDTNNIQYAWLRMMTGPECHVMIVGDDDQSIYGWRGAKVENIEKFTREFPSVTTIRLEQNYRSTKTILEASNTLIANNTERMGKELWTDGVVGEPISVYSAYNELDEARFAVNKIKEWQDKGGALNDAAMLYRNNAQSRVLEEALIQAGLPYRIYGGMRFFERQEIKDALAYMRLMANRNDDAAFERVVNTPTRGLGDKTLETIRRAARDRGCTMWEASVAMLDEQVLAGRAAGALGRFIELITALEDDTLEMPLHEQTDHVIKYSGLFAMYEQEKGEKSKARIENLEELVTATRQFEKPEEAEEMSLLTAFLTHAALEAGEGQADEFEDAVQLMTLHSAKGLEFPLVFMVGVEEGMFPSQMSAEEAGRLEEERRLCYVGMTRAMQKLYITYAEMRRLYGQDKYHKPSRFIRELPETCLDEVRMKAQVSRPASSGRFSQTAVKENFNETGFSLGSRVMHPKFGEGTIINFEGSGPQSRVQIAFNGEGIKWLVTAYARLEKL

SEQ ID NO: 43913 - DNA, 2163 bp, Salmonella enterica subsp. enterica serovar Typhi Ty2
  CDS (1)..(2163): transl_table=11
atggacgtttcttacctgctcgacagccttaatgataaacagcgcgaagcggtggccgcgccacgtagcaacatgctggtgctggcgggcgcgggaagcgggaaaacccgcgtgctggtgcaccgtatcgcctggttactgagcgtagaaaacaactcgccatactccatcatggcggtgacctttaccaacaaagcggcggcggaaatgcgccatcgtattggccagttgatggggaccagccagggcggaatgtgggtagggacgttccacggtctggcgcaccgcctgctgcgcgcgcatcatatggacgctaatttgccgcaggatttccagattctcgacagcgaagatcagatgcgtttgcttaaacgcctgattaaggcgatgaatcttgatgagaagcagtggccgccgcgtcaggcgatgtggtacatcaatagccagaaagacgaagggctacgcccgcaccatatccaaagctatggcaatccggtggaacagacctggcagaaggtgtatcaggcctatcaggaagcgtgcgatcgcgctggtctggtggatttcgccgagctactgctgcgcgctcatgaactatggctgaacaagccgcacatcctgcaacactatcgcgagcggtttactaacattctggtggacgaattccaggataccaacaacattcagtacgcctgggttcgtctgctggcgggcgataccggtaaagtgatgattgtcggcgacgatgaccagtcgatctacggctggcgcggggcccaggtagagaacatccagcgcttcctcaatgatttccccggcgcgcagaccattcgtctggagcagaattaccgctcgaccagcaacattcttagcgtggcgaacgccctgattgaaaacaacaacgggcgtctgggcaaaaagctgtggactgacggcgttgacggcgaaccgatatcgctgtactgcgctttcaacgaactggatgaagctcgctttgtggttaatcgtatcaaaacctggcaggacaacggcggcgcgcttgcgcaatgcgccatcctttatcgcagcaacgcccagtcgcgcgtgctggaagaagcgttattacaggccagtatgccgtaccgcatttacggcggtatgcgcttcttcgaacgccaggagatcaaagatgcgctctcttatctgcgtttgattgccaatcgcaacgatgatgccgcctttgaacgcgtggtgaataccccaacgcgcggtatcggcgaccgcacgctggacgtggtgcgccagacctcgcgcgatcgccagctaacattgtggcaggcgtgccgtgaattgttacaggaaaaagccctggccgggcgtgcggccagcgcgctgcaacgctttatggaactgatcgacgccctggcgcaggaaaccgccgacatgccgctgcatgtgcagactgaccgggtgatcaaagattccggcctgcgcaccatgtatgagcaagaaaaaggcgagaaaggccagacgcgcatcgaaaacttagaggaactggtgacggcaacgcggcagttcagctacaacgacgaagatgaagatttaatgccattgcaggccttcctctctcacgcggcgctggaagcgggcgaggggcaggcggatacctggcaggatgcggtacagctgatgacgctgcactcggccaaagggctggagttcccgcaggtgtttatcgtcgggatggaagaggggatgttccccagccagatgtcgctggatgagggctggcgtttggaagaggagcgtcgtctggcctacgtcggcgttacccgtgccatgcagaaactgacgctaacctatgccgaaactcgccgtctgtatggtaaagaggtttatcatcgcccgtcgcgtttcatcggcgagttgccggaggagtgcgtggaagaggtccgtctgcgcgccaccgtcagtcgtccggtgagccatcaacgaatgggaacgccgctggcggaaaacgacacaggctacaaactcggccaacgcgtgcgccatgcgaagttcggcgagggaactattgtcaacctggagggcagcggcgaacatagccggttgcaggtggcttttcaggggcaagggatcaaatggctggttgccgcgtatgcgaagctggaaacggtttga

SEQ ID NO: 43914 - protein, 720 aa, Salmonella enterica subsp. enterica serovar Typhi Ty2
MDVSYLLDSLNDKQREAVAAPRSNMLVLAGAGSGKTRVLVHRIAWLLSVENNSPYSIMAVTFTNKAAAEMRHRIGQLMGTSQGGMWVGTFHGLAHRLLRAHHMDANLPQDFQILDSEDQMRLLKRLIKAMNLDEKQWPPRQAMWYINSQKDEGLRPHHIQSYGNPVEQTWQKVYQAYQEACDRAGLVDFAELLLRAHELWLNKPHILQHYRERFTNILVDEFQDTNNIQYAWVRLLAGDTGKVMIVGDDDQSIYGWRGAQVENIQRFLNDFPGAQTIRLEQNYRSTSNILSVANALIENNNGRLGKKLWTDGVDGEPISLYCAFNELDEARFVVNRIKTWQDNGGALAQCAILYRSNAQSRVLEEALLQASMPYRIYGGMRFFERQEIKDALSYLRLIANRNDDAAFERVVNTPTRGIGDRTLDVVRQTSRDRQLTLWQACRELLQEKALAGRAASALQRFMELIDALAQETADMPLHVQTDRVIKDSGLRTMYEQEKGEKGQTRIENLEELVTATRQFSYNDEDEDLMPLQAFLSHAALEAGEGQADTWQDAVQLMTLHSAKGLEFPQVFIVGMEEGMFPSQMSLDEGWRLEEERRLAYVGVTRAMQKLTLTYAETRRLYGKEVYHRPSRFIGELPEECVEEVRLRATVSRPVSHQRMGTPLAENDTGYKLGQRVRHAKFGEGTIVNLEGSGEHSRLQVAFQGQGIKWLVAAYAKLETV

SEQ ID NO: 43915 - DNA, 2163 bp, Coxiella burnetii RSA 493
  CDS (1)..(2163): transl_table=11
atggaaaatttgagtctgttggaatcgctaaatccgccgcaaaaagaagcggttacgtcaccctttgaccatgtgttggtattggccggcgcaggtagtgggaagacgcgggtgttaacgcaccgtattgcttggctgatccaacaaaaaaatgtttcgccttacagcattctggccgtgacgtttaccaataaagcggcgtatgagatgcggggacggattgagtcgatgctgggtatgccgatgggtgcgatgtgggtagggacctttcatggtttagcacaccgattgctccgcgctcactggaaagacgctggattgccgcagtcgtttcaaattctcgatacggatgatcaatatcgccttatccgtcgcatgcagcggaatctcaatttagaagagtctcaatggccaccgaaacaaacccagtggtttattaacaaacaaaaagaagaaggacggcgttcgcatcaagttctcgatagcgatggcagttattttacggaaacgttagtcaaagtgtataaagcctatgaagatgtttgtcgccaaagcgggcttgtggattttgcggaattattattacggacgttagaattgttgcgcgattcggccacgcttcgcgaacattatcagcagcgatttcagcatattttggtagatgaatttcaagataccaataccattcaatacgcttggttaaaagcgctagcaggcgagcagaccgttttcatggcggtgggcgatgatgatcaatcgatctatagctggcgcggtgcaaagattgaaaacatccatcatttttcgcgcgattttgctggtgtgaaaaccatccgtttagaacaaaattaccgttcaacgcagacgattctcgatgccgccaatgcggttatcgataacaataaaaatcgcttcggaaaaaaattgtggacagacagccgcactggcgaacccatcactttatacacggcgtttaatgagcgcgacgaagctttttatgtaatttcttgtattgacgcgtgggtgcgtcagggccactcttataacgacgtcgctattctttatcgttcgaatgcacaatctcgtttattcgaagaatgcctgattgatcggcaaattccgtatcgtatttacggtggcttaaagttttttgagcgcgctgaaattaaagacgcgttggcatatttgcgactgatggccaatcgaaacgacgacgccgcttttgaacgcgtggtgaatgtcccaacgcgtggcatcgggaatacaacgcttgtggcattgcgcacaactgcccgcgatcacgctgtttccctttggcaagccactcagcatttaattaccaatcagacattgaatgcgcgcgcgctcaacgcgttacagcacttcatagaattagttgaccgattgcaagatgaaactaaaaatctaccgctagcggaacaaaccgaaaaaatgctgatgggaagcggtttactggctttgtataaaaaagataatagtgaaaaaggactttcgcgcgttgagaatttagaagaattgattaatgcgacctctcaattcacaccaacggacgatttagctttatcgccattggatgcttttctttctcacgtcgcgttggaaaccggcgaagaacaagcaagcgcgcacagcgattgtgtgagtttaatgacactacatgcggcgaaaggtttggaatttccattagtgattattagtggtttggaagaggatttatttccgcatcgtatgtctatcgatgctgctaacggtttagaagaagaacgtcgcttgtgttacgttggcatgacgcgtgcgcgggaaaaattaattttgacgtatactgaaagccgccgtctgcatggtttggaaaaattcaatcagccgtcccgatttattcaggaaattccaccggaattaatcgatgccgttcgccccactcctaaaatagcgcgtcctgttacaatcacttctactcaaaaatctctggtgggtgagacgggttattacgtcgggcagcgtgtgagtcataaaaaattcgggccgggcattattattaattacgaaggtcatagcgaacatgcgcgtttgcaagtgaaattcgattaccacggcacgaaatggctggtcgctagctatgccaaactggaagccctaacgtga

SEQ ID NO: 43916 - protein, 720 aa, Coxiella burnetii RSA 493
MENLSLLESLNPPQKEAVTSPFDHVLVLAGAGSGKTRVLTHRIAWLIQQKNVSPYSILAVTFTNKAAYEMRGRIESMLGMPMGAMWVGTFHGLAHRLLRAHWKDAGLPQSFQILDTDDQYRLIRRMQRNLNLEESQWPPKQTQWFINKQKEEGRRSHQVLDSDGSYFTETLVKVYKAYEDVCRQSGLVDFAELLLRTLELLRDSATLREHYQQRFQHILVDEFQDTNTIQYAWLKALAGEQTVFMAVGDDDQSIYSWRGAKIENIHHFSRDFAGVKTIRLEQNYRSTQTILDAANAVIDNNKNRFGKKLWTDSRTGEPITLYTAFNERDEAFYVISCIDAWVRQGHSYNDVAILYRSNAQSRLFEECLIDRQIPYRIYGGLKFFERAEIKDALAYLRLMANRNDDAAFERVVNVPTRGIGNTTLVALRTTARDHAVSLWQATQHLITNQTLNARALNALQHFIELVDRLQDETKNLPLAEQTEKMLMGSGLLALYKKDNSEKGLSRVENLEELINATSQFTPTDDLALSPLDAFLSHVALETGEEQASAHSDCVSLMTLHAAKGLEFPLVIISGLEEDLFPHRMSIDAANGLEEERRLCYVGMTRAREKLILTYTESRRLHGLEKFNQPSRFIQEIPPELIDAVRPTPKIARPVTITSTQKSLVGETGYYVGQRVSHKKFGPGIIINYEGHSEHARLQVKFDYHGTKWLVASYAKLEALT

SEQ ID NO: 43917 - DNA, 2235 bp, Nitrosomonas europaea ATCC 19718
  CDS (1)..(2235): transl_table=11
atgactgcattacttactgatctcaacccggaacagctggaagccgtcacctggtcacaccagtcagcactggtgctggcaggtgccggaagtggtaaaacccgggtgctgactacacgaattgcttatctgttgcaatcgggccgcacccggccacagaatatcctggcagttaccttcaccaacaaggcagcacgcgagatggtcgcgcgtatcggtgcaatgctgcctgtcaacactcgtgctatgtgggtgggcacatttcatggtttgtgtcaccgcgtgctgcgtgctcatcatgaagatgcggggttgccacaggcatttcagatactggatatggctgatcagctggctgtcatcaagcgtgtgctgaaggaacgatcactggatgaaaagatgttgccgcccagacaactgcaatggtttatcaataatgccaaagaagagggattacgagcctcgcaggtcgatgtgcatggcggtttcaatcagactctggccgaatgctaccaggcatacgaaattgtcagtatgcgggaaggtacggtcgatttcgccgaattactgctgcgctgctatgaattattgagccgcaatgaaattctgcgtgatcattatcgcagtcgtttcgaacatatattagtggatgaatttcaggataccaatcgcctgcagtataaatggatcaaattgctggcgggcccgggttcgcagcagcatgcagccatttttgccgtcggggatgatgaccagagcatctacgcgttccggggagcgcatgtcgggaatatgcgggatctcgaaaaggatttcagcgtaccgaagatcatcaggctggagcagaattatcgttcgcacggcaatattctggatgctgccaatgcgctgatcgaacataacaagggacgtttgggtaagaatttgtggactgcggcggggaagggtgaaccggtgcgggtatatcatgccgccacagatatggatgaaaccagtttcatcattgatgaaatcaaggcactgcatgccgatggcctggctctttctgatattgccctgctctatcgttccaatgcgcaatcacgggtgctggagcatggtttgttcaatgcatctgtttcctatcgtgtttatggcggtatgcgtttcttcgatcgtcaggaagtaaaacatgctttggcctatttacgactgatcgctttaccggatgatgacaatgccctgttgcggatcattaattttcctcccagaggaattggtgcacgtacattggaacagttacaggatcaggctgcgatgctcggcaccagtctgtggcaggcagcattcaaggtatatgagggagggaaagcggttgccaccaggaacagccagcccgggagaggaatagcaggttttgtcagcctggttttatccatgcagcaggatggcgagggcttgccgttaccggaaattatccggcgtgtgatcgatcagagcgggctggcagcacattatcaggctgaacgtgaaggtggcgagcgcctggagaatctcaaggagctgatcaatgccgcgaccagttttgtgcatgagtccgaagatgacagtcttactgcttttttggcacatgcttcgctcgaagggggtgagcatcaggcggaaggttatcaggatgcggttcagctgatgacagtacatgctgcaaaaggactggaatttcattcggtattcatcagcggtctggaggaaggtctgtttccccatgaaaacagccggaatgagcctgatggtctggaagaagaaaggcgtctgatgtatgtggcaatgacacgtgcccggcagcgcctgtatctgagttacgccgagagccgcatgttgcatggtcaggtgcgtgtgaacataccttcccgctttattgatgaaatcccacaagatcttttgaagaggctgcgctccgatttttccggaagaagttttcgtcagggggtgtcgggaacaggacaaaccgttgccagcactataaatagcagtcagaaaggcaggagtacgatggcagcagcagtcggaatgacatcatcagggctgaatagcgcaggttttcacgtcggccagcaagtatcgcatgccaaatttggcacgggtattatcctgaattatgagggtagcgggacggatatgcggatccaggtgaattttcaccaggcaggtacaaaatggctctcgcttgcttatgcaaaactggagcccctgtaa

SEQ ID NO: 43918 - protein, 744 aa, Nitrosomonas europaea ATCC 19718
MTALLTDLNPEQLEAVTWSHQSALVLAGAGSGKTRVLTTRIAYLLQSGRTRPQNILAVTFTNKAAREMVARIGAMLPVNTRAMWVGTFHGLCHRVLRAHHEDAGLPQAFQILDMADQLAVIKRVLKERSLDEKMLPPRQLQWFINNAKEEGLRASQVDVHGGFNQTLAECYQAYEIVSMREGTVDFAELLLRCYELLSRNEILRDHYRSRFEHILVDEFQDTNRLQYKWIKLLAGPGSQQHAAIFAVGDDDQSIYAFRGAHVGNMRDLEKDFSVPKIIRLEQNYRSHGNILDAANALIEHNKGRLGKNLWTAAGKGEPVRVYHAATDMDETSFIIDEIKALHADGLALSDIALLYRSNAQSRVLEHGLFNASVSYRVYGGMRFFDRQEVKHALAYLRLIALPDDDNALLRIINFPPRGIGARTLEQLQDQAAMLGTSLWQAAFKVYEGGKAVATRNSQPGRGIAGFVSLVLSMQQDGEGLPLPEIIRRVIDQSGLAAHYQAEREGGERLENLKELINAATSFVHESEDDSLTAFLAHASLEGGEHQAEGYQDAVQLMTVHAAKGLEFHSVFISGLEEGLFPHENSRNEPDGLEEERRLMYVAMTRARQRLYLSYAESRMLHGQVRVNIPSRFIDEIPQDLLKRLRSDFSGRSFRQGVSGTGQTVASTINSSQKGRSTMAAAVGMTSSGLNSAGFHVGQQVSHAKFGTGIILNYEGSGTDMRIQVNFHQAGTKWLSLAYAKLEPL

SEQ ID NO: 43919 - DNA, 2115 bp, Helicobacter hepaticus ATCC 51449
  CDS (1)..(2115): transl_table=11
atgccggtatctctctcatctgttcaaccacttgttccacaaacacttgagcaaactattgtttcgcttaatgacgctcaaaagcaagcagttgaacatattgatggggcaatgcttatccttgcaggagcagggagtggtaagactaaaacaattacaacacgtttagcttatctgattgatgaggttgggattcccccaagtgccacacttacacttaccttcactaataaagctgcgcaggagatgagagagagagccttaacacttttgcataatagatatgaatctccaccgcttttatgcacttttcatcgttttggactactttttttacgctttcatattactgcacttgggagaaatgcaaattttgtagtgcttgatactgatgataaacgcgctattttaaaatctttgtgcaagattcgtcctatttcacagcttgattattatatttcagatatgaaaaatgcctttctttcgcccgaacaagcacaaacttatgcccatagtgaagaatataagctaatgaatagaatctatggggaatatgaaaattatttattgaataaaaatttacttgattttgatgatttgctttatcttacgtatgcaattttgcttaaaaatgacaatatagcaaagcaaatgagcgaaaaatatcactacattatggttgatgaataccaagatactaatgagattcaatataaaatccttaaacgtttatgtcttgctcatactaatctttgtgttgtaggtgatgatgatcagagtatttatgggtggcgtggagcaaatgtgaagaatatcttaggatttcctaaggaatttgatgaagtaaaggttgttaagttagaggaaaattatcgctcaagtgagcagattcttaatgctgcaaatgcacttatttctcacaatagtaagcgtttgggtaaaaatttaaagagtatcaaaggtgctggagcaaatgtaagagtaatagaaagtgaaaatgaaagcacagaagcggaatttcttgctaaagatattttaacgctcctttctcaaggtataaatccgagcgaaattgcagttttgtttcgtgtaaatgcactctctcggagtattgaagagggctttaatcgtgctaagattccctataaaattattggagcagtgcgcttttatgaacgagcagagattaaagatttactttgctatttgcgattaattgttaatcctaatgatgattattcatttttacgcattattaatcgccctagacgagggattggtaagattacacaacttaaattagaagaacttgcgcgaacattcaatacctcttgtttttcaagtattacccaatatacacagcagagcaaagaagccattggagaaaaggcatataatgcacttttggagcttactcaaaatattgaacgttggcgtaaatatacagatttagcagatgtgattgaagatatgcaagagcatattgtatttacattcagtaggcttgatgaggtagatagaaagggaaatattgaggaattttatggtatgtttcgtgattatgctattgctaatccaagcaatcaagttgaagattttttaaatgatattgctttggcaagtcctactgatgaattgacaggagaatatgtgagttgtatgagcatacatatggctaagggattagagtttaaatatgtatatgtgattggttttgaagagggtatttttcctctttggaatgatgaagatgaaatacaagaagagagacgattaggctatgtggcaatcacaagagcgaaagattttcttacattatgttcggcaaaaagcagattgcgtaggggtaaaagagaatggcttgaacaatcgcgttttttaagagaaagtggattattgggcgtatataatgcaccaagtctttataaaactcaatctatacaagaagaagcagaagtggtatttagcaaaggtatgaaagtgcaacataaactctttggtgtaggtgtagtagaatctataaagggtaagggaagtcagtgtcagcttaggattaatttttccggattagagcgcgtgattctagcttcatttgtgcaaaaggtatgcgaatga

SEQ ID NO: 43920 - protein, 704 aa, Helicobacter hepaticus ATCC 51449
MPVSLSSVQPLVPQTLEQTIVSLNDAQKQAVEHIDGAMLILAGAGSGKTKTITTRLAYLIDEVGIPPSATLTLTFTNKAAQEMRERALTLLHNRYESPPLLCTFHRFGLLFLRFHITALGRNANFVVLDTDDKRAILKSLCKIRPISQLDYYISDMKNAFLSPEQAQTYAHSEEYKLMNRIYGEYENYLLNKNLLDFDDLLYLTYAILLKNDNIAKQMSEKYHYIMVDEYQDTNEIQYKILKRLCLAHTNLCVVGDDDQSIYGWRGANVKNILGFPKEFDEVKVVKLEENYRSSEQILNAANALISHNSKRLGKNLKSIKGAGANVRVIESENESTEAEFLAKDILTLLSQGINPSEIAVLFRVNALSRSIEEGFNRAKIPYKIIGAVRFYERAEIKDLLCYLRLIVNPNDDYSFLRIINRPRRGIGKITQLKLEELARTFNTSCFSSITQYTQQSKEAIGEKAYNALLELTQNIERWRKYTDLADVIEDMQEHIVFTFSRLDEVDRKGNIEEFYGMFRDYAIANPSNQVEDFLNDIALASPTDELTGEYVSCMSIHMAKGLEFKYVYVIGFEEGIFPLWNDEDEIQEERRLGYVAITRAKDFLTLCSAKSRLRRGKREWLEQSRFLRESGLLGVYNAPSLYKTQSIQEEAEVVFSKGMKVQHKLFGVGVVESIKGKGSQCQLRINFSGLERVILASFVQKVCE

SEQ ID NO: 43921 - DNA, 2160 bp, Wigglesworthia glossinidia endosymbiont of Glossina brevipalpis
  CDS (1)..(2160): transl_table=11
atgaaaaataattttttaactaaaaatttaaacgataaacaaaaagaaataatcacttcttcttacaagaatatattagtgctagcaggagctggaagtggaaaaacaaaagttttaacaaataaaatagcatggttgattgacgttaaaaaatatcattctagttcaattatggcagtaacctttacaaacaaaggagcaaaagaaataataaatagaatgaaatttttaataaaaaatttaaaagatatatggataggtacatttcatgggttatcatataaattattatgtatgcattatacagaatctaaattatttaaaaattttcaaataatagattcagaagatcaattaaaattgatacatcaaattaatttatcaatgaaattaaattttaataataagtcttatcacaatatacttgagtatataagaaattataaagataaaggaatcagaccttcattttgtgaaataaatataaataataaaaaaaatattttgtacaataaaatatacaaagaatatcaaacaacatgcgataaattaggattattagatttttcagaattattattaagaataaatgaattatttattaataataaaagtatatctaaattttataaaaaaaaatttaaatatatattggtagacgaatttcaagatactaatgatatccaatattcttggataaaaaatttttcatctaaagaatgctttataatgatagttggagatgatgatcaatctatatatggatggcgtggagctaaatcagaaaatatgaaaaattttataaatgatttttctagaacaaaaataataaagttacaacaaaattatcgctctactaacaatatattacaagcagctaattctttaattatgaataataatttaagaatagggaaaaaattatggactgaaaaaaaatctggagatcttattactatatatcaagcatataatgaaaaagatgaatctaattttataataaaatatatattaaataatcaaaaaaaattaaataacaaaaaaaaagaatatgcaattctttatcgtaagaattctcaatccagatctttagaagaaaatttattgaaaaataatttaaaatatgatatttatggaggtttaaaatttttttctcgtcaagaaataaaaaatacattagcttattttagattaatagttaataaaaaagatgatctttcatatgaaagaataataaattttccaaaacggaaaataggagaaaaaacattaaaaaaaattaaaaatatttctaaaaataaaaaattatccctttgggaatcaactaatttttttataaaaaataatttaaatgatgcaaaatcattttctttaaaaaactttttttatttaattgactatttaaaagaaaatataaaaaatttatcgttgcatgaaaaatttaattttgtaataaaaaaatctggtttattaaatttttatgaaaaagaaaaaaaaaatataaataactctaggatagataactggcaagaattagtaaattctgcaaaacaatttttcatagaaaataataaagaaaaaaatattcttgaaaaatttttagcattttctacattagaatcagaaagatatacatcttatgacgatgaaaattataaaataaaattaatgacattacattcttctaaaggtttagaatttcctatagttttcataattggaatggaagaaggattatttcctaatataatatatagtaataacaaagagaaattagaagaagaaagaagattagcgtatgtaggtatgactagagctatgaaaaaattagtcattacttatgtaaagtatagaaatatttatgggaaaataataaaacgtgaaccatctaggtttatagaagaaattccatctcattataaaaaaataatttatgaaaataaaactaatacaagtaaaaatgaaataaaaaaagataattattattatacaactaacaacacaaaaaataattacgaaataggaaaaaaagtttttcatccaaaatttggattcggattaataatacatatagaaaaaaataaaatattagagataaaatttaaaaaaataggaataaaaaaattagttgcaaaatatgcaaggcttgaattatgttaa

SEQ ID NO: 43922 - protein, 719 aa, Wigglesworthia glossinidia endosymbiont of Glossina brevipalpis
MKNNFLTKNLNDKQKEIITSSYKNILVLAGAGSGKTKVLTNKIAWLIDVKKYHSSSIMAVTFTNKGAKEIINRMKFLIKNLKDIWIGTFHGLSYKLLCMHYTESKLFKNFQIIDSEDQLKLIHQINLSMKLNFNNKSYHNILEYIRNYKDKGIRPSFCEININNKKNILYNKIYKEYQTTCDKLGLLDFSELLLRINELFINNKSISKFYKKKFKYILVDEFQDTNDIQYSWIKNFSSKECFIMIVGDDDQSIYGWRGAKSENMKNFINDFSRTKIIKLQQNYRSTNNILQAANSLIMNNNLRIGKKLWTEKKSGDLITIYQAYNEKDESNFIIKYILNNQKKLNNKKKEYAILYRKNSQSRSLEENLLKNNLKYDIYGGLKFFSRQEIKNTLAYFRLIVNKKDDLSYERIINFPKRKIGEKTLKKIKNISKNKKLSLWESTNFFIKNNLNDAKSFSLKNFFYLIDYLKENIKNLSLHEKFNFVIKKSGLLNFYEKEKKNINNSRIDNWQELVNSAKQFFIENNKEKNILEKFLAFSTLESERYTSYDDENYKIKLMTLHSSKGLEFPIVFIIGMEEGLFPNIIYSNNKEKLEEERRLAYVGMTRAMKKLVITYVKYRNIYGKIIKREPSRFIEEIPSHYKKIIYENKTNTSKNEIKKDNYYYTTNNTKNNYEIGKKVFHPKFGFGLIIHIEKNKILEIKFKKIGIKKLVAKYARLELC

SEQ ID NO: 43923 - DNA, 2301 bp, Bordetella parapertussis 12822
  CDS (1)..(2301): transl_table=11
atgatgctggaaaagctcaatcctgaacaacgcgctgcagtaacgctcgaaccgcaacacgccctggttctcgccggggcgggcagcggcaagacccgcgtactgacgacccggatggcctggctgattcaaaccggccaggccagtccatttgcgctgttggcagtcacctttaccaacaaggcggcgcgtgaaatgctcacgcgcatgtcgaccctgttgccgatcgacacgcgtggcctgtggatcggtaccttccacggcctgtgcaaccgcatgctgcgcgcgcatcatcgcgacgcgggcttgccgcaggcattccagattctcgataccaccgaccagctggccgccatcaagcgcctgctcaaggcgggcaatatcgacgacgagaagtacccgccacgcgatgtgcagcgtttcatcaacggtgccaaggaagaggggctgcgtcccggcgacgtcgaggcctacgatccgcaccggcgcaagctgatcgagatctaccagctgtacgaggcgcagtgccagcgcgagggcgtggtcgatttcgccgagctgctgctgcgcgcgtacgagctgctgtcgcgcaacgcgccggtgcgcgaacattaccagcggcgcttccgccatatcctggtcgatgagttccaggacacaaacacgctgcagtacaagtggctgcgtctgctggcaggcaccggggcggcgattttcgcggtcggcgacgacgatcagtccatctatgcgtttcgcggcgccaacgtcggcaacatggccgacttcgaacgcgattacgcacatggccgtgtcatccgcctggaacagaactaccgctcgtacggccacatcctggattcggccaatgccctcatcgggcacaacaccggacgcctgggcaagaacctctggaccgaacagggcgagggcgagccggtgcgcgtcatcgagcagccctccgacggcatggaggcgcaatggctggtcgacgagatccgcgcgttgatcaacgacggccgcatgcgcagcgaaatcgccgtgctctaccgcagcaacgcgcaatcgcgcgtgctcgagcatgcgctgttctcggtgggcatcccctacaaggtgtacggtggcctgcgcttcttcgagcgccaggaaatcaagcacgcgctggcctatctgcgcctgatcgccaatccgaacgacgacacctcctggatgcgggtggtcaactttccgacccgcggcatcggggcgcgcacgctcgagcagctcagcgacgcggcgcgcgcgcacgacaccagcctgttcggcgcggtggcccgcgtcggcggcaagggcggctcgaatctggcgcaattcgcgcagctgatcggacagatggcgcacgacacgcgcgagctgccgctgcccgaactggtggaccatgtcatcgaggccagcggcctgaaggcccactaccagaccgaacgcgaaggcgccgagcgcctggagaacctcaacgaactgatcaccgctgccacggtgttcgcggccgaggaaaacttcgaaggcttgccggccggcgtcgtgcccgatcacgatgtgagcggcgccctgatgccgggcgtcgtcgatgccccgcaacccgatacgctgggcggcctgacaccgttggcggctttcctgtcgcatgcggcgctggaagccggcgacaatcaggcgcaggtgggccaggacgcggtgcagctgatgaccgtgcacgccgccaagggccttgagttcgacgccgtgttcatcaccggcctggaggaagggctgttcccgcatgagaacagcatcatggagcccgccggcctcgaggaagagcggcgcctgatgtacgtggcgatcacccgggcccgggaaaggctgtatctcagcctggcgcaaagccgcatgctgcacggccagacgcgttacgccatgcgttcgcgttttctcgaagaaattcccgagcagcatctgaagtggctgagcccgcgcgccggcctgcatcagggcggcggcttcggcggcgcggcgtcggcctggagcagtcgcggcgacgcctttggccgcaagcctaccggcactgccgcacctcggcagccgcgtggcatggccagcggcgtcaccgtgggcgagcagcagttccgggtggggcagggcgtgcgccacgcgcgctttggcgacggcaccatcataggcctcagcggttcggggcaggacgcccaggcccagatccagtttcgcgacgtgggtgccaagacgctggcgctgggcatcgccaagctggacatcatcacggcctga

SEQ ID NO: 43924 - protein, 766 aa, Bordetella parapertussis 12822
MMLEKLNPEQRAAVTLEPQHALVLAGAGSGKTRVLTTRMAWLIQTGQASPFALLAVTFTNKAAREMLTRMSTLLPIDTRGLWIGTFHGLCNRMLRAHHRDAGLPQAFQILDTTDQLAAIKRLLKAGNIDDEKYPPRDVQRFINGAKEEGLRPGDVEAYDPHRRKLIEIYQLYEAQCQREGVVDFAELLLRAYELLSRNAPVREHYQRRFRHILVDEFQDTNTLQYKWLRLLAGTGAAIFAVGDDDQSIYAFRGANVGNMADFERDYAHGRVIRLEQNYRSYGHILDSANALIGHNTGRLGKNLWTEQGEGEPVRVIEQPSDGMEAQWLVDEIRALINDGRMRSEIAVLYRSNAQSRVLEHALFSVGIPYKVYGGLRFFERQEIKHALAYLRLIANPNDDTSWMRVVNFPTRGIGARTLEQLSDAARAHDTSLFGAVARVGGKGGSNLAQFAQLIGQMAHDTRELPLPELVDHVIEASGLKAHYQTEREGAERLENLNELITAATVFAAEENFEGLPAGVVPDHDVSGALMPGVVDAPQPDTLGGLTPLAAFLSHAALEAGDNQAQVGQDAVQLMTVHAAKGLEFDAVFITGLEEGLFPHENSIMEPAGLEEERRLMYVAITRARERLYLSLAQSRMLHGQTRYAMRSRFLEEIPEQHLKWLSPRAGLHQGGGFGGAASAWSSRGDAFGRKPTGTAAPRQPRGMASGVTVGEQQFRVGQGVRHARFGDGTIIGLSGSGQDAQAQIQFRDVGAKTLALGIAKLDIITA

SEQ ID NO: 43925 - DNA, 2301 bp, Bordetella bronchiseptica RB50
  CDS (1)..(2301): transl_table=11
atgatgctggaaaagctcaatcctgaacaacgcgctgcagtaacgctcgaaccgcaacacgccctggttctcgccggggcgggcagcggcaagacccgcgtactgacgacccggatggcctggctgattcaaaccggccaggccagtccatttgcgctgttggcagtcacctttaccaacaaggcggcgcgtgaaatgctcacgcgcatgtcgaccctgttgccgatcgacacgcgtggcctgtggatcggtaccttccacggcctgtgcaaccgcatgctgcgcgcgcatcatcgcgacgcgggcttgccgcaggcattccagattctcgataccaccgaccagctggccgccatcaagcgcctgctcaaggcgggcaatatcgacgacgagaagtacccgccacgcgatgtgcagcgtttcatcaacggcgccaaggaagaggggctgcgtcccggcgacgtcgaggcctacgatccgcaccggcgcaagctgatcgagatctaccagctgtacgaggcgcagtgccagcgcgagggcgtggtcgatttcgccgagctgctgctgcgcgcgtacgagctgctgtcgcgcaacgcgccggtgcgcgaacattaccagcggcgcttccgccatatcctggtcgatgagttccaggacacaaacacgctgcagtacaagtggctgcgtctgctggcaggcaccggggcggcgattttcgcggtcggcgacgacgatcagtccatctatgcgtttcgcggcgccaacgtcggcaacatggccgacttcgaacgcgattacgcacatggccgtgtcatccgcctggaacagaactaccgctcgtacggccacatcctggattcggccaatgccctcatcgggcacaacaccggacgcctgggcaagaacctctggaccgaacagggcgagggcgagccggtgcgcgtcatcgagcagccctccgacggcatggaggcgcaatggctggtcgacgagatccgcgcgttgatcaacgacggccgcatgcgcagcgaaatcgccgtgctctaccgcagcaacgcgcaatcgcgcgtgctcgagcatgcgctgttctcggtgggcatcccctacaaggtgtacggtggcctgcgcttcttcgagcgccaggaaatcaagcacgcgctggcctatctgcgcctgatcgccaatccgaacgacgacacctcctggatgcgggtggtcaactttccgacccgcggcatcggggcgcgcacgctcgagcagctcagcgacgcggcgcgcgcgcacgacaccagcctgttcggcgcggtggcccgcgtcggcggcaagggcggctcgaatctggcgcaattcgcgcagctgatcggacagatggcgcacgacacgcgcgagctgccgctgcccgaactggtggaccatgtcatcgaggccagcggcctgaaggcccactaccagaccgaacgcgaaggcgccgagcgcctggagaacctcaacgaactgatcaccgctgccacggtgttcgcggccgaggaaaacttcgaaggcttgccggccggcgtcgtgcccgatcacgatgtgagcggcgccctgatgccgggcgtcgtcgatgccccgcaacccgatacgctgggcggcctgacaccgttggcggctttcctgtcgcatgcggcgctggaagccggcgacaatcaggcgcaggtgggccaggacgcggtgcagctgatgaccgtgcacgccgccaagggccttgagttcgacgccgtgttcatcaccggcctggaggaagggctgttcccgcacgagaacagcatcatggagcccgccggcctcgaggaagagcggcgcctgatgtacgtggcgatcacccgggcccgggaaaggctgtatctcagcctggcgcaaagccgcatgctgcacggccagacgcgttacgccatgcgttcgcgttttctcgaagaaattcccgagcagcatctgaagtggctgagcccgcgcgccggcctgcatcagggcggcggcttcggcggcgcggcgccggcctggagcagtcgcggcgacgcctttggccgcaagcctaccggcactgccgcacctcggcagccgcgtggcatggccagcggcgtcaccgtgggcgagcagcagttccgggtggggcagggcgtgcgccacgcgcgctttggcgacggcaccatcataggcctcagcggttcggggcaggacgcccaggcccagatccagtttcgcgacgtgggcgccaagacgctggcgctgggcatcgccaagctggacatcatcacggcctga

SEQ ID NO: 43926 - protein, 766 aa, Bordetella bronchiseptica RB50
MMLEKLNPEQRAAVTLEPQHALVLAGAGSGKTRVLTTRMAWLIQTGQASPFALLAVTFTNKAAREMLTRMSTLLPIDTRGLWIGTFHGLCNRMLRAHHRDAGLPQAFQILDTTDQLAAIKRLLKAGNIDDEKYPPRDVQRFINGAKEEGLRPGDVEAYDPHRRKLIEIYQLYEAQCQREGVVDFAELLLRAYELLSRNAPVREHYQRRFRHILVDEFQDTNTLQYKWLRLLAGTGAAIFAVGDDDQSIYAFRGANVGNMADFERDYAHGRVIRLEQNYRSYGHILDSANALIGHNTGRLGKNLWTEQGEGEPVRVIEQPSDGMEAQWLVDEIRALINDGRMRSEIAVLYRSNAQSRVLEHALFSVGIPYKVYGGLRFFERQEIKHALAYLRLIANPNDDTSWMRVVNFPTRGIGARTLEQLSDAARAHDTSLFGAVARVGGKGGSNLAQFAQLIGQMAHDTRELPLPELVDHVIEASGLKAHYQTEREGAERLENLNELITAATVFAAEENFEGLPAGVVPDHDVSGALMPGVVDAPQPDTLGGLTPLAAFLSHAALEAGDNQAQVGQDAVQLMTVHAAKGLEFDAVFITGLEEGLFPHENSIMEPAGLEEERRLMYVAITRARERLYLSLAQSRMLHGQTRYAMRSRFLEEIPEQHLKWLSPRAGLHQGGGFGGAAPAWSSRGDAFGRKPTGTAAPRQPRGMASGVTVGEQQFRVGQGVRHARFGDGTIIGLSGSGQDAQAQIQFRDVGAKTLALGIAKLDIITA

SEQ ID NO: 43927 - DNA, 2409 bp, Prochlorococcus marinus str. MIT 9313
  CDS (1)..(2409): transl_table=11
atgagtttcctggctggcctcaatgacgctcagcgaagggcggtggatcatcacgagggcccgttgttgttggtggccggtgcgggcagcggcaaaacgcgagctctgacccatcgcatcgcccatctcatcggcgaacacggagccgatccgtctcagatccttgcggtgactttcaccaacaaggcggcccgggagatgaaggagcgtcttgagctgttgctggctcagcgtcttgcgcagagtcagtttgggcagccctggagcaccctgccacctgtggagcagcgtcagctgcgcacccgcatctaccgcgaggtgaccaaggagctgtggatcggcaccttccatgccctgttcgcgcgaatgttgcgttacgacatagacaagttcaaagacaaggagggactcacctggacgaagcagttctcgatttacgacgaggccgatgcccagagtttggttaaggagattgtgactcaggagctacagctcgatcccaagcgctttgagcctaagaaggtgcgctgggcgattagtaacgccaaaaatcaaggctggtttcctgatcaattggcagcacaggtcgatggtcagcgaggcaagctcacggttgagacgtatcggcgttatcgcaaggcattagcggcgaacaacgctcttgattttgacgacctgctgttgttgcccgtccagttacttcagcagaacgagcagatacgacgttattggcacaatcgttttcgacatgtgttggttgatgaataccaagacaccaatcgcactcagtacgagttgatcaagttgttggttaccgatggtcgtgaacctgaaacctttgaggattggcagggccgttcagtttttgtggtcggcgatgcagatcaaagcatctacagcttccgtgcggctgacttcacgatcttaatgggctttcaggacgactttggcgacaaagcatcagacgattccactcgcaccatggtgaagttggaggagaattatcgctctacctcaacaattctggaggcagctaatgccttgatcgctaacaatacagagcggattgacaaggtattgcgagctacccgtggcgagggggagttgatcacccttactcgctgtgacgatgagatcgcagaagctgaagctgtagtgcatcgaatgcgcatgctggaagctgctcatccagaatttcgctggggagatgtggcagtgttgtaccgcaccaatgcccagtcaagggcgattgaggagtcgttggtgcgttggcgtattccttacattgtcgtgggcggattacgtttttatgacaggcgtgaaatcaaggatgttttggcctatttacgcttattggtcaaccccgccgatacggtgagcctgctcagagtcatcaatgtgcccaagcgaggcattggcaagaccaccttgcagagacttgctgatgctgccaatcaacttgggattcctttgtgggatgtggtgagtgatgccgaagcagtgcgctcactaggaggcagatcggcgaaggggttgttgcagttctgtgaattgatcaatgacttgcaatgctcgagtcaagatcagattccttcggagatgattcagcaggtgatggagaagagtggctatatcagtgagctgataactgaagctaccgatgaggcagaggagaggcgacgcaatttgcaagaacttgtgaatgctgctttgcaataccaggaagaaaatgaagagagcaatcttgagggctttttagcctccgctgcgttggccagcgatgctgatagcaaggatacggctgctgatcgggtgacgttaatgaccttgcatagcagtaagggactggagtttcccttggtctttctggttggtatggagcaggggcttttccctagctatcgctcccttgatgatcaatcctctttggaggaagaacgacgcctttgctatgtggggatgacacgtgccaaagaacgtttgtttttgtctcatgccagtgagcgaagactttggggtggcatgcgacagcctgctgttccctcactatttcttgctgagttgcccgagggtttggtgcagggtgatctccctcaaattggtggtgtggcattacggcgtgagcgacggcttgaccgtttgacgcgggttgatcgcgctgacaatcaaaggatcaaagtcggtggtgtgagcggagcccctagcaatgcagtgcggcggcggcaggctgggcctgctccaggcaaggcatgggtcgtgggcgaccgggtcgttcattccagctttggcgaaggggagattacccataccttcggcagtggcgaaaaagtgtcgattgctgtcaagtttgctggtatggggccaaagattcttgatccacgtttggccccgattgagcctttggattag

SEQ ID NO: 43928 - protein, 802 aa, Prochlorococcus marinus str. MIT 9313
MSFLAGLNDAQRRAVDHHEGPLLLVAGAGSGKTRALTHRIAHLIGEHGADPSQILAVTFTNKAAREMKERLELLLAQRLAQSQFGQPWSTLPPVEQRQLRTRIYREVTKELWIGTFHALFARMLRYDIDKFKDKEGLTWTKQFSIYDEADAQSLVKEIVTQELQLDPKRFEPKKVRWAISNAKNQGWFPDQLAAQVDGQRGKLTVETYRRYRKALAANNALDFDDLLLLPVQLLQQNEQIRRYWHNRFRHVLVDEYQDTNRTQYELIKLLVTDGREPETFEDWQGRSVFVVGDADQSIYSFRAADFTILMGFQDDFGDKASDDSTRTMVKLEENYRSTSTILEAANALIANNTERIDKVLRATRGEGELITLTRCDDEIAEAEAVVHRMRMLEAAHPEFRWGDVAVLYRTNAQSRAIEESLVRWRIPYIVVGGLRFYDRREIKDVLAYLRLLVNPADTVSLLRVINVPKRGIGKTTLQRLADAANQLGIPLWDVVSDAEAVRSLGGRSAKGLLQFCELINDLQCSSQDQIPSEMIQQVMEKSGYISELITEATDEAEERRRNLQELVNAALQYQEENEESNLEGFLASAALASDADSKDTAADRVTLMTLHSSKGLEFPLVFLVGMEQGLFPSYRSLDDQSSLEEERRLCYVGMTRAKERLFLSHASERRLWGGMRQPAVPSLFLAELPEGLVQGDLPQIGGVALRRERRLDRLTRVDRADNQRIKVGGVSGAPSNAVRRRQAGPAPGKAWVVGDRVVHSSFGEGEITHTFGSGEKVSIAVKFAGMGPKILDPRLAPIEPLD

SEQ ID NO: 43929 - DNA, 2142 bp, Chromobacterium violaceum ATCC 12472
  CDS (1)..(2142): transl_table=11
atgagcgatctgttagccggcctgaaccccgaacaactgcgcgccgtcacctggcccgccaagagcgcgctggtgctggccggcgccggcagcggcaagacccgggtgctgaccacccgcatcgcctggctgttgtccaccggacagacctctccggccggcgtgctggcggtgaccttcaccaacaaggcggcgcgcgagatgcagacccggctgtcggcgctggtgccggtcaacgtccgcaatatgtggataggcaccttccacggcctgtgcaaccgcttcctgcgcatccactaccgcgacgccggcctgccgcaaaccttccagatcctggactccgccgaccagcaggccgcgatcaagcgcctgctgaaaagcctggagctgtcggacgagaaatacccgccgcgcgcagtgcagtccttcatcaacggcaacaaggaagccggcctgcgcgccgaatcgctgccgccggcgctgaacccgtacgaggccaagctggtggagctgtacgccgcctacgacgcccagtgccggcgcgagggcgtggtggacttcgccgagctgctgctcagaagctacgagctgttgtcgcgcaacgaggcgctgcgcgcccattacagcagccgcttttcccacatcctggtggatgagttccaggacaccaaccgcctgcaatacgcgtggctgaagctgctggccggcgagcacggcgcgctgttcgcggtcggcgacgacgaccagagcatctacgccttccgcggcgccgaggtcggcaatatgcgcgcgctgctgtccgacttccacgtggccgagccggtgcgcctggagcagaactaccgctcgatgggcaacatcctcaacgccgccaacgcgctgatcgaacagaacgacggccggctgggcaagaacctgtggaccgatgccggcgagggcgacaagatccgcttcttccaggccggcagcgacggcgaggaggccgagttcatcgtcgacgaggcgaagagcctgcaccgcgacggcctggcgctgtccgacatcgccgtgctctaccgctccaacgcccagtcgcggctgctggagcacgtgctggtcaacgcccagatcccctaccgcatctacggcggcctgcgcttcttcgaacgccaggagatcaagcacgcgctggcctatctcaggctagtggccaacccggacgacgacaacgcgctgctcagggtgatcaacgtgccggcgcgcggcatcggcgcgcgcagcgtggaaaacctgcaggccgccagccgcgagcagggcgtcacgctgtggcaggcggcctgccagagcggcggcggccgcaccgccgccaagatcggcgagttcgtgctgctgatcgaaaaactgcgcgagcagtgccgcgacttcaacctggccgagaccatcagcctggtgatagaccgcagcggcctgcgcgacatgtacgagcaggacaagaaggacggcgaggagcgcctggccaacctggacgagctggtcaacgccgccgccagcttcctgcccgaccagccggaacaggcgctgaccgagttcctggccgccgccagcctggaagccggcgagcaccaggccgacgccggcagcgacgcgctgcagctgatgacggtgcacgcggccaagggcctggaattcgacgcggtgttcgtcagcggcctggaagaaggcctgttcccgcacgagaacagcgtgatggacggcaagggcctgcaggaagagcgccggctgatgtacgtggccatcacccgcgcccgcaagcggctgtacctcagcagcgcgcagagccggatgctgcacggccagagccgctaccccatcccgtcgcgcttcatcgacgagatcccggccgaactgatccattcgctgtctgctacagtgaaagcacccgttgcgccgcaacaggcgaggcgcgccgccgccgcgccgcgccggcaggcggaaaacgcctacggcctgtccatcggccaggcggtcagccacgccaagttcggcatcggcgtggtgatagacgccgagggcaacggggaggatgtgcggctgcagatcaatttcgccgaacacggcgtcaaatggctggatctgcgctatgcgaaactgactccggcctga

SEQ ID NO: 43930 - protein, 713 aa, Chromobacterium violaceum ATCC 12472
MSDLLAGLNPEQLRAVTWPAKSALVLAGAGSGKTRVLTTRIAWLLSTGQTSPAGVLAVTFTNKAAREMQTRLSALVPVNVRNMWIGTFHGLCNRFLRIHYRDAGLPQTFQILDSADQQAAIKRLLKSLELSDEKYPPRAVQSFINGNKEAGLRAESLPPALNPYEAKLVELYAAYDAQCRREGVVDFAELLLRSYELLSRNEALRAHYSSRFSHILVDEFQDTNRLQYAWLKLLAGEHGALFAVGDDDQSIYAFRGAEVGNMRALLSDFHVAEPVRLEQNYRSMGNILNAANALIEQNDGRLGKNLWTDAGEGDKIRFFQAGSDGEEAEFIVDEAKSLHRDGLALSDIAVLYRSNAQSRLLEHVLVNAQIPYRIYGGLRFFERQEIKHALAYLRLVANPDDDNALLRVINVPARGIGARSVENLQAASREQGVTLWQAACQSGGGRTAAKIGEFVLLIEKLREQCRDFNLAETISLVIDRSGLRDMYEQDKKDGEERLANLDELVNAAASFLPDQPEQALTEFLAAASLEAGEHQADAGSDALQLMTVHAAKGLEFDAVFVSGLEEGLFPHENSVMDGKGLQEERRLMYVAITRARKRLYLSSAQSRMLHGQSRYPIPSRFIDEIPAELIHSLSATVKAPVAPQQARRAAAAPRRQAENAYGLSIGQAVSHAKFGIGVVIDAEGNGEDVRLQINFAEHGVKWLDLRYAKLTPA

SEQ ID NO: 43931 - DNA, 2298 bp, Porphyromonas gingivalis W83
  CDS (1)..(2298): transl_table=11
atgtccgaagattatctctcatcattgaacgacagccaaaaggctgccgttctttataatgacgggcctgccttggtgatagccggggcaggctccggcaaaacacgggtactcgtttataaattgctgcacctgattcactccggctacgatcccgcaaggctgatggcactgacctttacgaacaaggctgccaaagagatgaaagaacgtgtggcaagcgagatcggacctgctgcttacaggatacagatgggtacattccattccgttttctctcgtatacttagagagaatgcgacacacctcggatatactcgcgacttcagcatatacgatacgaacgataccaagagcttgctgcgtcatgtgatgaagcgcatgaatatcgatgataaggtatatcgcctcaacgctgtacaacatcgtatatcgatggctaagaatcagctgatctctcccgaatcgtatgctgccaataaggatctctcccgatatgatatagactgtcgaatgcctcggatggcagagatttattctctctataccattctgtgcaagcagaataatgccatggatttcgatgatctgcttttcaaaatcaatgtcctttttcgtgattttccggatgtcttgcagacctaccgtgaccgcatcgattatttattgatcgacgaatatcaggataccaactttgcacagtatttgattgccaggcagttgatgggggagaaaggcaaggtattcgtcgtgggggatgatgctcagagtatatacagtttccgtggagccaaagtggaaaacattctgggcttttcaaagtcgttccccgggagcaaacttttcaaacttgaggagaactatcggagtacacagagcatcgtcaatgctgccaatagcttgattgctcacaatgaggggcgaatccccaagcaagttttttcgaacaaacaagtaggtgagcgtattcgcctgacgggttgtctgtcggggtatttggaggcttatacggtagcggattcgatcgtcgagcgacgcatgcaagagcattgtccttattccgatttcgccattctgtaccgcactaatgcgcagagccgagttttcgaggaagcacttcgcaaacacaatatcccttttcgtatatacggtgggctttcgttctattcgcgaaaagagatcaaggacgtcctggcctattttcgtctaatcgtaaatcccaatgatgacgaagcactcaggcgtgtaatcaattatcccaagcgaggaataggagataccactctgtctcgtcttaacgagatagccacggcttcttctcgttcgttgtgggacgtactgtccgaatcgcagaagggtcttcccgatcttagtgctacagcccgacgccgtcttggtgagttcgtttccctcatccgtgaacttcaggagtccgaatacgaatctttgtacgaacaagcagccgatgtggtcaaacggagcgggatctcggccgaaattttttctgacaaaagtatcgagggaataagtcggcaggaaaacctcaaagaattgctcaacggcattgaggaatacggcacttcttacgccgaagaaaggggagagaaaccctccttgggaacgttcctaaacgaggttgtactcctgacggaccaagataccgagggagtggtcggagattatgtcaccctgatgacggtacatgctgcaaagggacttgagttcaagcatatttttatcgttggtatggaagaaaatcttttcccttcgatgatgaatgctaccgaacagggtcttgaggaagagcgtcgtctcttctatgtggctatcactcgtgccaaagaatcctgtcatatcagttttgctgcggaacgctcccgaaacggacgaacagagcgttcgcgtccgagccgcttcttacaagaacttgatgatgcatacgttgagcgacgtgtgccacaagaaatgttaggagggcacagccaaggtgacgaacttcccatccatttttctcggagcgatgctttcgaaagattgcctcagccggagccgattcgcagacggctggtacgcgtcggctcctctcctgttcatgaggagcgaatggttcatcagcagataggagatttgtgcgtgggcgacacggtggcacatgcgcgcttcggaataggaatcatcgaatccctcgaaggagaaggcgataatgccaaggctgaggtttcgtttcagcaggtaggacgcaaacgtctgttacttcggtttgccaagctatccaaagtggaaaaagattcgatctga

SEQ ID NO: 43932 - protein, 765 aa, Porphyromonas gingivalis W83
MSEDYLSSLNDSQKAAVLYNDGPALVIAGAGSGKTRVLVYKLLHLIHSGYDPARLMALTFTNKAAKEMKERVASEIGPAAYRIQMGTFHSVFSRILRENATHLGYTRDFSIYDTNDTKSLLRHVMKRMNIDDKVYRLNAVQHRISMAKNQLISPESYAANKDLSRYDIDCRMPRMAEIYSLYTILCKQNNAMDFDDLLFKINVLFRDFPDVLQTYRDRIDYLLIDEYQDTNFAQYLIARQLMGEKGKVFVVGDDAQSIYSFRGAKVENILGFSKSFPGSKLFKLEENYRSTQSIVNAANSLIAHNEGRIPKQVFSNKQVGERIRLTGCLSGYLEAYTVADSIVERRMQEHCPYSDFAILYRTNAQSRVFEEALRKHNIPFRIYGGLSFYSRKEIKDVLAYFRLIVNPNDDEALRRVINYPKRGIGDTTLSRLNEIATASSRSLWDVLSESQKGLPDLSATARRRLGEFVSLIRELQESEYESLYEQAADVVKRSGISAEIFSDKSIEGISRQENLKELLNGIEEYGTSYAEERGEKPSLGTFLNEVVLLTDQDTEGVVGDYVTLMTVHAAKGLEFKHIFIVGMEENLFPSMMNATEQGLEEERRLFYVAITRAKESCHISFAAERSRNGRTERSRPSRFLQELDDAYVERRVPQEMLGGHSQGDELPIHFSRSDAFERLPQPEPIRRRLVRVGSSPVHEERMVHQQIGDLCVGDTVAHARFGIGIIESLEGEGDNAKAEVSFQQVGRKRLLLRFAKLSKVEKDSI

SEQ ID NO: 43933 - DNA, 2382 bp, Gloeobacter violaceus PCC 7421
  CDS (1)..(2382): transl_table=11
atggtcctcggtatggatgctttgctcaatccttcgcagcaaaaagcggtggagcgcttcaacggtccgctgttggtggtggcgggtgcgggtagcggcaagacgcgggtactgacctatcgcatcgcccatctcatcgagacttaccaggtggaccccgagcacatcctggcggtcaccttcaccaacaaagcagcgggcgagatgaaggagcgcatcttgcaactcttttgcgagcgcaccgccagaagccgcggcggtgaggcgtttgccgccctgcccgaccccgagcggcgcgccatcgcaggccgggtgcgccgggaattgattcagcctttgtgggtggggacttttcatgccctgtgcgcccgtatgctgcgctacgacatcgacaagtacaccgaccaacgcgggcgcacctggcagcgcaacttcacgatcttcgacgaatcggacgtgcaggatcagatcaaagacatcgtcaccaagcagctcaacctggacgaccgccgctacgtgccccgctcggtgcgcttcgccatcagcggcgccaaaaaccagggcctttcgccggaagaataccagcactcagaaggcggttcgctgcgcgcccgcacgatcgcccaggtctacgagcgctaccaggaccagctggcgcgcaacaacgccctcgatttcgacgatctgatctgggtgccggtgcagttgttgcgccggcgccccgacgtgctcgattactggcaccgccgcttccgtcacatcctggtcgacgagtaccaggacaccaaccgcacccagtacgacctgattcgcctactcgccaccaacaaccaacccaaaagcgagtgggactggcgcgaccggtcggtctttgtggtgggcgacgcggaccaggccatctacagctttcgccaggcggattttcgcatcctgatggattttcagtccgattttggcgacggcctagccgacgacgagaccgagacgctcatcaagctcgaagagaactaccgctcctcggccacgattctcgatgtcgccaacgaactgatcgccaacaacatcgagcgcatcgacaaggtgctgagggccacccgtccggcgggcttgcccgtgtcgctgcacgaggcggaggacgaggtggccgaagctgagtacattgtcgggcaactgcgcaaactcaaagacgccgacactcgtccctggaacgactttgcggtactctaccgcgtcaacgcccagtcgcagcccatcgagcaggcgctttcgcgctggggggtgccctacacggtggtgggcggcttgcgcttctacgaccgccgtgagatcaaggacgttctgagttacctcaaggcgatccacaatcccgccgactcggtcgccctcaagcgctcgatgtccgcgccgcgccgcggcatcggcaaaacgacactggataagctcgaagccggggccgggatgctccagacttcgctatggcaactgctcaccgacgagacgagtattaaaaatttggccgggcgcaccagcggaccaattctccagttcgtgcgctttgtcgagcgcctgcaggagctggccgcccgggtgcgcgtctcggaactgctcgatacggttctcaaagagtcgggctacgtgcagatgcttcaggaagaaggcaccgaggaagccgaggggcgcctcgaaaacgtcctggagttgcgctcggtggtccagcgcttcgaagaagaaagcgaagatcccgaaaacgcgacgctcgaagcctttttggccaatgtctcgctcgcgtcggatctggacaatctcgaagcgggggccgagcgcatctcgctgatgacgctgcacgccgccaagggtctggagtttccggtggtgtttttgggcggcctcgaagacggcctttttccgcactttcgggcgattcaagacggtgacagcgccgccatcgaggaggagcgccgattgtgctacgtggggatcacccgcgccaaggagcgtctgttcttgagctatgcccaggcccgccgcctctacggcgaccgccagcccgccatcccgtcgcagtttctcaaggaactgcccgccgagaaactggccggtacccgcgtgcgcaagggtcttgccgaccggaggcgcgaccgggccgagcggattgccgcccgcccggccgccgtcccgccgctcgccccgcccgcgcggcgcaaaagccccgcccagaactgggcggtgggcgaccgggtcgagcacgaccagttcggtctcgggcagattacccacgtcctgggtgtgggcgagaagcagtacctggccatcagcttccccggccagggcaaaaaagtgatcgacccgcgcctggcgcctctgcgcaagctggctgagtga

SEQ ID NO: 43934 - protein, 793 aa, Gloeobacter violaceus PCC 7421
MVLGMDALLNPSQQKAVERFNGPLLVVAGAGSGKTRVLTYRIAHLIETYQVDPEHILAVTFTNKAAGEMKERILQLFCERTARSRGGEAFAALPDPERRAIAGRVRRELIQPLWVGTFHALCARMLRYDIDKYTDQRGRTWQRNFTIFDESDVQDQIKDIVTKQLNLDDRRYVPRSVRFAISGAKNQGLSPEEYQHSEGGSLRARTIAQVYERYQDQLARNNALDFDDLIWVPVQLLRRRPDVLDYWHRRFRHILVDEYQDTNRTQYDLIRLLATNNQPKSEWDWRDRSVFVVGDADQAIYSFRQADFRILMDFQSDFGDGLADDETETLIKLEENYRSSATILDVANELIANNIERIDKVLRATRPAGLPVSLHEAEDEVAEAEYIVGQLRKLKDADTRPWNDFAVLYRVNAQSQPIEQALSRWGVPYTVVGGLRFYDRREIKDVLSYLKAIHNPADSVALKRSMSAPRRGIGKTTLDKLEAGAGMLQTSLWQLLTDETSIKNLAGRTSGPILQFVRFVERLQELAARVRVSELLDTVLKESGYVQMLQEEGTEEAEGRLENVLELRSVVQRFEEESEDPENATLEAFLANVSLASDLDNLEAGAERISLMTLHAAKGLEFPVVFLGGLEDGLFPHFRAIQDGDSAAIEEERRLCYVGITRAKERLFLSYAQARRLYGDRQPAIPSQFLKELPAEKLAGTRVRKGLADRRRDRAERIAARPAAVPPLAPPARRKSPAQNWAVGDRVEHDQFGLGQITHVLGVGEKQYLAISFPGQGKKVIDPRLAPLRKLAE

SEQ ID NO: 43935 - DNA, 2163 bp, Photorhabdus luminescens subsp. laumondii TTO1
  CDS (1)..(2163): transl_table=11
atggacgtctcctatctgctcgaaagtctgaatgacaaacaacgggaagctgtagctgctccgcggactaatatgttggtattagctggcgcggggagtggtaaaacccgggttctagtacaccgaattgcttggttgctatcggtggagaaggcttcgccattttctgttatggctgtgaccttcaccaataaagcggctgcggagatgcgtcatcggattgaaaacttgatcggtaccagtcaaggtggaatgtggattggtacgtttcacggtttggctcatcgtttattacgagcccatcatctggatgctaatttgccacaggattttcagattcttgacagtgaagatcaaaatcgcctgcttaaacgcattatcaaagcgatgaatctggatgataaacaatggccagctcgtcaaggcatgtggtacatcaatggtaaaaaagatgaaggattgcggccacagcatattgaaagttatggcaatcctgttgaggcgacatggcagaaaatttatcaggcttaccaggaggcttgtgatcgggccgggctagtggattttgctgagcttttactgcgagctcatgagttgtggctgaataaacctcagatcctgcaacattaccgtggccgctttactaatattctagtggatgagtttcaggacactaacagtattcaatatgcttggatccatctgttggcaggagaaacaggcaaagtgatgattgttggggatgatgatcaatctatttatggttggcgtggggctcaagttgagaatattcagcgtttcctgaaagattttcccggtgctgaaactatccgtttggagcagaattaccgttccaccagtaatattctgaaagttgccaatacactgattgccaataacagtgatcgtctgggtaaaaatttgtggactgatggggtagagggtgagcccatctccctttattgtgcatttaatgaactggatgaagcccgttatgtggtcagccggataaaaaactggcttgaaaatggtggtgccctgaaaaactgtgccatactttaccgcagcaacgcgcagtcccgtgtactggaagaggcgctgttacaggcatcaatgccataccgtatttatggtggtcaacgattctttgaacgtcaggaaattaaagatgcactggcttacctgcgtttgattgccaatcgtcatgatgacgcggcgtttgaacgtgtggtgaatacgcctacccgtggtattggtgacagaacgttagatattgtgcgccaggcggcgcgtgaacggcagcaaacgttgtgggattgttgtcagatattgctgcaagagaaagtgttggctgggcgtgccgctgcttccttacagcgttttattgaactaattgacgcattatcgacagaaactgaagatatgccattgcatgttcagactgacaggattatccgtgattctggcctgcgagcaatgtatcagcaggaaaaaggtgaaaaagcgcaggcgcgtattgaaaaccttgaagaacttgtcacggcgactcgccagtttagttatcaggatgaggatgaaaatttcacgccattgcaggcgtttctttcccatgctgcgctggaatcgggagaagggcaggccgatgcctatcaggattcggtgcaactgatgacattacattcggcgaagggactggaattcccacaggtatttattgttggtatggaagaaggcatgttcccaagtcagatgtcgattgaagaaggtggacgtttggaagaggagcgtcgcttggcttatgtgggtctgacacgtgcaatggaaaagctgaccatcacttatgccgaaagtcgtcgtttatatggcaaagaggtttatcatcggccatctcgttttattggggaactgccgtcagaatgtattgaagaagttcggttacgtgcgacagtatctcgtccggttagtcatagtcggttaggtacaccaattagcgccaatgatagcggttatgctcttgggcaacgtgttcgtcatcctaaatttggtgaaggaaccattgtcaatatggagggaagtggtgaacatagccgattgcaaatcgcgtttcaaggagaagggattaagtggctggttgctgcttatgccagacttgaaatggtctga

SEQ ID NO: 43936 - protein, 720 aa, Photorhabdus luminescens subsp. laumondii TTO1
MDVSYLLESLNDKQREAVAAPRTNMLVLAGAGSGKTRVLVHRIAWLLSVEKASPFSVMAVTFTNKAAAEMRHRIENLIGTSQGGMWIGTFHGLAHRLLRAHHLDANLPQDFQILDSEDQNRLLKRIIKAMNLDDKQWPARQGMWYINGKKDEGLRPQHIESYGNPVEATWQKIYQAYQEACDRAGLVDFAELLLRAHELWLNKPQILQHYRGRFTNILVDEFQDTNSIQYAWIHLLAGETGKVMIVGDDDQSIYGWRGAQVENIQRFLKDFPGAETIRLEQNYRSTSNILKVANTLIANNSDRLGKNLWTDGVEGEPISLYCAFNELDEARYVVSRIKNWLENGGALKNCAILYRSNAQSRVLEEALLQASMPYRIYGGQRFFERQEIKDALAYLRLIANRHDDAAFERVVNTPTRGIGDRTLDIVRQAARERQQTLWDCCQILLQEKVLAGRAAASLQRFIELIDALSTETEDMPLHVQTDRIIRDSGLRAMYQQEKGEKAQARIENLEELVTATRQFSYQDEDENFTPLQAFLSHAALESGEGQADAYQDSVQLMTLHSAKGLEFPQVFIVGMEEGMFPSQMSIEEGGRLEEERRLAYVGLTRAMEKLTITYAESRRLYGKEVYHRPSRFIGELPSECIEEVRLRATVSRPVSHSRLGTPISANDSGYALGQRVRHPKFGEGTIVNMEGSGEHSRLQIAFQGEGIKWLVAAYARLEMV

SEQ ID NO: 43937 - DNA, 2175 bp, Vibrio vulnificus YJ016
  CDS (1)..(2175): transl_table=11
atgatcgatccttcacttcttctcgatggcttgaacgacaaacagcgtgaggctgtggccgcacctttggaaaacttgctggtgttggcaggcgcaggcagtggtaaaacgcgcgttcttgtgcatcgtattgcttggctaatgtcagtcgagcaggcttcgccgttttctattatgtctgtgacctttaccaataaggcggcggcggagatgcgcggtcgaatcgaagagttgatgatgggcagtgcatcgggcatgtggaatggcaccttccacggtatttgccaccgcattctcagagcgcactatctggatgccaagctgccggaagatttccaaattattgatagcgatgatcaacaacgtttgcttaagcgactgatcaaagcacaaaacctggatgacaaacagtggccagcgcgccaagtcgcttggtggatcaatggcaaaaaagacgaaggattgcgccctgcgcacatcgatgcctaccacgatcccgtgaccaaaacctatctacagttgtacaccgcctatcaagaagcgtgcgatcgcgcaggcttggtcgactttgcggagatcttgctgcgtgcgcatgagctactgcgtgagaacaaatttatccgcgaacactatcaagcgcgctttaaacacatcttggtggacgagttccaagacaccaacaacattcaatacgcttggctgcgtatgatggcggggcctgaatgccatgtgatgatcgtcggtgatgatgaccagtcgatttacggttggcgtggcgcgaaagtggaaaacatcgaaaagttcacccttgagtttccgagcgtcaacaccattcgcctcgagcaaaactaccgttcgaccaaaaccatcctagaagcctcaaacgcgttgattgccaacaataccgagcgcatgggcaaagagctgtggaccgatggcgtcgaaggtgaaccgatctcgatttattctgcttacaacgaattggatgaagcgcgttttgcggtgaacaaaatcaaagagtggcaggacaaaggcggcgtgttgaacgacgcagcgatgctttatcgcaataacgcccagtcgcgtgtactggaagaagcgttgattcaagcgggtttgccttatcgcatttacggcgggatgcgattcttcgagcgccaagagatcaaagatgcattgagctatctgcgcctcatcgccaaccgcaatgatgacgcggcctttgaacgtgtggtcaataccccaacgcgtggattaggggacaaaacgttggaaacggtgcgttttgccgcgcgcgatcgtggctgcactttgtgggaagccagtatcgctttgatcgaagagaaagtgttaacggggcgtgctgctggtgcgttaagtcgctttatcgagctgatcacggcgctggaagacgacagctttgaaatgccactgcacattcaaaccgaccatgtgatcaaatcctcaggcttgtacaccatgtatgagcaagagaaaggcgagaagtccaaggctcgcattgagaacttggaagagctggtcacggcgacacgtcagtttgaaaaaccggaagaagccgaagagatgagtttgctcactgctttcttaacccatgctgctttggaagcgggtgaaggtcaagcggacgatttcgaagacgcggtacaactgatgaccttacacagcgccaaaggattggagttcccattagtgtttatggtgggcgtggaagaaggcatgttcccgagccagatgtctgccgaagaagcgggccgcttagaagaagagcgccgtttgtgctacgtgggcatgactcgggcaatgcagaagctctatattacctacgctgaaatgcgtcgtttgtacgggcaagacaaatatcataaaccatcacgttttatccgagagctgccggaaagctgcttggatgaagtgcgcatgaaagcgcaagtcagccgtcctgccagcagtggtcgctttagccaaactgtggtcaaagagagcttcaatgaaacgggcttttcgctcggctctcgtgtgcgtcacccgaagtttggtgaagggacgatcatcaactttgaaggcagtgggccacaaagtcgcgttcaagtggcctttaatggggaaggcattaagtggttggtgaccgcttacgcgaggttggaaaaactgtga

SEQ ID NO: 43938 - protein, 724 aa, Vibrio vulnificus YJ016
MIDPSLLLDGLNDKQREAVAAPLENLLVLAGAGSGKTRVLVHRIAWLMSVEQASPFSIMSVTFTNKAAAEMRGRIEELMMGSASGMWNGTFHGICHRILRAHYLDAKLPEDFQIIDSDDQQRLLKRLIKAQNLDDKQWPARQVAWWINGKKDEGLRPAHIDAYHDPVTKTYLQLYTAYQEACDRAGLVDFAEILLRAHELLRENKFIREHYQARFKHILVDEFQDTNNIQYAWLRMMAGPECHVMIVGDDDQSIYGWRGAKVENIEKFTLEFPSVNTIRLEQNYRSTKTILEASNALIANNTERMGKELWTDGVEGEPISIYSAYNELDEARFAVNKIKEWQDKGGVLNDAAMLYRNNAQSRVLEEALIQAGLPYRIYGGMRFFERQEIKDALSYLRLIANRNDDAAFERVVNTPTRGLGDKTLETVRFAARDRGCTLWEASIALIEEKVLTGRAAGALSRFIELITALEDDSFEMPLHIQTDHVIKSSGLYTMYEQEKGEKSKARIENLEELVTATRQFEKPEEAEEMSLLTAFLTHAALEAGEGQADDFEDAVQLMTLHSAKGLEFPLVFMVGVEEGMFPSQMSAEEAGRLEEERRLCYVGMTRAMQKLYITYAEMRRLYGQDKYHKPSRFIRELPESCLDEVRMKAQVSRPASSGRFSQTVVKESFNETGFSLGSRVRHPKFGEGTIINFEGSGPQSRVQVAFNGEGIKWLVTAYARLEKL

SEQ ID NO: 43939 - DNA, 2220 bp, Geobacter sulfurreducens PCA
  CDS (1)..(2220): transl_table=11
atgaaattgctcgataatcttaaccctccccagcgggccgcggttcttcacggcgaaggaccgctcctggtcctggccggtgccggttccggcaagaccagggtcatcgtccaccggatcgctcacctgatccgcgagcggggtgtccccgcccggcagattcttgccgtgaccttcaccaacaaggccgccggcgagatgcgcgaacgggtggaaaagctcgtggggggtgaggttcccctgatcgccacctttcactccacctgcgcgcggatccttcgccgggagattcaccacctgggctacgattcctcttttgccatctatgatgacaaggactccggcaagctcctcaaggaagtgatggccggtctcggtctcgacgagaagcgtttccctgcgacctcgcttgcctcggccatcgacgactgcaagaaccgggggcttgcgccggaggacctgccagccgacaccttcaccggcgaggtggtgggccgcgtctacgccgcctaccaggagcggttgaagaagtgcaacgccctcgacttcggcgacctcatcatgctgaccgtccgcctcttcgaggagcaccccgtggtgcttgagcgctaccgggaccagtggcgctggatcctggtggacgaataccaggataccaacccgatccagtaccggctcgtgcgcctattggccggtgagcaccgcaacctctgcgtggtgggtgacgatgaccaatccatctatcgctggcgcggggccgacatccgtaacatcctcgacttcgagaaggacttccccggcgtcaccaccatcaagctcgagcagaactaccgctccacccggaacatccttgcggcggcgggagccgtggtggcacgcaaccggggtcgcaaggccaagaccctctggagcgagaacccgccgggcgaccctatcgtttaccgccgtctggccgacgagcgggatgaggcccgcttcgtctgccgtgagatcgagcgctacgtacgccgtggcggcgacctccgggacgtggcggtcttctaccgcaccaatgcccagtcccgggtggtggaagacgctctggtggccgacggcatcccctaccacatggtgggcggcatgcggttctatgagcgtatggaggtaaaagacgtccttgcctatctgcgggtcctggcgaacccggctgacgaggtttcgctcaagcggatcatcaacgttcccgctcgggggatcggtcccggcaccgtggacaagatttccgagctggccgtccgccgggggatcaccgtcctcgacgccctgggtgaggcggccacgggcggactcctctcctcggcaccccggggtaaggtggctgcctttgcagcagtcatggagaggtttttcgccctgcgcgatcaactccccctggcagaactcaccacccgcatcatcgaagagtcaggctacgcggaccggcttcggcaggagcggaccgacgaggccgcggaccggctcgccaaccttcaggaactcgtggctgccatggaagagttcgagcggaccagcgatgagcggggacttgctccgttcctggaacaggtggccctcgtctcggatctggagcgtagcggcacgggccgcgagtcggcaacgcttatgaccctgcacgcggcaaaggggctcgagtttcccatggttttcatgatcggcatggaggagaagctctttccccatgtccgctccctggacgaccccgaggccatggaggaggagcgccggctctgctacgtggggatgacccgggcacgggagcggctctgcctcaccaatgcccggcgccggcggatcttcggccaggaccaggtgaacatgccctcccgcttcatcgccgacatcccccggaacctcctggacctggaggatgaatggcagcaacccgccctcggctccgtcgcgcccgacaccgccgggcgggggcgggagcccgcgcgtcacaacctggcctccatcctcgaaaccgagatcgagccggatttcgccgacgtggagatcgtccccgtcgaacccgaagaaagcggcgtctggctcggcatgaaggtacggcacggaaagttcggtgtcggcaccatccggaagattgaagggcagggggatgagcagaaggtgatcgtctggttcaactcggtggggccgaagaagcttctggtccgctttgccggtctggagagggtctag

SEQ ID NO: 43940 - protein, 739 aa, Geobacter sulfurreducens PCA
MKLLDNLNPPQRAAVLHGEGPLLVLAGAGSGKTRVIVHRIAHLIRERGVPARQILAVTFTNKAAGEMRERVEKLVGGEVPLIATFHSTCARILRREIHHLGYDSSFAIYDDKDSGKLLKEVMAGLGLDEKRFPATSLASAIDDCKNRGLAPEDLPADTFTGEVVGRVYAAYQERLKKCNALDFGDLIMLTVRLFEEHPVVLERYRDQWRWILVDEYQDTNPIQYRLVRLLAGEHRNLCVVGDDDQSIYRWRGADIRNILDFEKDFPGVTTIKLEQNYRSTRNILAAAGAVVARNRGRKAKTLWSENPPGDPIVYRRLADERDEARFVCREIERYVRRGGDLRDVAVFYRTNAQSRVVEDALVADGIPYHMVGGMRFYERMEVKDVLAYLRVLANPADEVSLKRIINVPARGIGPGTVDKISELAVRRGITVLDALGEAATGGLLSSAPRGKVAAFAAVMERFFALRDQLPLAELTTRIIEESGYADRLRQERTDEAADRLANLQELVAAMEEFERTSDERGLAPFLEQVALVSDLERSGTGRESATLMTLHAAKGLEFPMVFMIGMEEKLFPHVRSLDDPEAMEEERRLCYVGMTRARERLCLTNARRRRIFGQDQVNMPSRFIADIPRNLLDLEDEWQQPALGSVAPDTAGRGREPARHNLASILETEIEPDFADVEIVPVEPEESGVWLGMKVRHGKFGVGTIRKIEGQGDEQKVIVWFNSVGPKKLLVRFAGLERV

SEQ ID NO: 43941 - DNA, 2325 bp, Mycobacterium avium subsp. paratuberculosis K-10
  CDS (1)..(2325): transl_table=11
atgagtgtgcacgtaacagatgccaagccggtctccgaagccgagcaattgctcgaggggctcaatccgcaacagcgccaggccgtggtgcacgagggttcgccgctgctgatcgtcgccggggcgggttcggggaagacggcggtgctgacccgccgcgtcgcctacctgatcgcggcccgcggggtcggggtgggccaggtgctggccatcaccttcaccaacaaggccgccgccgagatgcgggaacgggtggtgcggctggtgggcaaccgggcccgcgccatgtgggtgtccacctttcattcgacctgcgtgcgcatcctgcgcaaccaggcgtcgctgatcgagggcctcaattccaacttctcgatctacgacgccgacgactcgcggcggctgctgcagatgatcggccgcgacatgggcctggacatcaagcgctactcgccgcggctgttggccaacgcgatctccaacctgaagaacgagctgatcgaccccgccgcggcggtcgccaacctcaccgacggttccgacgagttgtcccgcaccgtggcaagcgtctacggcgaataccagcgccggctgcgggcggccaacgcgctggacttcgacgacctgatcggcgagacggtggcggtgctgcgggccttcccgcagatcgcccagcactaccggcggcggttccggcacgtgctcgtcgacgagtaccaggacaccaaccacgcgcagtacgtgctggtgcgcgagttggtgggcaccgacaccgaggacggcgttccccccggcgagctgtgcgtggtcggcgacgccgaccagtcgatctatgccttccgcggcgccaccatccgcaacatcgaggacttcgaacgcgactacccggacgcgacaaccattctgctggaacagaattaccgctcgacacagaacatcctgtcggcggccaactcggtgatcgcgcgtaactccggtcgccgcgacaagcggctgtggaccgacgccggcgccggcgagctgatcgtcggctacgtcgccgacaacgagcacgacgaggcccgcttcgtcgccgaggagatcgacgcgctcgcgcagaagggcgagatcacctacaacgacgtcgccgtcttctaccgcaccaacaactcgtcgcggtccttcgaggaggtgttcatccgcgccgggatcccctacaaagtcgttgggggagtgcgcttttacgagcgcaaggagatccgcgacatcattgcctacctgcgggtgctggacaaccccggcgacgcggtgagcatgcggcgcatcctcaacaccccgcgccgggggatcggtgatcgggccgaggcctgcgtggcggtgtacgccgagaacaccggtgccagtttcgccgacgcgctggtggccgcggccgaaggcaaagtgccgatgctgaattcgcgcgcggagaaggcgatcgcgggtttcgtcgagttgctggacgacctgcgcggccggctggacgacgatctcggcgacctggtcgagtcggtgctcgaacgcaccggctaccgccgggagctggaatcgtccaccgatccccaagagctggcgcgtctggacaacctcaacgaactcgtcagcgtcgcacacgaattcagcaccgaccgggcgaacgccgccgcgctggacgagtcgctggatgccgcggacgacgaagacgtgcccgacaccggtgtgctggccgagttcttggaacgggtctcgctggtctccgacagcgacgagatccccgaggacggcgccgggatggtcacgctgatgaccctgcacaccgcgaagggcctggagttcccggtggtgttcgtcaccggctgggaggacgggatgttcccgcacatgcggtcgctggacgatccggtcgaactctccgaggagcggcggctggcctacgtgggcatcacccgggcccggcagcggctctacctgagccgggccatcgtccgctcgtcgtggggccagcccatgctcaacccggaatctcggttcctgcgggagattccgcaggaactgatcgagtggcggcgcaccgcgccggcgccgtcgttcagcgcaccggtcagcggcgccggccggttcggcaccccgcgggcggccccgacccgcgccgcaatgagcaaacggccgctgctggtgctggcgccgggcgaccgggtgacgcacgacaagtacgggctcggccgggtcgaggaggtgtccggcgccggcgagtcggcgatgtcactgatcgacttcggcagctccgggcgggtgaagctgatgcacaaccacgccccgatcagcaagctctaa

SEQ ID NO: 43942 - protein, 774 aa, Mycobacterium avium subsp. paratuberculosis K-10
MSVHVTDAKPVSEAEQLLEGLNPQQRQAVVHEGSPLLIVAGAGSGKTAVLTRRVAYLIAARGVGVGQVLAITFTNKAAAEMRERVVRLVGNRARAMWVSTFHSTCVRILRNQASLIEGLNSNFSIYDADDSRRLLQMIGRDMGLDIKRYSPRLLANAISNLKNELIDPAAAVANLTDGSDELSRTVASVYGEYQRRLRAANALDFDDLIGETVAVLRAFPQIAQHYRRRFRHVLVDEYQDTNHAQYVLVRELVGTDTEDGVPPGELCVVGDADQSIYAFRGATIRNIEDFERDYPDATTILLEQNYRSTQNILSAANSVIARNSGRRDKRLWTDAGAGELIVGYVADNEHDEARFVAEEIDALAQKGEITYNDVAVFYRTNNSSRSFEEVFIRAGIPYKVVGGVRFYERKEIRDIIAYLRVLDNPGDAVSMRRILNTPRRGIGDRAEACVAVYAENTGASFADALVAAAEGKVPMLNSRAEKAIAGFVELLDDLRGRLDDDLGDLVESVLERTGYRRELESSTDPQELARLDNLNELVSVAHEFSTDRANAAALDESLDAADDEDVPDTGVLAEFLERVSLVSDSDEIPEDGAGMVTLMTLHTAKGLEFPVVFVTGWEDGMFPHMRSLDDPVELSEERRLAYVGITRARQRLYLSRAIVRSSWGQPMLNPESRFLREIPQELIEWRRTAPAPSFSAPVSGAGRFGTPRAAPTRAAMSKRPLLVLAPGDRVTHDKYGLGRVEEVSGAGESAMSLIDFGSSGRVKLMHNHAPISKL

SEQ ID NO: 43943 - DNA, 2289 bp, Bdellovibrio bacteriovorus HD100
  CDS (1)..(2289): transl_table=11
atggatgtacttgattttgttacgaaaaatctgaaccccgcgcagaaggatgccgtcgaaaccctggaagggcctttgcttatccttgccggcgccggttcgggcaaaactcgcgtgctcacccaccgcatggccaacatgatcggccagggggtcgcggcttccgacgaaatcctgtgtgtgacctttaccaataaggccgccaaagagatggaacatcgtatttacaagattctgtcggacatgggcgccgtggtccaaacccagctttggatcagcacattccacagcttctgcgttcgtgttctgcgccagcacatcacacttctggattacaagcccttcttcggtatctatgattcctccgatcagctcagccagatcaagaaagtcatgaccgcgctggatattaacgacaagatgtatcccgcgaaaaacttccagagccgtatcagcagcgccaagatgatgggtctttccccggaaggtttggaaaaatcctcgaagcgtttgatggatcaaaagaccgtggaagtttacaaagcctatgagcgcgaaatgaaaaaggccaacagccttgatttcgatgatctgcttttgaaaacctatgatctgttccgcatgtacccagatgttctgcagatgtatcagaaaaaattccgctacatcatggtggacgagtaccaggacaccaatcacattcagtaccttctggtgcagatgctggcttccgctcaccgcaacttgtgcgtagtgggtgacgaggatcagtcgatctacagctggcgtggggccgacatcaaaaacatcctggattttgaaaaagacttccgtgatgcgaaggtgatcaagcttgaggaaaattaccgatccagcgccaacatcgtcaatggcgccacggccgtaatcaaaaacaactcgcaacgcaaagacaaaactcttttcacatcgaacgatccgggtgatctgattcacgtgcgcgaggaaaagaacgagtacgaagaaggccgctttgtcgccaagaccattcagtcgatgatgaatgagggcgaaggctcttacaacgactatgcgatcttctatcgcaccaatgcccagtcgcgcgttctggaagaacagctgcgcaccatgggcattccgtatcgcctggtgggcggcgtgcgcttctatgaacgcatggaaatcaaagacatgatttcctacctgaagctgtccatcaatccggcggatgatatcgccttaaagcgcatcatcaacgttccagcccgcggtatcggcaaaaccacgattgaaaaaatcgaagaatacgcggctcataaaaacttgagcatgttcgaagcggccgaaaaagcctgcgaagagcgcctgttcaatgccggcaccaccggcaagatccgtcgttttatcgacctgatgaaagaccttcagcaaaacgcccagcatctgaaactgctggaattctttgccgtggttctggatcgcacggaatatctggcggctttgaaaaaagacgaatctccggaatcccaggcgcgcatcgaaaacttggaggaactggacaacgccattgcccagttcgtgcaagagcgcggtgaagaatccacactgatcagcttcctggaagaaatggctttggttaacgatgtcgattctttggatcaggagcagaattcagtgaccatgatgaccctgcacatctccaagggtcttgagtatccgtacgtgtttgtggtggggcttgaagaaaatctgttcccaagtgcgcgcagcgcagaaagcgacaacgagcaggatgtcgaggaagagcgccgcctggcttacgtgggcatgactcgcgctcgtcagaagctgtggctgacctatgcgaaaatgagacgcgtgtggggccaggagcagttcaatcctccgtcgcgattcattaaggaaatcccgcagaatctgatcgactttaaaacgtccgccgaagcgccgcgctttatggcccgctatggttccagctcttatgactctgactttggcggcacgccgaaatggggcgccactagcagcgatcgcaaccgcgcacgcacacaaagttacgatgatgcacaagacttcccggattacgaaaatgacggggccggctctgcacccttttccaaaggtatgcgcgtcagacacccgacgtttggtgtcggcaccgtgtatgccacggaaggcactggcgaaaacttcaaagtcagcgtgatgttcacggataacaccgtgaagaaattcgttgtgaagtacgcccgcctggagcgcgtgtag

SEQ ID NO: 43944 - protein, 762 aa, Bdellovibrio bacteriovorus HD100
MDVLDFVTKNLNPAQKDAVETLEGPLLILAGAGSGKTRVLTHRMANMIGQGVAASDEILCVTFTNKAAKEMEHRIYKILSDMGAVVQTQLWISTFHSFCVRVLRQHITLLDYKPFFGIYDSSDQLSQIKKVMTALDINDKMYPAKNFQSRISSAKMMGLSPEGLEKSSKRLMDQKTVEVYKAYEREMKKANSLDFDDLLLKTYDLFRMYPDVLQMYQKKFRYIMVDEYQDTNHIQYLLVQMLASAHRNLCVVGDEDQSIYSWRGADIKNILDFEKDFRDAKVIKLEENYRSSANIVNGATAVIKNNSQRKDKTLFTSNDPGDLIHVREEKNEYEEGRFVAKTIQSMMNEGEGSYNDYAIFYRTNAQSRVLEEQLRTMGIPYRLVGGVRFYERMEIKDMISYLKLSINPADDIALKRIINVPARGIGKTTIEKIEEYAAHKNLSMFEAAEKACEERLFNAGTTGKIRRFIDLMKDLQQNAQHLKLLEFFAVVLDRTEYLAALKKDESPESQARIENLEELDNAIAQFVQERGEESTLISFLEEMALVNDVDSLDQEQNSVTMMTLHISKGLEYPYVFVVGLEENLFPSARSAESDNEQDVEEERRLAYVGMTRARQKLWLTYAKMRRVWGQEQFNPPSRFIKEIPQNLIDFKTSAEAPRFMARYGSSSYDSDFGGTPKWGATSSDRNRARTQSYDDAQDFPDYENDGAGSAPFSKGMRVRHPTFGVGTVYATEGTGENFKVSVMFTDNTVKKFVVKYARLERV

SEQ ID NO: 43945 - DNA, 2238 bp, Treponema denticola ATCC 35405
  CDS (1)..(2238): transl_table=11
ttggctcaaccggattatttgaacattcttaatgaagagcagctttcggctgttaagcatcagggttctcctcttttgattcttgcgggagcgggctcgggaaagacccgggttattaccaccaagattgcataccttattgccgaacataatatcgagcctgaacgaatcctcgccgtaacatttacaaacaaggctgccaaagaaatgtccgaaagagcatctaatctggataaaagagcagagcgggcaatgatccgaacctttcactccttcggagcgtggatcttgcgtatgtatgcggaatgggcagggctttcacataattttacaatctatgatgatgacgacgctctttcccttttaacccaagcctctcccgcccttacaaaaaatgcggcccgcggtatcataaaaaaaatttcgcgtgcaaaggattattgccttctccccgatgatccgcttttgcaggaagttgatcctaatccagagtttgcaaaaatctatgccgactatcaaaagagactaaaagaaaccggaaacgtagacttcggggatctcatcatgattcctgttatgctcttaaaagaaaatccgcaaatcagagcctctattcaaaaccgattttccgtaataatggtcgatgaatatcaggactcgaacatagcccaatttgaattcttaaaagtcctcacaggagaaaatacctatatctgtgttgtaggagatgatgaccaatctatctaccgtttccgcggagccgaagttcaaaacatattaacctttgccgatacttttaaaaacacgaagataataaagctcgaaaaaaattaccgctcatattcggaaattcttgcggtcgcagattccgtcgtaaaaaagaatacgggccgtctcggtaaaacccttgttgccgaaagaggaaagggacaaaagcctcatatttattttttgcccaatcaggaaaccgaggcagaactttgtgcccgccttatatcgcaagaggtcgaaaacggaggagcatattccgactgggctgtcttgtacaggactaacgcccaatccttaaattttgaaacggattttttacacaaaaaaattccatatcaggtcataggcaccttaaaattttatgagcgggaagaaataaaggatgctcttgccgttcttgcccttatttcaaacggaagggacgaggtggctttaaggcgcatcataaacaagcctgcacgaggtgtaggagaaattactcaaaaaaaattaattgatctttctcgagaacttatgttctctcaaaaaagcgatgaactcatgttggagtccaaggacgattacatctcggccatgtctgtgcttatgaattcggtctccctcacaaaaaaagccaaggatggcctaaagaattttttaaacaccataaaggaattacgcagtataatagaagccggagacatcttttttaaaaaagaagaaccaaagggcgaaggcttggctccttttatctatgaggttttaaaacaatcgggctttgccgaatattacgaatcggtagactcggcttccggcacccaaaagactgcaaacttaaacgagcttgcaaacactgcctcgctctacgatttttcggtaaagggcttgagcgaatttttagagcacatcgaattggatagaagccttgccgagtccgaagaaaaaaaagattccgtaaatctcataaccattcataacacaaaaggcttggaatttaaaaacgtaattatcacgggccttgaaacgggagtctttccccgcgacaacggaaactttgatgagcttgaagaagaaagaagacttatgtatgtagcctgcacccgtgcaaaggatgcactctacatgacaagctgctcctcgcgccgcctatacggcagcctgacatttacccagccaagccgctttatctttgaaatagataaagacctagtaaacatctcggaggcttcatctccttattctactttttcaggcagcttcgggaaacaaatccctgccgattttagcacaaaaaaagaagaacatcccctcctttccaaatggaagaagggagaaaaaatttatcacgacgattacggctacggggcaataattaaggccgatatttcaagcggagaacttgtagtaaacatccaatttgaaaccggccttgtaaaacgctttatgcccgaatatcaggcaaacgatatgacaataataaaagattaa

SEQ ID NO: 43946 - protein, 745 aa, Treponema denticola ATCC 35405
MAQPDYLNILNEEQLSAVKHQGSPLLILAGAGSGKTRVITTKIAYLIAEHNIEPERILAVTFTNKAAKEMSERASNLDKRAERAMIRTFHSFGAWILRMYAEWAGLSHNFTIYDDDDALSLLTQASPALTKNAARGIIKKISRAKDYCLLPDDPLLQEVDPNPEFAKIYADYQKRLKETGNVDFGDLIMIPVMLLKENPQIRASIQNRFSVIMVDEYQDSNIAQFEFLKVLTGENTYICVVGDDDQSIYRFRGAEVQNILTFADTFKNTKIIKLEKNYRSYSEILAVADSVVKKNTGRLGKTLVAERGKGQKPHIYFLPNQETEAELCARLISQEVENGGAYSDWAVLYRTNAQSLNFETDFLHKKIPYQVIGTLKFYEREEIKDALAVLALISNGRDEVALRRIINKPARGVGEITQKKLIDLSRELMFSQKSDELMLESKDDYISAMSVLMNSVSLTKKAKDGLKNFLNTIKELRSIIEAGDIFFKKEEPKGEGLAPFIYEVLKQSGFAEYYESVDSASGTQKTANLNELANTASLYDFSVKGLSEFLEHIELDRSLAESEEKKDSVNLITIHNTKGLEFKNVIITGLETGVFPRDNGNFDELEEERRLMYVACTRAKDALYMTSCSSRRLYGSLTFTQPSRFIFEIDKDLVNISEASSPYSTFSGSFGKQIPADFSTKKEEHPLLSKWKKGEKIYHDDYGYGAIIKADISSGELVVNIQFETGLVKRFMPEYQANDMTIIKD

SEQ ID NO: 43947 - DNA, 2169 bp, Mycoplasma mycoides subsp. mycoides SC str. PG1
  CDS (1)..(2169): transl_table=4
atgtcagtagatcatttattagatttattaaattctcaacaactagcagcagttttaaatacagataaaccagtaagaattattgctggagctggtagtggaaaaactagagtaattacaactaaaattgcttatttaatagaaaaaaaagatattgatccaactagaattttagctgtaacttttacaaataaagctgctaaagaaatgaaagaacgtgttttgcaaattacaaaaaatcaaaaaaaatctccttttatttctacttttcatgcttgatgttctaaagtattaagaattgatggaaaacatgttggtttaaaagataagttcttaataattgatagtgatgatcaaaaaagaataattaaaaatgctttaaaagaatcaaatatagaattaagtgaaaatgataaaaaaacttttgataaaaagattttatataaaatcaaagaatgaaaagaagaactagttgatccagatgaagctattttaaatgctaatagtacttatgatagaaattctgctattatttataaactatatcaagaaacgcttttaaaaaataattctattgattttgatgatctacaaatttatgtttatttattatttaaaaatcatcaagaaattttaaataaatgaaaaaacagttatgattatgtattagttgatgagtttcaagatactaatgatattcaatttaatctaattaaatttttaacaattaatactaatcatttaacagcagttggtgatcctgatcaaactatttattcttgaagaggaactaaattagatattattttaaactttaataaaacatatagtaatgctataagtattgttttaaatcaaaactatagatcaacaaaacaaatactagatatttctaatagttttattaaaaataataagtttagagaacataaagaaatttatacaaataataaaactggtaaaaaagtagttttaaaggaatgtaattcaaaaactagtgaagctagttatgtaagttttaaaattaaagaactaataaaacaaggttatcattataaagatatttttattttatatagaatgaatgcttgatctcaagaatttgaaaaagaactaattaatagaaaaattccttttcaattaattggtggaattaagtttagagaaagaaaagtaattaaagatgctatggcatttttaaaaatgatttcaattaaagatgacttgtcatctcaaagagttttaagtttaattccaaaaattggaaatattacaattgaaaaaattataaatactgcaaatttaaaccatataagtatatttgatttgattacaaataaagacaaaacattattacaatcaattactaaaaatttagatgaacttattgaagtgtttaaaacagcacatcaattgtatttagataatacaaatattgaagaaattttaaaatatctattaattcaatctggttatggaaataaattaaaagttaaaaaagagcaagacgatttagaaaatattaatgctttatatgatcaattaaaaagatttgatgaagattttgatccaaaatattatagtgaagaaaataaactaattgcttttttacaagaagaagctttaactagtgatattgatgaagcacaacaaattgataaagtttcattactaacagttcatgctgctaaaggattagaaaataaagtagtttttattactggattaaatcaaggaatttttccaacaagactatctgaaaataatcaaaaagaattagaagaagaaagacgtgctttatatgttgctttaactagagcaaaagaagaattatttttaacttatgttaaaggtgattattctcatattatacaatctgaattaaaaccaagtaagtttattcatgaacttgataaagatttatatgaatttgaatctcaatttttaaatagtcaaatttatgataaaaaccaacataaaacaccttcattttatgtttcaccaaaacaacataacttatataatgttggtgatcatgttgaacataaattatttggtaaaggaattataacaaaagttataaatgatcaattacaaatttcatttacaaattctagttatggagtaatgatcattgctgctaataattcggctttaactaagatataa

SEQ ID NO: 43948 - protein, 722 aa, Mycoplasma mycoides subsp. mycoides SC str. PG1
MSVDHLLDLLNSQQLAAVLNTDKPVRIIAGAGSGKTRVITTKIAYLIEKKDIDPTRILAVTFTNKAAKEMKERVLQITKNQKKSPFISTFHAWCSKVLRIDGKHVGLKDKFLIIDSDDQKRIIKNALKESNIELSENDKKTFDKKILYKIKEWKEELVDPDEAILNANSTYDRNSAIIYKLYQETLLKNNSIDFDDLQIYVYLLFKNHQEILNKWKNSYDYVLVDEFQDTNDIQFNLIKFLTINTNHLTAVGDPDQTIYSWRGTKLDIILNFNKTYSNAISIVLNQNYRSTKQILDISNSFIKNNKFREHKEIYTNNKTGKKVVLKECNSKTSEASYVSFKIKELIKQGYHYKDIFILYRMNAWSQEFEKELINRKIPFQLIGGIKFRERKVIKDAMAFLKMISIKDDLSSQRVLSLIPKIGNITIEKIINTANLNHISIFDLITNKDKTLLQSITKNLDELIEVFKTAHQLYLDNTNIEEILKYLLIQSGYGNKLKVKKEQDDLENINALYDQLKRFDEDFDPKYYSEENKLIAFLQEEALTSDIDEAQQIDKVSLLTVHAAKGLENKVVFITGLNQGIFPTRLSENNQKELEEERRALYVALTRAKEELFLTYVKGDYSHIIQSELKPSKFIHELDKDLYEFESQFLNSQIYDKNQHKTPSFYVSPKQHNLYNVGDHVEHKLFGKGIITKVINDQLQISFTNSSYGVMIIAANNSALTKI

SEQ ID NO: 43949 - DNA, 2244 bp, Bacillus cereus ATCC 10987
  CDS (1)..(2244): transl_table=11
atgagtatgacagatagattattaaatggtttaaatccgcagcaacaaaaagcagtacaaacaacgaacggaccacttctattaatggcaggcgcaggtagtggtaaaacacgagtgttaacacatcgtattgcgtatttacttggtgaaaaaggagtagcaccatggaacgtactagctattacctttacaaataaagcggctcgtgaaatgcgcgagcgtattgatacacttgtcggaccagaagctgaagatatttggatttctacgttccactctatgtgtgtacgtattttacgacgtgatatcgatcgcattggtattaatcgtaactttacaattttagattcaggtgatcagttaactgtagttaaaaaaattatgaaagagcgcaatattgatccgaagaaatttgagccgcgctctattttagctggtattagtaatgcgaaaaatgaattgttatctgcggataaatatgcgaagaaaattacaattgctgatccatatgaaaaattaacgagcgatgtatatacagaatatcaaaaacgtcttttgaaaaataactcactagactttgatgatttaattatgacgacgattcaactatttgaacgtgttccagaagtactagagttttatcagcgtaaatttcagtatattcacgtggatgagtatcaagatacgaacaaagcgcaataccttcttgttaaacatttggcagcacgttttaaaaatttatgtgttgtaggtgactcagatcagtcaatttatcgctggcgtggtgcggacatttctaacattttgtcattcgaaaaagactatgagaatgcgcaagttattctgttagaacaaaactatcgttcgtcacaaaatattttaaatgcagcgaatgctgttattgaaagaaatacgaatcgtaaaccgaagaaattatggacagataatgaagttggaagcaaaatctcttactatcgtgctgcaacggaaaaggacgaagcatactttgttgcgaaaaaaattcgcgacgatattcaaatgggaaaacgaaaatatactgattttgcggtgttatatcgtacaaatgcgcagtctcgtatggtcgaggagattttcctgaaatctaatattccttacaaaattgtcggcggtacgaagttctacgaccgtaaagagattaaagacattttggcgtatttacgcttaattgggaatccagatgatgagattagtttcgcacgtattattaacgtgccaaagcgcggaattggtgcgacttctatcgataaaattattaattacggtgtacaaaatggaatttcattaacagctgtattcgatgagattgagcatgttggagtaagtgcaaaggttacaaaggcagtaaaagaattcgcaggtttattacacaactgggtaaatatgcaagagtatttatctgttacagaattggtagaagaagttattgaaaaaaccggctatcgcgacatgttgaaaaacgagcgtacgttagaagcggaaggtcgtctagagaacttagatgagtttttatctgttacgcaaacatttgaatctcaaagcgaagataagagccttgttgcattcttaacagacttagcacttgttgcagatattgatcgtgtagatgaagacccgactgctggtgaggaagttattttaatgacgatgcactcagcgaaaggattagaattcccagttgtctttattgttggtttagaggaaggaatattcccgcatactcgttccctaatggaagaagatgaaatgcaagaagagcgtcgtcttgcttatgtaggtattactcgtgcagaagaagagttgtatttatcaaatgcacaaatgcgtactttatttggtagaacaagtatgaatgccgcatcccgattcattacagaaatcccgacagaactagtggaatcattaaatgaaacagcgccgaagcgtgaaacttcgtttggtgcaaaaggaagaacggcaagtagcagtaaaatgacaactacaacacgttctcgctcagctttcgcgcgtcctgcagctaagacgacaggcggcgaacaaatcggctgggcggtaggcgataaagcttcccaccaaaaatggggaatcggtacagtcgtaagtgtaaaaggtgaaggtgatgcaaaagaattagatattgcgttcccaagcccaattggtgttaaacgtttgttagcaaaatttgcacctgtgacgaaacaatag

SEQ ID NO: 43950 - protein, 747 aa, Bacillus cereus ATCC 10987
MSMTDRLLNGLNPQQQKAVQTTNGPLLLMAGAGSGKTRVLTHRIAYLLGEKGVAPWNVLAITFTNKAAREMRERIDTLVGPEAEDIWISTFHSMCVRILRRDIDRIGINRNFTILDSGDQLTVVKKIMKERNIDPKKFEPRSILAGISNAKNELLSADKYAKKITIADPYEKLTSDVYTEYQKRLLKNNSLDFDDLIMTTIQLFERVPEVLEFYQRKFQYIHVDEYQDTNKAQYLLVKHLAARFKNLCVVGDSDQSIYRWRGADISNILSFEKDYENAQVILLEQNYRSSQNILNAANAVIERNTNRKPKKLWTDNEVGSKISYYRAATEKDEAYFVAKKIRDDIQMGKRKYTDFAVLYRTNAQSRMVEEIFLKSNIPYKIVGGTKFYDRKEIKDILAYLRLIGNPDDEISFARIINVPKRGIGATSIDKIINYGVQNGISLTAVFDEIEHVGVSAKVTKAVKEFAGLLHNWVNMQEYLSVTELVEEVIEKTGYRDMLKNERTLEAEGRLENLDEFLSVTQTFESQSEDKSLVAFLTDLALVADIDRVDEDPTAGEEVILMTMHSAKGLEFPVVFIVGLEEGIFPHTRSLMEEDEMQEERRLAYVGITRAEEELYLSNAQMRTLFGRTSMNAASRFITEIPTELVESLNETAPKRETSFGAKGRTASSSKMTTTTRSRSAFARPAAKTTGGEQIGWAVGDKASHQKWGIGTVVSVKGEGDAKELDIAFPSPIGVKRLLAKFAPVTKQ

SEQ ID NO: 43951 - DNA, 3183 bp, Gibberella zeae PH-1
  CDS (1)..(3183)
atgtcctctattgtacaagatgcgattcttcaatcgctgaacgaggcgcaacgccgcgctgtgacttcaaccgcatcaactgtagcaatcctcgccggccctggaagcggcaaaacccatacccttacatcgcgggtagtatggcttatccagagagttggctaccgtccttccgatgtcatcgtcgcaacctttaccgtcaaggcggccagggagatgaaagagcgaatcgggaaaacactgggcgaggaatgcgaaaagaagattgtgcttggaacatttcactcgatcgctaggagatatctatcaatatacgggaaccgaatcggattggactccaaattcggcatcgcagacgatggagactccagggcaattatccagagaatctgcaagaggctgaaactcaatatcgagccgcaacaagcaaaatcatggatcagcaaagagaaggcgaaaggaccagatgctatggcgccacctccgacgcagaaaggaagaaaagagaacccggaattaaggacatgctacgaggaatatcaggctcaactcacaagatcaaatttactggactacgacgatctcctagtcaaatgcgtcgagctacttcgagaccacccggcttgcgtttccaacgttcagactgtccttatcgacgagtaccaagataccaacggcattcaatacgaacttatgaaactcttcgcccaagcaaaacaacgaataacgatcgttggcgaccccgatcagagtatctatggctggcgctcagccgaagtcaaaaatctcttccgtctattgcgagaatatcccaatacagacgaaatatcactagaagaaaactatcgatcttcacagtccatccttgatgtatcacttactgtcatacagcaagacacgaagcgatacaagaaagttctgctgccggtccacactaagggagcgcgaccggtactcagatcattaaaaagctcgtctgctgaaggcgaatggattgtttcagagattaagcgagcagtcatgatgtttggagatatgctcaagtttgaagatgttgcaattctcttgagatccgccgccctttccaggcacatcgaatcagccctaggaaaagctggcgtcgcatatcggatgattggaggacacaaattctacgaacgaaaggagatcaaagtgttaatcgactatctccgggtagtcagccaacctgacaacaatgatgcgctagccaggatcatcaatgtaccccgaagaggtattggagaggcaacagtcaaagcattgatcgaagaagcagagcagtctgacatgagtctctggaccttgattttgaaacactgcagaggcaatcggaaagccaaagccaacatcagacctaaaatggagcaaaagctcaatacagaactcatccgcactattacgagtttacaaaagcaagctagcgaaatcagccagagcagccctgttacgttggtcaatctgatagagcaattattaacacacctcgattttaagaagtatctggaggaagaatacacagaggagcatgaacagcgatgggctaacgtccaagaatttgttaatttggtcagcgacttcatgaaagactttggcgcaccagacgaagacgcacttccggaaatcgacaacttggatcaggtaaaggtggacgatatgctgggtcgttttctagccaacgtggcgctggcgtcggatgcacagaacaagggcgacacgacagaacagaaatcactggttacaatctcgacaatccatgccgcgaagggattggaatggccagtggtttttgtgccatctgtctacactggatcaatacctcactcaagatctgaagacacagacgaggaacgacgcctcttgtacgtggcaatgacacgagcgaaagcactgttgtacctgagctgtccactttacggctcccaggggctgagcagcaaagtcgagctttcaccgttcgtagcaccgttcgcgtccaaggtctttgccaaaaagggcccatcatttgatcgagcagttgtggagggagttgccaaaattcttggtcgagatgccccatctgagaaaacggtctttggaaagctcccgcctatgttctcagtcgaggacgataggttccctgtcgatcctgccgaccacaagaacgtcgaaaggattgatgaagaatctggtcgtcagtactctcgcgcaccgaagcgacaacgtgtttcgcatcctaccacttcttatgacgaatcagatgagcttccctggcagagagagtatgctacaacgatggagaagtcatctgaattcacggtcgctgctttgccaggctttacaaccgccggggctcatagagttgctcttgatgccgctgcagcagctgcaccaccaccagacagttcgaagcctggagtgaagaagggatcaaccaaacgaggtgttggccaaaagagcatgcttggatggctcaaccaagggccaaacgctcctaaacccccaccagagccgcagtcgcaaccgcagagtaggtctcttgcgcaggctcggtatgaatctgctttgtcgcggcagaacagcaggttactctcactacctggaccacaaaagccgtcaattgatcctgaattggcgaaacataaattgccaactgcacgacctctggcaaagccaaacgtgcccaagatcagtgacggtgttccgcagaaagcgtattcctgcttttctagctcacctccacgacctccatcgaaaatggagcctgaagaagagaagaaggaagatgtgggagaagcaatgcctaacaagcctgcctcaactcttcatgcgacaacgttcatgtcggtcaggccaaatggtggtgtttcaacaaaaccacaatcttcacttacaccaaccccacgaaacaacatgttgcccactctcaccgcccgcttctccacctcagctgttcagggcgctcgcaggtacatctcaactacctcgcccaagcgaaacactgttgcaggtgacaccacttcaacttcccttatgagcaagtggaacaacctctctccccagaacaggcgttacagcaaggcaggcctcgcagttgttgccggcgttgatgtttacatgcactacacctactggccatacattcgaagctggttcagcagcgtagagatggaaggaaagaattag

SEQ ID NO: 43952 - protein, 1060 aa, Gibberella zeae PH-1
MSSIVQDAILQSLNEAQRRAVTSTASTVAILAGPGSGKTHTLTSRVVWLIQRVGYRPSDVIVATFTVKAAREMKERIGKTLGEECEKKIVLGTFHSIARRYLSIYGNRIGLDSKFGIADDGDSRAIIQRICKRLKLNIEPQQAKSWISKEKAKGPDAMAPPPTQKGRKENPELRTCYEEYQAQLTRSNLLDYDDLLVKCVELLRDHPACVSNVQTVLIDEYQDTNGIQYELMKLFAQAKQRITIVGDPDQSIYGWRSAEVKNLFRLLREYPNTDEISLEENYRSSQSILDVSLTVIQQDTKRYKKVLLPVHTKGARPVLRSLKSSSAEGEWIVSEIKRAVMMFGDMLKFEDVAILLRSAALSRHIESALGKAGVAYRMIGGHKFYERKEIKVLIDYLRVVSQPDNNDALARIINVPRRGIGEATVKALIEEAEQSDMSLWTLILKHCRGNRKAKANIRPKMEQKLNTELIRTITSLQKQASEISQSSPVTLVNLIEQLLTHLDFKKYLEEEYTEEHEQRWANVQEFVNLVSDFMKDFGAPDEDALPEIDNLDQVKVDDMLGRFLANVALASDAQNKGDTTEQKSLVTISTIHAAKGLEWPVVFVPSVYTGSIPHSRSEDTDEERRLLYVAMTRAKALLYLSCPLYGSQGLSSKVELSPFVAPFASKVFAKKGPSFDRAVVEGVAKILGRDAPSEKTVFGKLPPMFSVEDDRFPVDPADHKNVERIDEESGRQYSRAPKRQRVSHPTTSYDESDELPWQREYATTMEKSSEFTVAALPGFTTAGAHRVALDAAAAAAPPPDSSKPGVKKGSTKRGVGQKSMLGWLNQGPNAPKPPPEPQSQPQSRSLAQARYESALSRQNSRLLSLPGPQKPSIDPELAKHKLPTARPLAKPNVPKISDGVPQKAYSCFSSSPPRPPSKMEPEEEKKEDVGEAMPNKPASTLHATTFMSVRPNGGVSTKPQSSLTPTPRNNMLPTLTARFSTSAVQGARRYISTTSPKRNTVAGDTTSTSLMSKWNNLSPQNRRYSKAGLAVVAGVDVYMHYTYWPYIRSWFSSVEMEGKN

SEQ ID NO: 43953 - DNA, 2805 bp, Debaryomyces hansenii CBS767
  CDS (1)..(2805)
atgactcaaattcaacaagatgacgagttattgcttcaaagagtcttagaagggttgaatgctaaacaaaaacaggcagttgttgctccgtctgtggaaaggttgcaaattatcgcaggtcctggtacaggtaaaactaaagtattaatatcaagagttgcatatctattgatcaaggaaaagttatctccacaatgtataattgtaactacgtttactaaaaaagctgccaatgagatgattgagaggttgggggagctactcaaggatacaccaatcaaagtagataaaatattgattggtacgtttcacagtatttgctaccgaataattaagatatacggtaagaaaatagcaattagcgattacaatattgcagatgaacgggattcgaaacagatattggaagaaatgattatgaagttatcagaaacggacttgaagtatatttcggagctaccagatagacagactgaaatattcaaatcgaataaggaggatgataaatatcatgggtgggacccaaagaaaatcagaagacagatctcgaaactaaagtcatcgggaattcagccagatgcttatgaacaacgcagcgactgtaatcaattcttaggtttgctatataagaggtaccagaaacacctacaagcgaactcattgctagattttgatgattgtttgatttgctgccatcagttgataactacatatccagtactaaactttgtggagcacgtattggttgacgagtttcaagatacgaacgagattcaattacaattaatgtatgaatttgccaaagggcaccctacgaatcctagattgcaaaataatatcactattgtgggggacccagaccaaagtatctatgcattcagagatgcgcaagccataaattttaagaagatgaaggagcattataaaaagatatatcaagataattccattaacgtcatcactttggaggagaattatagatccacttcagatattttgaacttttcagaaaagattatgaggcaacaagatgatcgtctttctaaaaccctcaagtcacaaatggtatcttcgtttcgaccagtttattctaatttgaaatctcctgagcaagaagctcgttggatttcataccaaattgaacatttgatggccttaccaaattcaatttttaaatataaagatatttctgtgttagtaaggtccgcatatcaaacaagaaccattgaaaatgaattcgtcagaaagagaataccttatgtgatggttagaggaactgcattctggaacagaaaggaagtagtagccatactagactacttgcgtgttattgctagtgataatgatcgtattgcatatttaaggacagttaactttccaaaaagagggataggagaaaagactttagcctcaataagtgcagaattagaaatggaagcaataaaaccagatatctataaaagacaggtctattctgtgttacaggatatctcaaatgtaaatacctctgtcaaattgacctctaaaaatcagagtagccttaaaaaatacttaggcttcattgcagatatgcgtgatattcttgaagatgtgaataaaattagttatgaggaacaggttggttctgattcaacgattgagaagagaaacacgttgctcagtaagctttttgagcttgtttatgtaaaatcggggcttcagaaagagtttcaaaatgatccaaatcacgaactcaatattatggaagtgcaaacacagctttgtgaatttacacccaaagatgaagaattacctttgtacttggggggatcagaatctgatattacagaggataaacggaactttttagaaaagttcattcaatctattggtttatacgaaactgattcaactaatgaaaaagaaaaagagaaagaaattgctttgaggttccctggtaggatagacaaaggtaaggttgctttatccacgattcatgggtcgaagggattagagtggccaatagtttttgttccaggattgtcagatggtatattaccagcaaagtttgcaatggatacaggaggagaggaagctgtcaatgaagaaagaagatgcttttatgtggcgactactagaacaaaattactactatatatgtcgtcttatatcgagcaaggtgatataggtaaatggggaagaaaacctattgatagcgtatcccggtttattagtaatttaaaccacactggtatgatggaaagtaagcaaggcgcatttaaagattggcaaatgctatcaaaattatacaacatcgttaataaaccgctacccacagggcaggagttcaatttgagtcaatttaataaagcctatgaattgcggtctaatacttatatcaatggtgaatctgaaatgaaaatatctgaggaatcattcaaaaattgtgacgaagggtcagtctgttcggatgtaacaggcttcagtagtgccaaaatacaaatggctaccaagagaagtaacgaaatttcacatcatacaacacaagtgcctaaacgtgtgaaagagaagagtaaccagtcaaatatcaactcatttttcaaatcgactccaagtgtacatacttctctgtcgcgaatgaatgtcaacagtggcttatctaaagcataccgagtacctattatagaaaagtcggtttctaataaggcacctactatatcgaaaatagaaataacgaaacctaagagcaataaagcacctccatacataccagttaggaaggtaccttcttacatgcttaatagaagaaagaatgtaaataactag

SEQ ID NO: 43954 - protein, 934 aa, Debaryomyces hansenii CBS767
MTQIQQDDELLLQRVLEGLNAKQKQAVVAPSVERLQIIAGPGTGKTKVLISRVAYLLIKEKLSPQCIIVTTFTKKAANEMIERLGELLKDTPIKVDKILIGTFHSICYRIIKIYGKKIAISDYNIADERDSKQILEEMIMKLSETDLKYISELPDRQTEIFKSNKEDDKYHGWDPKKIRRQISKLKSSGIQPDAYEQRSDCNQFLGLLYKRYQKHLQANSLLDFDDCLICCHQLITTYPVLNFVEHVLVDEFQDTNEIQLQLMYEFAKGHPTNPRLQNNITIVGDPDQSIYAFRDAQAINFKKMKEHYKKIYQDNSINVITLEENYRSTSDILNFSEKIMRQQDDRLSKTLKSQMVSSFRPVYSNLKSPEQEARWISYQIEHLMALPNSIFKYKDISVLVRSAYQTRTIENEFVRKRIPYVMVRGTAFWNRKEVVAILDYLRVIASDNDRIAYLRTVNFPKRGIGEKTLASISAELEMEAIKPDIYKRQVYSVLQDISNVNTSVKLTSKNQSSLKKYLGFIADMRDILEDVNKISYEEQVGSDSTIEKRNTLLSKLFELVYVKSGLQKEFQNDPNHELNIMEVQTQLCEFTPKDEELPLYLGGSESDITEDKRNFLEKFIQSIGLYETDSTNEKEKEKEIALRFPGRIDKGKVALSTIHGSKGLEWPIVFVPGLSDGILPAKFAMDTGGEEAVNEERRCFYVATTRTKLLLYMSSYIEQGDIGKWGRKPIDSVSRFISNLNHTGMMESKQGAFKDWQMLSKLYNIVNKPLPTGQEFNLSQFNKAYELRSNTYINGESEMKISEESFKNCDEGSVCSDVTGFSSAKIQMATKRSNEISHHTTQVPKRVKEKSNQSNINSFFKSTPSVHTSLSRMNVNSGLSKAYRVPIIEKSVSNKAPTISKIEITKPKSNKAPPYIPVRKVPSYMLNRRKNVNN

SEQ ID NO: 43955 - DNA, 2589 bp, Candida albicans SC5314
  CDS (1)..(2589): transl_table=12
atgatgctgacgagtaatcaagtattggataaaattcttgaatctttaaatgccaatcaaagaaaagctgttactgctccatgtaatggaagattacaaatcattgctggtccaggtactggtaaaaccaaagttttaatatctcgtgttgcttatttattaatatctgaaaacattcgacctgataatatgattgttactacatttactaaaagggctgctaatgaaatgatagaaagattaaccaaattagtagaaggtacggatataaatattgataagttaattattggtactttccatagtatatgttttcgaataattaagaaatatgggaaattaatagatttagaaaactataccattgctgatgaaagagataaatcttatatattgaaaactatgttgacaaatttatctgctaaagatattgaaagattggatagttttggtgaagagtcattacaaaaacttcgttctcataaagctaatgaaaaatatcatggtcttgatctatcggttattctgaaaaaaatttctagtttgaaatcaaattgtatttcccatgatgtgtattctgggaaactgaaaagaaatccagcacttgcgttcttttatgaaaaatatcaagcattattaactgaccttaaaaaattagatttcgatgattgtttgcttgaatgtcataggttggtggaaaatttccctgtattgaattatattaaacatgttttggttgatgaatttcaagatactaatgaaatccaattacggttaatgtatcattttgccaaggggaacactaatggtgatccaaagtatcaaaataatgtaactatagtgggagaccctgatcaaggtatttatgcctttagagatgcccaatcaattaattttgaaaaaatgtcaacttattataccaagctaaatctaagtttggataagatatctttaaatgaaaattatcgatcaacgtctagtattttaaatatatctgaatcactcatgaatcaacaaaaaggtagaatgcccaaaatgttgaaatctcaattagattcttctatcaaaccagtttattcttgtttaaattcagcaaaggaagaagccaaatggattgtataccaaatttctcatttgttgtcgctcccaaactcagcagtacaggagaaggatattgctgtgttatttcgtgctgcctatcaaagtagagctttggaagatgaattagttaaacgaggactttcatataaaatgattcgtgggaaagccttttgggatagacaagaagttattgccattatggattatatgaaagtttgttctgatgaatatgaacaagcagcagttataagaactttgaattatcctaaaagagggataggttcaaagacgttagaaaacatagagaaaattattgagaaaagagttaaacaaggcaaatcagtacatcaatgtttattggcaatgactaagaagtccgaggaaccagagataaaattgactaaaaaacaaatacaaggtgtagaagagtattatacaatgataactaaagtcaagaagaaattatatgagatggaagcactttctggcgaagacatgacgaacacagcaaaagaattgtttgatttgatttatgaaagctcgaaattgaaacaagagtttgaaaatgatgaagaacggagcaaacgattgaatgttgaagaagtagggaatttattagttcagtttaaaccaaaagatgaaattctacctgattatattggtggtgatattgaagatgatgatgctgttgatgaaggtgatcgtaatttccttgctcaatttattgaatctgtgggattatacgaaacaaatgatgaagttgaaaaaaatggatctgaaagtactggggatgataccgccaaggaagagaaactgtgtatttctttgagtacgattcatggatccaaagggctcgaatggcccgtggtttttgtacaggggttaactgacggattattaccagctggtttcctgtttagaaatagttttggagataatgatgaaaatttgaatgaagagagaagatgtttttatgtggctgtcactagggccaaagttttattgtacatttcatcttatattgaaagtcaatcaaacgttttttatggtgaagcattgaatcaagaatccagatttatggagccattgaaaaagaatttggctcgtactcaattggcattctctaatgtgaacaatttgcgagtattgtataaattattgggtaaacagttcccaacaggaaacctcaattggactcggttttatgaaacctacaagaaaagttttaggcgatttgttagtggagagcctatggtattttcagtgggtacagaagaagaagataagccaagtaaaagtattggtaattctgggtttctgagtgcacaatctttaatgaatggtttcctgagtgtacagtctattaggaatggtactaacaataagaataataaggttgccacctttatttcaaattctaaaacagtaaatcgtgctcctccttatattcctgagagacgtctgaaaaaacctaaaaagatgatatag

SEQ ID NO: 43956 - protein, 862 aa, Candida albicans SC5314
MMSTSNQVLDKILESLNANQRKAVTAPCNGRLQIIAGPGTGKTKVLISRVAYLLISENIRPDNMIVTTFTKRAANEMIERLTKLVEGTDINIDKLIIGTFHSICFRIIKKYGKLIDLENYTIADERDKSYILKTMLTNLSAKDIERLDSFGEESLQKLRSHKANEKYHGLDLSVISKKISSLKSNCISHDVYSGKSKRNPALAFFYEKYQALLTDLKKLDFDDCLLECHRLVENFPVLNYIKHVLVDEFQDTNEIQLRLMYHFAKGNTNGDPKYQNNVTIVGDPDQGIYAFRDAQSINFEKMSTYYTKLNLSLDKISLNENYRSTSSILNISESLMNQQKGRMPKMLKSQLDSSIKPVYSCLNSAKEEAKWIVYQISHLLSLPNSAVQEKDIAVLFRAAYQSRALEDELVKRGLSYKMIRGKAFWDRQEVIAIMDYMKVCSDEYEQAAVIRTLNYPKRGIGSKTLENIEKIIEKRVKQGKSVHQCLLAMTKKSEEPEIKLTKKQIQGVEEYYTMITKVKKKLYEMEALSGEDMTNTAKELFDLIYESSKLKQEFENDEERSKRLNVEEVGNLLVQFKPKDEILPDYIGGDIEDDDAVDEGDRNFLAQFIESVGLYETNDEVEKNGSESTGDDTAKEEKSCISLSTIHGSKGLEWPVVFVQGLTDGLLPAGFSFRNSFGDNDENLNEERRCFYVAVTRAKVLLYISSYIESQSNVFYGEALNQESRFMEPLKKNLARTQLAFSNVNNLRVLYKLLGKQFPTGNLNWTRFYETYKKSFRRFVSGEPMVFSVGTEEEDKPSKSIGNSGFSSAQSLMNGFSSVQSIRNGTNNKNNKVATFISNSKTVNRAPPYIPERRSKKPKKMI

SEQ ID NO: 43957 - DNA, 3531 bp, Ustilago maydis 521
  CDS (1)..(3531)
atgaccccaagcacttctactgcaaactgttctaactcagagcagcatcagctgactcctcagaacagcggtggtgtgagtgccaatgcttcaggagcgcagccaggtcgcaatataccggcgtaccttgaatcactctctccatcgcaatatgctgctgctacccacccgccaacaacatgtcttcagatcttggcaggacctggctcaggcaagacgcgtgtcctaacatcccgagtcgcatggctcatcctcgaccctgcaaacaagctcagacccgaagacatcctcgtggttacctttaccaacaaagccgccaacgaaatgaagatgcgcctcgtcaagctcatcggcaaggagcgagtcgataacctcgtcatcggcacctttcattcggtctgcgccagatacctccgcaaatacggccgacttatctcgctttccaacaactttagcataatcgattcggaagatgcaaagcgcatgctcaagtccatccttaaagagctcaaggcggagctcgaaaaagaaaatctcgaactcaaaccggagcaggccatgtctgaaatctccaaagcaaaggcgaaggagatcgaccctgtgagatacaggcagctcgcagagcaagaagccgccaagtcagcgtctcggaaagcacctatcggcaagcaattcacagggtctgcatcgttcaagcaagtcatggccaccatctacatcatgtatcaaaagcagctcgtcgacgccaacgccttggacttcgacgatctactcgtgtacggagtccagctgtttcgacgtcagaatcaggtggtccgcaacattcgacatgtgctcgtcgatgagttccaggacaccaacatcacacagtacgagctcatgcgcctagtagcaactgcatcgcaagctgtcagcatcgttggtgatccagatcagagcatctatggctggcgcagtgccgagattggcaacctcgacaagatgacgagagagttcaagggtacacagcaggcgcgtctcgaagagaactaccgaagcaccggtgcaatcctcgaactggcgctcagagtggttcagcaggacacctcgcgtgtcgacaaggacctctacacgtcacatccccgcggactgcccgtcgtcctcaagtcgcacgcgtcggcgcagctcgaggccgcatacattgcatccgagatcaagcgtcttgtcgcccattacggaggcgtgcttgattacaatgatttcgtgattctgctgcgcttcaattacctctcgcgcgccatcgaggctgagttgcaatctaggggcatcgactccaagatgatgggaggtcacaagttctttgatcgaatggaagtcaaagatctgctcgcctatttggcacttgccgataatccaggctttacaccagcattcattcgcgtggtcaacgtgccaaaacgaggtattggcgacaagggcgtcacagatcttctgaccatggcgaaagcagagagctgtagtcccatggagcttgtcgaaagggttgtacgaggcggtaagaacccaggcatcaaaccagccatgaaaaggggcctcgagcatttagtcgaggctgtgctagcggtacgacaggcagctagaaatggcacgcctgtagctcaactgctccagctgctcatcgagaagatcgattacgagtcgtatctccaggcgcagctggactacgaagcacgctggggcaacgtacaagaactgatctcgttctccatcattgtggcccagaatacagcgtatgccgatacgccatccctttccatcgatcagattatttctcatacgctgtcaaatcagcaagacaccgataccggcagagatgcgcaagatgacagtaagctggcagattcacttcaagaggtcgacatcaagccgataagccgtgaaaagtcaccaatgccttcgtcaattcatccttactttcaaaaacacggagctggaaaacgaaaacccaagccgtcgacgaagggggacttgatcgacctgtgcgtctccagcgatgaagataatgaagcagccagtacagaagaagagcctgctccagtaaagaggcagcgcgtggcaaagaaagagtctgctgtgaacgacaaggcaattcacaataaggatgatatcagcgctaaatctttcctcgtatcacagctcgatgagattaacgaacaggttgaccgaaatacgcaagagaacccggctgaccatgacaaagaaagcgacgacgaggaggaggaggcaggaccaaagacgccactccgcacattcctggaagcatcaatcctggcgaccgacatgggcacagaatccgaggaaaaggatggaaagaagaaaccgaaagtaaccatttcgacctgccatgcagctaaaggccttgaatggcccgtagtcttcattccggccatcgaagaaggctgtttcccatccttccgttgcgagaagcccgacgagattgccgaagaacgacgcttgctctacgttgccatgacgcgagctgagagtatgctttacctcacgcatgcctcttaccgaatgcaaggaggcgagggcaaggacaaggtccttagcacatttgttacttcggtcgccgcaaagcaggatggaggttgctgtcatgcgaaaaaggcgattccattttgcacgactcgcccaaaagtcgatgcagaggctgtcaggaccatggtcaaagtgactggaagagacttgccaacagacgccaagatcaaagaagccattgcgcagtgggaaaagacatctgcgaaggatgtgcagcaggtggatcagatgaacattggtcgcagcatgggttttgacacctattcaagctacggtagtgctacgggcggctggaactcgcagattgggtctggactgtacagcaatcatggactcctctctagctcttctggatggagtcgaaatccacagatcgatgacaatactcggaaacagctagagctcgctacgccgacgctgggtagcttctcttctccagtcgatatcgatgcatctccttcaccggcctactctggcttccaacgcgcatcgtctctgtgcggcgcaagccgcggtaacgggctccaaacttcttctaacaaccattcgaatttctcttcgcattacggatcgtttggctcgggaacgagacgcaagcaaccgctcataccaccttcacgccgaccagcagccacgccgtccgctccaccctcatttacggacgatgtacgccttcgagcccgtcccgaagattcagttgctttggctcgcgcagatggtacggccccacgtccacgtgcagacctcactagcttccaacaggctcattcgcagggtattagtagtatgctgaacatgctgccgccgtcgtcggatggaggttcaggaggaggcagttcaaaccactcgccgatttgtatcgatgatgatgcaagcgacggctcgaattggtctggcaaagcacgtgcaagcagagggaagaagaggctaggtataaggcgtcgtgtgtga

SEQ ID NO: 43958 - protein, 1176 aa, Ustilago maydis 521
MTPSTSTANCSNSEQHQLTPQNSGGVSANASGAQPGRNIPAYLESLSPSQYAAATHPPTTCLQILAGPGSGKTRVLTSRVAWLILDPANKLRPEDILVVTFTNKAANEMKMRLVKLIGKERVDNLVIGTFHSVCARYLRKYGRLISLSNNFSIIDSEDAKRMLKSILKELKAELEKENLELKPEQAMSEISKAKAKEIDPVRYRQLAEQEAAKSASRKAPIGKQFTGSASFKQVMATIYIMYQKQLVDANALDFDDLLVYGVQLFRRQNQVVRNIRHVLVDEFQDTNITQYELMRLVATASQAVSIVGDPDQSIYGWRSAEIGNLDKMTREFKGTQQARLEENYRSTGAILELALRVVQQDTSRVDKDLYTSHPRGLPVVLKSHASAQLEAAYIASEIKRLVAHYGGVLDYNDFVILLRFNYLSRAIEAELQSRGIDSKMMGGHKFFDRMEVKDLLAYLALADNPGFTPAFIRVVNVPKRGIGDKGVTDLLTMAKAESCSPMELVERVVRGGKNPGIKPAMKRGLEHLVEAVLAVRQAARNGTPVAQLLQLLIEKIDYESYLQAQLDYEARWGNVQELISFSIIVAQNTAYADTPSLSIDQIISHTLSNQQDTDTGRDAQDDSKLADSLQEVDIKPISREKSPMPSSIHPYFQKHGAGKRKPKPSTKGDLIDLCVSSDEDNEAASTEEEPAPVKRQRVAKKESAVNDKAIHNKDDISAKSFLVSQLDEINEQVDRNTQENPADHDKESDDEEEEAGPKTPLRTFLEASILATDMGTESEEKDGKKKPKVTISTCHAAKGLEWPVVFIPAIEEGCFPSFRCEKPDEIAEERRLLYVAMTRAESMLYLTHASYRMQGGEGKDKVLSTFVTSVAAKQDGGCCHAKKAIPFCTTRPKVDAEAVRTMVKVTGRDLPTDAKIKEAIAQWEKTSAKDVQQVDQMNIGRSMGFDTYSSYGSATGGWNSQIGSGLYSNHGLLSSSSGWSRNPQIDDNTRKQLELATPTLGSFSSPVDIDASPSPAYSGFQRASSLCGASRGNGLQTSSNNHSNFSSHYGSFGSGTRRKQPLIPPSRRPAATPSAPPSFTDDVRLRARPEDSVALARADGTAPRPRADLTSFQQAHSQGISSMLNMLPPSSDGGSGGGSSNHSPICIDDDASDGSNWSGKARASRGKKRLGIRRRV

SEQ ID NO: 43959 - DNA, 3270 bp, Cryptococcus neoformans var. neoformans B-3501A
  CDS (1)..(3270)
atggacggtttaattactggtattacgtcgtacccatatcttgcgtcccttaaccaagctcaattgaaagccgttactgcaagcccttcagtccctctgcaaatccttgccggaccaggatctggaaaaaccagggtcctcacctgtcgtgtcgcctatctggtacagcatcataaatactcgccaaatgagatcgtcgcggttactttcaccaacaaatcggctaatgagatgcgaaagaggctgcagaagttacttggggataagcaagctgatcaattggtactaggtacattccacgcgacatgtgtcaagtacttgagaaggtacggcaaattgattaatctgtccaacaactttgtaatcgccgatgctgaagactgcaagaaaatcatgagtggtatactgaaaagccgaaaagctgcattagatgaagcatcaatgtctctgaaagaaggagtcgtcttatcagaaatatccaaagctaaagcaaaaggggagccgccggaggctatggcaatacgcgccgcgcaaaataagaatgctttcacaaatacgcttgcggtcatcgcagacctctacgaagagtaccaactcgccctgacagaggcgaattcgttggactttgacgacttgctgctgtatgccctgcgactattcaaagaagcgcctagagtggtagagaacatacggcatatcttggtggacgagttccaagatactaacacaacacaatacgagctcttgaaacgctttgcaaaagctcataaaggcgtgagcgtcgttggagacccggatcagtcgatctatggctggcgttctgcagagattgagaacttgaacaagatgacgaaggatttccctggtgtagaagcgatctatttggaagaaaactacaggtccaccggatccattcttgatgctgcccacgccatcgtttcccaagatcgccagcgaatacaaaagagtcttttcacttcccaccccaaaagcgctcctgttacccttaaagtctttagtactcccgtcatcgaagcgagcttcatttccaccgagatcaagcgcctcattgcatattctggtggtctactgagatacgatgactttgccattctcttacgttacaatgccttgtctcgggtgatagaatcttccctccaaaaggatagtatccccaaccgtattgttggagggcacaagttctttgaacgaatggaaatcaaggatttgttggcgtatcttcagctggccgataatccgggcttcaacctgaacagtgattcttttacccagcctgcgtttgtacgagttgtcaatgtccccaaacgctccatcggggacaagaccctcacagatatcctaagtacagcgaagtcaatgaagatatcccccatgcagttatgtgagcgggtcacagatggcgaaggcatacctgcaaacatcaaaccgggcgtgaagaagagtcttgcgaactttgtcggtgtgatcaggaaactaagacgagcagcggaaggtggtgcatctgtggccgacctgatcaaaatggtcatcgagaaagtcaattatgaagattatctccgtacttcgcagccggattgggactccagatgggaaaatgtcaaggaactggttagttctcccccaaccttccttcttttcctacatcatcgtgttcccctatggccatggttgactgacctcgagaatggcaattcacagatttcatacagtgtcactgtcgctgaagagcaagctcgtttatctggatccgaatatgggattgctcctgaagaaagaggattcatgccggccaattctgcagctgttgaggctatggtgaacgaggcatatgaaagaggaaaaggaaaagaagtcaagcaggatggagatacgaggcgggtaaaagaagaaaaacgggtacaccccatgtttaggcgccaggcaagcgggagtgacaagggtagtcagggacttgatacgtcctcggcagcgaggagtcggagtaggagcgattcaagtgctgtggatagcaaaagaataccgcggaagaagggttctgtaaagacgaatgaaaggcatgatggggtgatagaattgctttcgagtgatgaggaagaaaacgatatcaagccagatgtaaagtcgaagaaagaagttgtcgatggagttaagcagatcaatgtggccgatgccccctctgattcggtggaatcactagccaacgcacctgataatttgacgcccctggcatacttccttcaaacttccatgttatcgacggatactgaatcaggtcaagatgatgcttctacacccaaagtcacgatcatgactgtccatgctgcaaaaggtctcgaatggcctgtggtctttatacctgctgtcgagcaaggtaccttcccttcttatcgttgcaccgaacctcatgaaatagcagaagaacgacgattactctacgtcgctatgactcgagcgcaaagtttcttgacaatgtcgtattgtcagttcagaatgatgggcggggaagagaacaacaaagaggctagtgagtttttgggggatgttatgcggcatcagccggctttattagcaaccgaccagcctaacgtggatacggtcgtgaggaagcacatgtctgccatgctatgtcgacctatgcctgatgaggatctgacgaaagacatgatcatgaagcatgttcgtgcagcccctcccctgagtacttgggatccacctgagcgttcttcatggggagagaagatcaaccgctttgctcgtcgggatgtcaccaaggctgctcgtgcgactgaatactgggcatcagacgttgacgagtacgccctcccgtccgattcattgtctgcctccacctcttccccatatacaactagctttacctctgctcgaatgaactccggcctttccagaccgccggccgcgttgccgatggcgccccaaaagaaacctcctccgccatctgtaaaatctgccaacagacatataccacctacaatgccgttcacatttaatacaaaggaggaaataaaggaggaaacatcattagactcattaatgagtgggggtaataagagtttagagatgatggcggggctaggtttgcccgctgatctacctcctgatcttgtcgggccctccgctggcgcgggcggtgaattggcaggaagaggatcgcttgaggttgccagaggaaagaagagactggggatgggaagaccagcgccatggggaagcaaaaagcctcgaaaataa

SEQ ID NO: 43960 - protein, 1089 aa, Cryptococcus neoformans var. neoformans B-3501A
MDGLITGITSYPYLASLNQAQLKAVTASPSVPLQILAGPGSGKTRVLTCRVAYLVQHHKYSPNEIVAVTFTNKSANEMRKRLQKLLGDKQADQLVLGTFHATCVKYLRRYGKLINLSNNFVIADAEDCKKIMSGILKSRKAALDEASMSLKEGVVLSEISKAKAKGEPPEAMAIRAAQNKNAFTNTLAVIADLYEEYQLALTEANSLDFDDLLLYALRLFKEAPRVVENIRHILVDEFQDTNTTQYELLKRFAKAHKGVSVVGDPDQSIYGWRSAEIENLNKMTKDFPGVEAIYLEENYRSTGSILDAAHAIVSQDRQRIQKSLFTSHPKSAPVTLKVFSTPVIEASFISTEIKRLIAYSGGLLRYDDFAILLRYNALSRVIESSLQKDSIPNRIVGGHKFFERMEIKDLLAYLQLADNPGFNLNSDSFTQPAFVRVVNVPKRSIGDKTLTDILSTAKSMKISPMQLCERVTDGEGIPANIKPGVKKSLANFVGVIRKLRRAAEGGASVADLIKMVIEKVNYEDYLRTSQPDWDSRWENVKELVSSPPTFLLFLHHRVPLWPWLTDLENGNSQISYSVTVAEEQARLSGSEYGIAPEERGFMPANSAAVEAMVNEAYERGKGKEVKQDGDTRRVKEEKRVHPMFRRQASGSDKGSQGLDTSSAARSRSRSDSSAVDSKRIPRKKGSVKTNERHDGVIELLSSDEEENDIKPDVKSKKEVVDGVKQINVADAPSDSVESLANAPDNLTPLAYFLQTSMLSTDTESGQDDASTPKVTIMTVHAAKGLEWPVVFIPAVEQGTFPSYRCTEPHEIAEERRLLYVAMTRAQSFLTMSYCQFRMMGGEENNKEASEFLGDVMRHQPALLATDQPNVDTVVRKHMSAMLCRPMPDEDLTKDMIMKHVRAAPPLSTWDPPERSSWGEKINRFARRDVTKAARATEYWASDVDEYALPSDSLSASTSSPYTTSFTSARMNSGLSRPPAALPMAPQKKPPPPSVKSANRHIPPTMPFTFNTKEEIKEETSLDSLMSGGNKSLEMMAGLGLPADLPPDLVGPSAGAGGELAGRGSLEVARGKKRLGMGRPAPWGSKKPRK

SEQ ID NO: 43961 - DNA, 2418 bp, Prochlorococcus marinus str. NATL1A
  CDS (1)..(2418): transl_table=11
atgaaacaatcaaacagtatatttctaaatggattaaacgaggcgcagtcacatgcagttgatcattttcatggtccattattagttgtagcaggagcaggaagcggaaaaacaagagctcttactcatcgtattgcgcatttaattactgaatacaaagttgatcctagttctattcttgcagttacttttaccaataaagctgcaagagagatgaaagatagacttgaattgcttttagcaaaaaggttatcaagtcttacccacgggaagccttggactgccttgcaagtagcagaacaaagagaaattcgtaatcgtatacatcgtgaaatcagtcgtgaattatggataggtacttttcacgctttgttttcgagattattacgctttgacatcgataaattcaaagaccctgaaggattgacatggactaaacagttttcaatatatgacgaaacagatgcccaaagtcttatcaaagaaatagttacacaagatctacaattagatccaaaaagatttgaaccaaaaaaagtacgatgggcaatcagtaatgccaaaaatcaatgcttacttcctgatgatttatcaaataatcaagaaggtcaaagaggaaaattagttgctgaaacttatagactttatagaaaagctttagctgctaataatgcattagattttgatgatcttctattaatacctgttcaattactacaacaaaatgaaaaaataaggacttattggcacagtcgcttcaaacatgttttagttgatgaatatcaagatactaattggacacaatacgaattaattaaacaattggttaccaatggtaaagatccatcttcttttcaagattggaataatcgatcagtttttgttgttggcgatgcagatcaaagtatttacagctttagagctgcggactttaggatactaatgggatttcaagaggactttggaaagaaaagcctagacaatacatatgattcaactcttgtaaaactagaagaaaattatcgatctacctctaccatcctcgaagcagcaaattcactaatctccaacaataaagaaagaatagataaagttcttagagcaactagaggagaaggtgagcctattagattaacaaggtgtgacgatgagatagcagaggcagaggcagttattcataggctaagaattttagatgcctcgaatccagaattaaattggggagatatggctattctttatagaaccaatgcgcaatcaagagcaattgaggactcattggtccgctggagtattccatacattgtggttggaggattacgtttttatgatcgaagagaaattaaagatctactagcttatttaagacttttaattaatccatctgacagtgtcagtcttctgagagttttaaacgttcctaaaagagggattggaaaaacaacagttcaaagattgagtgatgcagctagtcaattaaaaattcctctttgggaagttgtaaatgaccccgaagctgtcagatcactcgcaggaagatcagccaaaggtcttttaatttttagtgagcttattaatgaattacaaagtcatcttctctcttcaagccccgccgagttggttcaattagttttagaaaaaagtggctatttaagtgaattaattgcaacaggaacagatgaggcagaagaaagaagacgcaatcttcaagaattagttaatgccgcgttgcaatatcaggaagaaagcgaagatgcaaatttagaaggttttttatcaactgctgctctatcaagcgatgcagataataaagacactgcgtcaaatcgagtcacattaatgactcttcacagcagtaaaggtttggaatttcctgtcgtttgtcttgtgggaatggagcaaggcttattcccaagctatagatcacttgatgatccatcttcacttgaggaagaaaggcgactttgttacgtaggacttactagagcaaaagaaaaactatttctctttcatgcatctgagagaagaatgtggggagggatgagagaaccagctatcgcatctatattcctctccgaaataccagaagaacttgttaaaggcgatatcccattatctggtggggctacattaagaagagaaaaaaatctagacagactaactagaattgatcgccaaagtaataaaaagtcctttcctcgtgaagctgaaaatgcagtaagaaaaacatattctggtccttccccagggaagcgatggtcagttaacgatagagttgaacattcttcatttggagaagggataatcacacatgtttttggttcaggagaaaaaatctcactggccataaaattctcaggaatggggccaaaaatattagacccaagactagctccattgaaattgatagatgagtaa

SEQ ID NO: 43962 - protein, 805 aa, Prochlorococcus marinus str. NATL1A
MKQSNSIFLNGLNEAQSHAVDHFHGPLLVVAGAGSGKTRALTHRIAHLITEYKVDPSSILAVTFTNKAAREMKDRLELLLAKRLSSLTHGKPWTALQVAEQREIRNRIHREISRELWIGTFHALFSRLLRFDIDKFKDPEGLTWTKQFSIYDETDAQSLIKEIVTQDLQLDPKRFEPKKVRWAISNAKNQCLLPDDLSNNQEGQRGKLVAETYRLYRKALAANNALDFDDLLLIPVQLLQQNEKIRTYWHSRFKHVLVDEYQDTNWTQYELIKQLVTNGKDPSSFQDWNNRSVFVVGDADQSIYSFRAADFRILMGFQEDFGKKSLDNTYDSTLVKLEENYRSTSTILEAANSLISNNKERIDKVLRATRGEGEPIRLTRCDDEIAEAEAVIHRLRILDASNPELNWGDMAILYRTNAQSRAIEDSLVRWSIPYIVVGGLRFYDRREIKDLLAYLRLLINPSDSVSLLRVLNVPKRGIGKTTVQRLSDAASQLKIPLWEVVNDPEAVRSLAGRSAKGLLIFSELINELQSHLLSSSPAELVQLVLEKSGYLSELIATGTDEAEERRRNLQELVNAALQYQEESEDANLEGFLSTAALSSDADNKDTASNRVTLMTLHSSKGLEFPVVCLVGMEQGLFPSYRSLDDPSSLEEERRLCYVGLTRAKEKLFLFHASERRMWGGMREPAIASIFLSEIPEELVKGDIPLSGGATLRREKNLDRLTRIDRQSNKKSFPREAENAVRKTYSGPSPGKRWSVNDRVEHSSFGEGIITHVFGSGEKISLAIKFSGMGPKILDPRLAPLKLIDE

SEQ ID NO: 43963 - DNA, 2409 bp, Prochlorococcus marinus str. MIT 9303
  CDS (1)..(2409): transl_table=11
gtgagttttcttgctggccttaatgatgctcagcgcaaggctgtcgaccatcatcagggacctctgttggtggttgcaggagctggtagtggcaagacgcgtgcactgacgcatcgcatcgctcacttgattggagcgcatggtgccgatccggctcagattttggctgtgacctttacgaacaaggccgcgcgcgagatgaaggatcgtttggagctgttattggctcagcggcttgctgagagtcaatacggccaaccatggagcactctgccgccggtggaccagcgccagctgcggggtcgaatttttcgagaggtgaccaaagagttgtggattggcacatttcactctttatttgctcgcttgcttcgctttgacatcgacaagtttcgtgatgcagaaggactgagttggacgcgtcagttttcgatttacgacgaggccgatgcccagagtttggtgaaggagattgtgactcaggagctgcagctcgatcccaagcgctttgagcctaagaaggtgcgctgggcgattagtaacgccaaaaatcaaggctggttgcctgatcaattggcagcccaggtcgatggtcagcgaggcaagctcacggttgagacgtatcggcgttatcgcaaggcattagcggcgaacaatgcactggatttcgacgacctgctgttattgcccgtccagttacttcagcagaacgagcagatacgacgttattggcataatcgttttcggcatgtgttagttgatgaataccaagacaccaatcgcactcagtacgagttgatcaagttgttggttaccgatggtcgggaacctgaaatctttgatgattggcagggccgttcagtttttgtggtcggtgatgcagatcaaagcatctacagcttccgtgcggctgatttcacgatcttaatgggctttcaggacgactttggcgacaaagcatcagacgatgccactcgcaccatggtgaagttggaggagaattatcgctctacctcaacaattctggaggcagccaatgccttgatcgctaacaatacagagcggattgacaaggtattgcgagctacccgtggcgagggggagttgatcacccttacccgctgtgacgatgagatcgcagaagctgaagctgtagtgcatcgaatgcgcatgctggaagctgctcatccagaacttcgctggggcgatgtggcagtgctgtatcgcaccaatgcccagtccagggcgattgaggagtcgttggtgcgttggcgtattccttacattgtcgtgggcggactacgtttttatgacaggcgtgaaatcaaggatgttttggcctatttacgcttattggtcaaccccgccgatacggtgagcctgctcagagtcatcaatgtgcccaagcgaggcattggcaagaccaccttgcagagacttgctgatgctgccaatcaacttgggattcctttgtgggatgtggtgagtgatgccgaagcagtgcgctcactaggaggcagatcggcgaaggggttgttgcagttctgtgaattgatcaatgatttgcaacgctcgattcaagatcagattccttcggagatgattcagcaggtgatggagaagagtggctatatcagtgagttgatcgctgaagctaccgatgaggcagaggagaggcgacgcaatttgcaagaacttgtgaatgctgctttgcaataccaggaagaaaatgaagagggcaatcttgagggcttcttagcctccgctgcgttggctagcgatgctgatagcaaagatacggctgctgatcgggtgacgttaatgactttgcatagcagtaaggggctggagtttcccttggtctttctggttggtatggagcaggggcttttccctagctatcgctcccttgatgatccatcctctttggaggaagaacgacgcctttgctatgtggggatgacgcgtgccaaagaacgtttgtttttgtctcatgccagtgagcgaagactttggggtggcatgcgacagcctgctgttccctcactatttcttgctgagttgcccgagggtttggtgcagggtgatctccctcaaattggtggtgtggcattacggcgtgagcgacggctggaccgtttgacgcgggttgatcgcgatgacaatcaacggatcaaagcgggtggtgtgagcggagcccctagcaatgcagtgcggcggcggcaggctgggcccgctccaggcaaggcatgggtcgtgggtgatcgggtcgtgcattccagctttggcgaaggggagatcacccataccttcggcagtggcgagaaagtgtcgattgctgtcaagtttgtcggtatggggccaaagattcttgatccacgtttggccccgattgagcctttggagtag

SEQ ID NO: 43964 - protein, 802 aa, Prochlorococcus marinus str. MIT 9303
MSFLAGLNDAQRKAVDHHQGPLLVVAGAGSGKTRALTHRIAHLIGAHGADPAQILAVTFTNKAAREMKDRLELLLAQRLAESQYGQPWSTLPPVDQRQLRGRIFREVTKELWIGTFHSLFARLLRFDIDKFRDAEGLSWTRQFSIYDEADAQSLVKEIVTQELQLDPKRFEPKKVRWAISNAKNQGWLPDQLAAQVDGQRGKLTVETYRRYRKALAANNALDFDDLLLLPVQLLQQNEQIRRYWHNRFRHVLVDEYQDTNRTQYELIKLLVTDGREPEIFDDWQGRSVFVVGDADQSIYSFRAADFTILMGFQDDFGDKASDDATRTMVKLEENYRSTSTILEAANALIANNTERIDKVLRATRGEGELITLTRCDDEIAEAEAVVHRMRMLEAAHPELRWGDVAVLYRTNAQSRAIEESLVRWRIPYIVVGGLRFYDRREIKDVLAYLRLLVNPADTVSLLRVINVPKRGIGKTTLQRLADAANQLGIPLWDVVSDAEAVRSLGGRSAKGLLQFCELINDLQRSIQDQIPSEMIQQVMEKSGYISELIAEATDEAEERRRNLQELVNAALQYQEENEEGNLEGFLASAALASDADSKDTAADRVTLMTLHSSKGLEFPLVFLVGMEQGLFPSYRSLDDPSSLEEERRLCYVGMTRAKERLFLSHASERRLWGGMRQPAVPSLFLAELPEGLVQGDLPQIGGVALRRERRLDRLTRVDRDDNQRIKAGGVSGAPSNAVRRRQAGPAPGKAWVVGDRVVHSSFGEGEITHTFGSGEKVSIAVKFVGMGPKILDPRLAPIEPLE

SEQ ID NO: 43965 - DNA, 2226 bp, Clostridium thermocellum ATCC 27405
  CDS (1)..(2226): transl_table=11
atggatttattgaaagatttgaataaggaacaaagggaagcggtacttcacgttgacggccccttgcttgttcttgccggtgcgggaagcggaaagacaaaagtgcttacgcacaggattgcgtatttaattaaagagaaaaatgtacatcctgccagtatccttgccataacttttaccaacaaggctgcaagggaaatgagagaaagaatagaccggcttgttgaagatgtcagtgacagtatatgggtaagtacttttcattccatgtgtgtaaggatactaagaagggatatagaaaaaatagattatgataaaaactttgtgatatttgactatgccgatcagcaaaatgttgtaaaagactgcctgaaggaacttaatctcagtgataaaaactttcctccgaagtcaatattggagatgatcggaagggcaaaggacgagcttatcactccggactcttatttaaaaatgtattccggagatttcaggatggagaagatcgcccgggtctatgagctttatcaaaagaagctgaagcaaaataacgctttggattttgacgatattataatgcttacgataaagctttttttggacaatcccgaagtgctgaattattaccagagaaaattcaaatatattctggtggatgagtatcaggacaccaacacagcccagtattcccttgtaagccttttggcacaggggtacagaaatctttgtgttgttggggacgacgaccagtccatctatggttggagaggcgccaatataagaaatattctggattttgagaaggagtttaaggatgcaaaagtaataaagcttgagcagaactaccgttcaacccagattatccttgatgcggcaaaccatgttatcaagaacaatgtgggaagaaaagccaaaaggctttggacaaacaataaaggaggagacgggattagatatctcgagtgcctgaatgagcatgaagaggcgtattttgtggcaagtgagataaagaggctctgcagggagcagaaccgctcttacaaggattttgccgtactttatcgtataaatgccatgtcccgtgttattgaggatgagcttatgagggaaggaataagctacaagatatttggagggcttaggttctatgacagaaaagaaataaaagatgtaattgcctatcttcgtgttattcaaaatccttcggataacataagtctaaagaggataataaatgagcctaaaagaggtattggaaatgcgaccatagatactgcagagagactggcaaatgaaaggggagtcagcattttctcaattatttcatcggcggcggaaattcccgagcttgcccgggcttcgtcaaagcttgaaaagtttgtctcgctgataaacagcctgagggcccaaagtatggtgatgaccgcatcggaaatgattgaggaggtccttgagaggacgggcattttggaggcgtatagacaggaaaataccctggaagcccagagcagaatagaaaacataaaagagttgctctccgttgcaattgaatttgaaaatgaaagcgaggaaaagagccttacggattttcttgcccatgtgtccctggtttcggatgtcgatacgatggatgaaaacagtgaatatgttgctcttatgacccttcacagcgcaaagggattggagtttccggtggtatttctggtgggaatggaggaaggtattttcccgggttacaggtcaatgaccaatgaatcggagctggaggaggagaggaggctttgttatgtaggcataacgagggcgaaagaaaacctttacatgacaagcaccttcagccgtacgttgtttggaaataccacctacaacagagtttcaagatttgttaaagaaattcccgaggagctttttgatttcggcggggataaaaagaaagcaaaggatgagaacattggcgaaggaacggcaaaaaagagcggtacattaaacaaggactttaactcttctaaaagctttaatgcggtaagctttaagcctgtgcaaaggacggagacgtcaaaaacggagcttaaagttggtgacgtggtgcggcacaaagtcttcggggaaggaattataacaaaaagagagcctgacggcgatgatttcaaactggagatacattttaagggaaaaggcatgaagaggcttttggaaagctatgcgaatctgactaaggtgaattaa

SEQ ID NO: 43966 - protein, 741 aa, Clostridium thermocellum ATCC 27405
MDLLKDLNKEQREAVLHVDGPLLVLAGAGSGKTKVLTHRIAYLIKEKNVHPASILAITFTNKAAREMRERIDRLVEDVSDSIWVSTFHSMCVRILRRDIEKIDYDKNFVIFDYADQQNVVKDCLKELNLSDKNFPPKSILEMIGRAKDELITPDSYLKMYSGDFRMEKIARVYELYQKKLKQNNALDFDDIIMLTIKLFLDNPEVLNYYQRKFKYILVDEYQDTNTAQYSLVSLLAQGYRNLCVVGDDDQSIYGWRGANIRNILDFEKEFKDAKVIKLEQNYRSTQIILDAANHVIKNNVGRKAKRLWTNNKGGDGIRYLECLNEHEEAYFVASEIKRLCREQNRSYKDFAVLYRINAMSRVIEDELMREGISYKIFGGLRFYDRKEIKDVIAYLRVIQNPSDNISLKRIINEPKRGIGNATIDTAERLANERGVSIFSIISSAAEIPELARASSKLEKFVSLINSLRAQSMVMTASEMIEEVLERTGILEAYRQENTLEAQSRIENIKELLSVAIEFENESEEKSLTDFLAHVSLVSDVDTMDENSEYVALMTLHSAKGLEFPVVFLVGMEEGIFPGYRSMTNESELEEERRLCYVGITRAKENLYMTSTFSRTLFGNTTYNRVSRFVKEIPEELFDFGGDKKKAKDENIGEGTAKKSGTLNKDFNSSKSFNAVSFKPVQRTETSKTELKVGDVVRHKVFGEGIITKREPDGDDFKLEIHFKGKGMKRLLESYANLTKVN

SEQ ID NO: 43967 - DNA, 2265 bp, Clostridium difficile 630
  CDS (1)..(2265): transl_table=11
atgaatttagatacattaaatcctgctcaaagagaagcagtagaaaagactgaaggtccagtacttatactggctggtgctggttcaggtaaaactaaggtattaacaacaagaatagcatatcttatagaagataaaggtgtacaagcaccaaatatattggctataacatttacaaacaaagctgcaaatgaaatgagagagagagttgaacaaaatataggtcctgaaactaaggatatgtggataagtacattccattcttgctgtgttcgtatactaagaaaagatataaataagattggttacaatagaagttttgtaatttatgattcagcagaccaagttacattggttaaagactgtctaaaagaattaaatttaagtgataaagtgtttgaaccaaaagcagttataagtgcaatttcaggagcaaaagacaaactttatactccaaagcagtttaaagatatcaatatggcagataatagaatggttaagattgcagatatttatgcgctatatcaagaccgtttaaaaagaaatagtgcacttgactttgatgatttaatacttaaaactgtagaacttttcaaggctaatgatgaagtgttagcatattacagaagcagatttagatacataatggtagatgagtaccaagatacaagtaaagctcaatatgaattgataaaattattagcaagagaacatcaaaatatttgtgttgttggagatgatgaccaaagtatttatggatggagaggtgcagatataagaaacatacttgaatttgagaaagattatgacaatgtacatgttgtaaagttagaacaaaattataggtctacacaagtgatattagatgcagctaataaagtcatatctaataatatagaaagaaaaagaaaaaagctttggagtgaaaaaaaagaaggagaacttataaagatacaattaactggtagcgaaatagaagaggctgatttcattgctgattcaattgcacaaatagctagaaaagaaaatagaccttataaggattttgcagtactttatagagcaaatgcacaggcaagacctgtagaggacgctttaaatagaagtcaaattccatacaatatatatggtggtacaaaattctatgagagaaaagaaataaaggatttgttggcgtatttaagagttattcaaaatccacaagatgatatatctataaaaaggattataaatgttcctagaagaggtatagggcttagaactatagaaaaaattgaagatagagctaacttaaaacaggaaagtatatactcagtattaattgatatagaaacaaattcagatatatctactaaggcaagggcaagtataagtggatttgttgatattatagggactcttagaactataaaagaagtttatcctgttagcaaacttatagaaaaagtcttggatactacaggatatatggacgagcttgtagagataagaaataaaaatgaaaaagatttaacaggcaaaggtgaagaagctcaagacagaattgataatttgagagaatttatttctatagctttggagtttgaaagtagtaatgatgatacttatgaaaataaagacttagagacattcctaacaagtatagcacttacatctgaatcaaatgatgaagaagacaatgatagggtttcgcttatgacaattcatacatccaaaggtttagagttccctgttgtgtttttaacaggtatggaagaagggttatttcctatatcaagagctataaaatctatgagtgattcacaaatagaagaagagagaagactttgttatgttggtataactagagctaaagaagagctatatatgtcattgacagagaagagaacattatatggtaaaacaaatgttgcaatagcttcaagatttatggaagaactgccagaagaatgtatagaaagattgtacaaagtaaaaaaagaactaagctattctaaagcaagttataatatgttagataaatatactaaaaagtatatgagtactataagcaaatctaaagttgcagataaagttaatgctacaataaaagattctaataaagaaactaatccagatgatataaaacttggttctaaggtacatcatcctaaatttggggttgggacagtggtttctataattggtacagatgttactatagcttttgaccaacagggaattaaaaaaataaataaagaatatacaacactaaatattttataa

SEQ ID NO: 43968 - protein, 754 aa, Clostridium difficile 630
MNLDTLNPAQREAVEKTEGPVLILAGAGSGKTKVLTTRIAYLIEDKGVQAPNILAITFTNKAANEMRERVEQNIGPETKDMWISTFHSCCVRILRKDINKIGYNRSFVIYDSADQVTLVKDCLKELNLSDKVFEPKAVISAISGAKDKLYTPKQFKDINMADNRMVKIADIYALYQDRLKRNSALDFDDLILKTVELFKANDEVLAYYRSRFRYIMVDEYQDTSKAQYELIKLLAREHQNICVVGDDDQSIYGWRGADIRNILEFEKDYDNVHVVKLEQNYRSTQVILDAANKVISNNIERKRKKLWSEKKEGELIKIQLTGSEIEEADFIADSIAQIARKENRPYKDFAVLYRANAQARPVEDALNRSQIPYNIYGGTKFYERKEIKDLLAYLRVIQNPQDDISIKRIINVPRRGIGLRTIEKIEDRANLKQESIYSVLIDIETNSDISTKARASISGFVDIIGTLRTIKEVYPVSKLIEKVLDTTGYMDELVEIRNKNEKDLTGKGEEAQDRIDNLREFISIALEFESSNDDTYENKDLETFLTSIALTSESNDEEDNDRVSLMTIHTSKGLEFPVVFLTGMEEGLFPISRAIKSMSDSQIEEERRLCYVGITRAKEELYMSLTEKRTLYGKTNVAIASRFMEELPEECIERLYKVKKELSYSKASYNMLDKYTKKYMSTISKSKVADKVNATIKDSNKETNPDDIKLGSKVHHPKFGVGTVVSIIGTDVTIAFDQQGIKKINKEYTTLNIL

SEQ ID NO: 43969 - DNA, 2289 bp, Herminiimonas arsenicoxydans
  CDS (1)..(2289): transl_table=11
atgcaaaatcttcttcacaatctcaatcccgaacaactcgccgctgttaccttacccgctcaacccgctctgattctggccggtgccggatcgggcaagacgcgtgtgctgacgacgcgcatcgcatggctgattcagaccgggcaggtatcgcctgccggcatcctcgcggtgacctttaccaacaaggcggcgaaggaaatgatgacgcgcctgtcggcgatgatgccgatcaacacgcgcggcatgtggatagggacgtttcacggcttgtgcaatcgcctgttgcgcgcgcattaccgcgatgcggctttgccgcagacgttccagattctggactcgcaggatcagctgtcgatgatcaagcgtttgctgaaggcgaacaatatcgacgatgaaaaatatccgccgcgcaatctgatgtacttcatcaatggcgccaaggataacggcttgcgtgcgcaggatgtcgaagcgcatgacgattacaaccgcaagatggtcgagttgtatgagatctacgatcagcaatgccagcgcgaaggcgtggtcgattttgccgaactgttgttgcgcacctatgaattgctgagccggaatcagcccttgcgcgaacattatcagtcgcgcttcaagcatattctggtcgatgaatttcaggatacgaataacctgcaatacaactggctcaagttgatggccggcacgcaaggcgcagtgtttgccgtcggtgacgacgatcaaagcatctatgctttccgcggtgcgaacgtgggcaacatgagtgccttcgagcgcgagttcaaggtggaaaatctgatcaagctggagcagaactatcgctcgcacggtcatatactcgataccgccaatacgctgattgccaacaataccaagcgcctgggcaagaatctgcataccgatgccgggcatggcgaacaggtaaggatttttgaatccaccagcgatctgcaagaggcccaatggatcatcgaagaaacgaaaagcctgattgcagaaggcggcacgcgtagcgaaattgccgtgctgtaccgctcgaatgcgcaatcgcgcgtgatcgagcatgcattgttctcggccggcatcccgtatcgcgtctatggcgggcagcgctttttcgagcgcgccgaagtcaagcatgcgatcgcgtatctgcagctgatggacaatctgcataacgactctgcttttttgcgcgtagtgaattttccgacacgcggcataggcgcacgttcgctggagcaattgcaggatgcggccagacagtatggcatttcactgtatgccgccgtgccgtatatctcgggcaaggcgggcacttcgctcggcgccttcgtcaaattgatagagggtgcacgttttgaaacgcagcatctacccttgccggaaatggtgcaggtggtgctcgatgccagcggcttgatcacgcattatcagaaggaaaaagagggtgccgaccggatagaaaatctggagcagctggtcagcgcggcaaccttgtttgtttcggaagaaggcttcggtcacgatgcgcccgcattgatggggccgaccagcaaacagatggccggtccggccattaccacgcaggacggcattgaagtactggatgcggatgcgcccttgccggcggtgatgtcgcccttgtcggccttcctctcgcatgcgtcgctggaagcgggtgacaaccaggcgcaggccgggcaggatgcattgcaattgatgaccgtgcattcggccaaggggctggaattcgatgcggtgttcatcaccggtcttgaagaaggtttgttcccgcacgaaaattcgcagaaggaagagggcggagtcgaggaagaacggcgtttgatgtatgtggccatcacgcgtgccaagcgcaggctgtacatcagtttttcacaaacgcgcatgctgcacgggcagatgcgttacaacatgaaatcgcgcttcttcgatgaaatgccggaagattcattgaaatggctgtcgcccaaagtgcatccgccggcgcatcaatggtatgcgcaccccaaggcagcgtgggaagacgcgctcggtgcaggttccaacaggattgcgcaaaacatcgtcaagagcgatatcggctggcgcataggcgagtcggttgcgcatgccaagtttggcgaaggagtgatcgtcaatatagaaggcagcggcggcagtgcccgtgcgcatatcaacttcggacggcacggaatgaaattgctggatttgagtatcgccaagcttgataaattagctggctaa

SEQ ID NO: 43970 - protein, 762 aa, Herminiimonas arsenicoxydans
MQNLLHNLNPEQLAAVTLPAQPALILAGAGSGKTRVLTTRIAWLIQTGQVSPAGILAVTFTNKAAKEMMTRLSAMMPINTRGMWIGTFHGLCNRLLRAHYRDAALPQTFQILDSQDQLSMIKRLLKANNIDDEKYPPRNLMYFINGAKDNGLRAQDVEAHDDYNRKMVELYEIYDQQCQREGVVDFAELLLRTYELLSRNQPLREHYQSRFKHILVDEFQDTNNLQYNWLKLMAGTQGAVFAVGDDDQSIYAFRGANVGNMSAFEREFKVENLIKLEQNYRSHGHILDTANTLIANNTKRLGKNLHTDAGHGEQVRIFESTSDLQEAQWIIEETKSLIAEGGTRSEIAVLYRSNAQSRVIEHALFSAGIPYRVYGGQRFFERAEVKHAIAYLQLMDNLHNDSAFLRVVNFPTRGIGARSLEQLQDAARQYGISLYAAVPYISGKAGTSLGAFVKLIEGARFETQHLPLPEMVQVVLDASGLITHYQKEKEGADRIENLEQLVSAATLFVSEEGFGHDAPALMGPTSKQMAGPAITTQDGIEVLDADAPLPAVMSPLSAFLSHASLEAGDNQAQAGQDALQLMTVHSAKGLEFDAVFITGLEEGLFPHENSQKEEGGVEEERRLMYVAITRAKRRLYISFSQTRMLHGQMRYNMKSRFFDEMPEDSLKWLSPKVHPPAHQWYAHPKAAWEDALGAGSNRIAQNIVKSDIGWRIGESVAHAKFGEGVIVNIEGSGGSARAHINFGRHGMKLLDLSIAKLDKLAG

SEQ ID NO: 43971 - DNA, 2364 bp, Burkholderia vietnamiensis G4
  CDS (1)..(2364): transl_table=11
atgcccgatctgctcgccaatctgaaccctgaacaatacgccgccgtcacgctgccgaacgaaccggcgctgatcctcgcgggggcgggcagcggcaagacccgcgtgctgatcacgcggatcgcgtggctgatccagcagggctacgcgtcgccggccaccgtgctggccgtcacgttcaccaacaaagccgcgcgcgaaatgatggcgcggctgtccgcgatgatgccgatcgacacgcgcgggatgtggatcggcacgttccacgggctgtgcaaccggatgctgcgcacccactggcgcgacgcgggcctgccgcagacgttccagatcctcgacacggccgaccagctgtccgcgatcaagcggctgatgaaggccgcgaacgtcgacgacgagaaatacccgccgaagaacgtccagtacttcatcaacaacgcgaaggagcaggggctgcgtcccgacaaggtcgacgccaccgacaacttcaaccgcaagttcgtcgagctgtatcaggcatacgatcagcaatgccagcgcgagggcgtcgtcgacttccccgagctgctgctgcgctgctacgagctgctcgcgtacaacgcgccgctgcgcgcgcattaccaggcgcgcttccggcacattctcgtcgacgagttccaggacaccaacaagctgcagtacgcgtggctcaagatgctcgcgggcgccgggaacgcgatcttcgcggtcggcgacgacgatcagtcgatctacgcgttccgcggcgcgaacgtcggcaacatgcgcgacttcgaagacgaattccgcgtgcgcaacctgatcaagctcgagcagaactaccggtcgcacggcaacatcctcgacgcggccaaccagctgatctcgaacaacgcgcaccgcctcggcaagaacctgcgcaccgacgccggccacggcgagcccgtgcgcgtgtacgaggcgagcaccgatgcgcaggaagccggctggatcgtcgaggagatccgctcgctgatcaataccgggatgtcgcgcagcgagatcgcggtgctgtaccggagcaacgcgcagtcgcgcgcgatcgagcacacgctgatgacgtcgggcatcccgtatcgcgtgtacggcggcctgcgcttcttcgagcgtcaggaagtgaagcacgcgctcgcgtatctgcgcctgatcgacaacccgaacgacgacaccgcgttcgtgcgcgtcgtcaacttcccgacgcgcgggatcggcgcgcgctcgatcgagcagctcgcggacgccgcgcgcctgtacgactgctcgatggccgccgcgatcccgtacgtgacgggcaaggccggcacgagcctcggcgcgttcgcgacgctgatcgcgaagatgcgcgccgagaccgagcagatgagcctgccggagacggtcgagtacgtggtgcgcgcgagcggcctcgccgatttctaccagggcgagcgcgaaggccaggaccgcctcgaaaacttgcaggaactcgtgaacgcggccaccgcgttcgtcagcgaggaaggctacgggctcgatgcaccggcgcgcgcgattccgctgcgcgccggcgcgatcgcggcgccggcgctgcgcgcggaagccgacgatccgtcggtcgacgtactcgatccggcgccgctcgacgaccccgcgcagaaccccgacacgatgacgccgctggcgggcttcctgtcgcacgcgtcgctggaagccggcgacaaccaggcgcaggccggccaggacgccgtgcaactgatgaccgtgcatgcgtccaaggggctcgaattctcggccgtgttcatcaccggcctcgaggaagggttgttcccgcacgaaaacagcgtgctcgagtccgacgggctcgaggaggagcgccggctgatgtacgtcgcgatcacgcgcgcgaaggagcggctctatctgtcgttcgcgcagagccgcatgctgcacggccagacgcgctacaacgtgcgctcgcgcttcttcgacgagctgcccgagcacgtgctgaagtggctcacgccgaaagtggaagccggttcgcgctggggcggccgcgccgacaacgccggctgggggcgcgactggttcgcgcggccgggcggcggccatcgcgagcagatcgtcgatgcggccgtgtccgcgccgctgccggcgttcgccgacaagcagcgcgcggccgacaccgggttccgcatcggccagcaggtgtttcatacgaaattcggcgagggtgtggtcaccgcgctcgaaggcagcggcgccgatgcaaaggcgcaggtgaagttcaagcggcacggcgagaagtggctcgcgctcgcggtcgcgaaactgcaggcggtggaatga

SEQ ID NO: 43972 - protein, 787 aa, Burkholderia vietnamiensis G4
MPDLLANLNPEQYAAVTLPNEPALILAGAGSGKTRVLITRIAWLIQQGYASPATVLAVTFTNKAAREMMARLSAMMPIDTRGMWIGTFHGLCNRMLRTHWRDAGLPQTFQILDTADQLSAIKRLMKAANVDDEKYPPKNVQYFINNAKEQGLRPDKVDATDNFNRKFVELYQAYDQQCQREGVVDFPELLLRCYELLAYNAPLRAHYQARFRHILVDEFQDTNKLQYAWLKMLAGAGNAIFAVGDDDQSIYAFRGANVGNMRDFEDEFRVRNLIKLEQNYRSHGNILDAANQLISNNAHRLGKNLRTDAGHGEPVRVYEASTDAQEAGWIVEEIRSLINTGMSRSEIAVLYRSNAQSRAIEHTLMTSGIPYRVYGGLRFFERQEVKHALAYLRLIDNPNDDTAFVRVVNFPTRGIGARSIEQLADAARLYDCSMAAAIPYVTGKAGTSLGAFATLIAKMRAETEQMSLPETVEYVVRASGLADFYQGEREGQDRLENLQELVNAATAFVSEEGYGLDAPARAIPLRAGAIAAPALRAEADDPSVDVLDPAPLDDPAQNPDTMTPLAGFLSHASLEAGDNQAQAGQDAVQLMTVHASKGLEFSAVFITGLEEGLFPHENSVLESDGLEEERRLMYVAITRAKERLYLSFAQSRMLHGQTRYNVRSRFFDELPEHVLKWLTPKVEAGSRWGGRADNAGWGRDWFARPGGGHREQIVDAAVSAPLPAFADKQRAADTGFRIGQQVFHTKFGEGVVTALEGSGADAKAQVKFKRHGEKWLALAVAKLQAVE

SEQ ID NO: 43973 - DNA, 2139 bp, Dichelobacter nodosus VCS1703A
  CDS (1)..(2139): transl_table=11
gtgaacatcgacacgattttatccggtttaaatgcggcacaacgcgacgccgtcactacaaaagaacgcattgtgcgcgtgattgccggcgcgggcagcggcaaaacgcgcgtactcgtgcaaagaatgcaatggttaatgacggttgccggctgtatgccgtatcaattattggcgttaacttttaccaataaagccgcccaagaaatgcggcaacgtttggagcaatcagcggcttgttctttaaatcaattatggatgggcacatttcatagcatttgcttgcgcattttgcggcaatacgcggaacttgtcggctgggaaaaaagttttatcgtgatcgacagcgacgatcaattgcgtttgatcaagcggttgctgcaaaaaaataattggaatgaagaaattttatcggcaaaagccgtacaagcgcagatcaacgcttataaagaaaacggtttgcgcgcggcggatttgcctacttccgcgccccctttagaaatcgcggttcatcatttttatcaagaatatgaacatattacgcgacaacaaggcacgatggattttgcggaattattgctgttaaccacggaattattggcgcaacatgaaaccgttcaacagcgttttcatcaacgttttcaagctattttgatcgatgaatttcaagatacgaatactttgcaatttaaattggttacgcaattatgtgcgccagaaacgcaattattcgtcgtcggcgatgacgatcaatcaatttacggctggcgcggcgcgcaaatcgatcacatcgtgcatttagaacgttattatccaaccgtgcacacgattcgtttggagcaaaattatcgttccacaaaaacgattttagccgccgctaatgccgttatcgcgcataatcaaacacggttgggaaaaacgttgtggagcgatggcaaacacggcgaggcaatcgctttatatgccgcggttaatgaatacgatgaagcgcgttatctcgttgaaaatattgctcaatttcatcaacacggcggcgcttatgatcaatgcgcgattttgtatcgttccaatgcactgagtcggatttatgaagaggcgttgatacaaaaaaatattccttatcgtatttacggcggtttgcgctttttcgagcgcgccgaaattaaagatgcgctggcgtatttgcgtttattgcattatcccgatgatgatgcggctttagaacgcattattaatcaaccgccgcgcggcatcggcgccaaaactatggaagatgtgcgtttgctggcgcaacgtgtgcaatgttctttgtggcgcgttattactgatgatgcgttgctggagcaaaaatgttctgctcgtgctcaaaatgctttgcgtcaatttcgcgcgttaattattaagatgaccgcgtttgccgagcgcagcgattcgttgcgcgatattttaaaaatggtggttgatgaaagcggtttatatgcggcgttgacgaataataatcaggaagaaacggaaaatcgtcgggaaaatttgcacgaattaattgccgccggtgattatcaatccgatcaaaatgatgcggatcacgataaaatcgccgattttttagcgatggcgtcattagatgccggcgataaagaaacaaatgcccacggcgtgcaattgatgacgttgcacagcgcaaaaggattggaatttaaccgcgtttatatggttgcgcttgaagaaggtttatttccaaatgcccgttctttggaaaacagcgcgcaattggaggaagagcgccgtttggcatatgtcggtatcacccgcgcgcgcgaacaattaacgatgagttttgccgaacggcggcgttattacggtcaagataattacgcgcgcccatcgcggtttttaaatgagattccgcccgaattattaaatatggtgcgtccggtattatttaatcgtacgcaacccaatgatattcaagaagataatccatggaaaaccggcgtttgcgttcaacatgcccaatttggaacgggcgttattcaggcggttgaaggcagcggcgaacatcagcgcgcgttggtaaaatttaccacagtaggagaaaagtggctggtgttggcgtatgcaaagttgaaaattttataa

SEQ ID NO: 43974 - protein, 712 aa, Dichelobacter nodosus VCS1703A
MNIDTILSGLNAAQRDAVTTKERIVRVIAGAGSGKTRVLVQRMQWLMTVAGCMPYQLLALTFTNKAAQEMRQRLEQSAACSLNQLWMGTFHSICLRILRQYAELVGWEKSFIVIDSDDQLRLIKRLLQKNNWNEEILSAKAVQAQINAYKENGLRAADLPTSAPPLEIAVHHFYQEYEHITRQQGTMDFAELLLLTTELLAQHETVQQRFHQRFQAILIDEFQDTNTLQFKLVTQLCAPETQLFVVGDDDQSIYGWRGAQIDHIVHLERYYPTVHTIRLEQNYRSTKTILAAANAVIAHNQTRLGKTLWSDGKHGEAIALYAAVNEYDEARYLVENIAQFHQHGGAYDQCAILYRSNALSRIYEEALIQKNIPYRIYGGLRFFERAEIKDALAYLRLLHYPDDDAALERIINQPPRGIGAKTMEDVRLLAQRVQCSLWRVITDDALLEQKCSARAQNALRQFRALIIKMTAFAERSDSLRDILKMVVDESGLYAALTNNNQEETENRRENLHELIAAGDYQSDQNDADHDKIADFLAMASLDAGDKETNAHGVQLMTLHSAKGLEFNRVYMVALEEGLFPNARSLENSAQLEEERRLAYVGITRAREQLTMSFAERRRYYGQDNYARPSRFLNEIPPELLNMVRPVLFNRTQPNDIQEDNPWKTGVCVQHAQFGTGVIQAVEGSGEHQRALVKFTTVGEKWLVLAYAKLKIL

SEQ ID NO: 43975 - DNA, 2388 bp, Synechococcus sp. WH 7803
  CDS (1)..(2388): transl_table=11
atgagctttcttgccggactcaacgacgcccagcgccgggcggtggatcaccatgagggtcctttgctggtggtggccggtgccggcagtggcaagacccgggcactcacgcacaggattgcccatctgattggtgagcatggtgccgatcccgcccagatcctggcggtgaccttcaccaacaaggccgcacgggagatgaaggagcgtttggagctcctcttggcccagcgtctggcgcagagccagtacggccaaccttggagcaccctgccgccggtggagcaacgtcagctgcgttcacggatttaccgggaggtcaccaaggagttgtggatcggcacgttccacgccctcttcgcgcggatgctgcgttacgacatcgataagttcaaagacagcgagggtctgacctggaccaagcagttctccatctacgacgaggccgatgcccagagcctggtgaaggagatcgtgacccaggagcttcagcttgaccccaagcgcttcgaacccaaaaaaacccgttgggcgattagcaacgccaagaatcaggggtggctgcccgatcaactcgaggccaatgccgagggtcagcggggcaagctcaccgccgatgtgtaccggcgctaccgcaaggccctggcggcgaacaatgcccttgatttcgatgatctgctgttgctgcccgtgcagcttctgcagcagaacgaacaggtgcgcagttactggcaccgacgcttcgcccacgtgttggtggatgaataccaagacaccaaccgcacccagtacgagctgatcaagctgctggtgaccgatggcaaggatccccaggtttacaacaactgggctggacgttcggtgtttgtggtgggcgatgccgatcagagcatctacagcttccgggcggcggacttcacgatcctgatgggctttcaggacgactttggtgatcagcagtccgacgaggccacccgcaccatggtgaagcttgaggagaactatcgctccacagccaccatcctcgaggccgccaatgccttgatcgccaacaacagcgagcgcatcgacaaggtgctgcgtccaacccgcggcgagggggagctgatttcgctcacccgctgtgacgatgagatcgctgaggccgaagccgtggtgcatcgactgcggatgatggaggcggccaaccccgaactcacctggggggacatggcttgcctttatcgcaccaatgcccagtcgcgtgcgctggaggaatccctggtgcgctggcggatcccttacgtggtggtaggtggtctgcgcttctacgaccgtcgtgaaatcaaggacgtgctcggctacctgcgcctgctgatcaacccggccgacaccgtgagtctgttgcgggtgatcaatgtgcccaaacgggggatcggcaaaaccacgattcagcggctcaccgatgcggccaatcaactgggcattcccctctgggatgtggtgagtgatcccgaagcggtgcgctccctcggtggtcgctccgccaagggattgctgcagttctgtgaactgatcaacggcttgcgtgaacagcttcacaacacgactccctccgacctgattcagcaggtgatggagcgcagcggctacgtgagcgaactgatcactgaaggcaccgatgaggcggaggaacgccggcgcaacctgcaggagttggtgaacgcaggactgcagtaccaggaggagaacgacgagggggatctcgagggttttctggcctccgcagctctggccagcgatgcggacagcaaggacaccgccgctgatcgcgtcaccctgatgaccctgcacagcagcaaggggctggaatttcctgtggtgtgcctggtgggcctggagcaggggctgttccccagttatcgctccctcgacgatcccgcttcgctggaggaagagcggcgactctgttatgtgggcatcacccgggccaaagagcgtctgttcctctcccatgccagcgagcggcgcctctggggcggcatgcgcgaaccggcggtgccgagcgtgtttctctctgagttgccggaagcgttggtgcagggggagattccccgctcaggcggagcagcgatccgtcgggaacaacggttagaccgccttacccgagtggatcgagaccaacccagcagcgcccctgccaacgcggtgcgccgtcgtcaggccggcccggctccaggcaagcgttggagcgtgggtgaccgggtgctgcacagcagcttcggggaaggcgaggtcacgcacaccttcggcagtggcgaaaaggtgtcgatcgcggtgaagttcgccggcatgggccccaaaatcctcgatccacgcctggcaccgatcgagcccatcgatcgctga

SEQ ID NO: 43976 - protein, 795 aa, Synechococcus sp. WH 7803
MSFLAGLNDAQRRAVDHHEGPLLVVAGAGSGKTRALTHRIAHLIGEHGADPAQILAVTFTNKAAREMKERLELLLAQRLAQSQYGQPWSTLPPVEQRQLRSRIYREVTKELWIGTFHALFARMLRYDIDKFKDSEGLTWTKQFSIYDEADAQSLVKEIVTQELQLDPKRFEPKKTRWAISNAKNQGWLPDQLEANAEGQRGKLTADVYRRYRKALAANNALDFDDLLLLPVQLLQQNEQVRSYWHRRFAHVLVDEYQDTNRTQYELIKLLVTDGKDPQVYNNWAGRSVFVVGDADQSIYSFRAADFTILMGFQDDFGDQQSDEATRTMVKLEENYRSTATILEAANALIANNSERIDKVLRPTRGEGELISLTRCDDEIAEAEAVVHRLRMMEAANPELTWGDMACLYRTNAQSRALEESLVRWRIPYVVVGGLRFYDRREIKDVLGYLRLLINPADTVSLLRVINVPKRGIGKTTIQRLTDAANQLGIPLWDVVSDPEAVRSLGGRSAKGLLQFCELINGLREQLHNTTPSDLIQQVMERSGYVSELITEGTDEAEERRRNLQELVNAGLQYQEENDEGDLEGFLASAALASDADSKDTAADRVTLMTLHSSKGLEFPVVCLVGLEQGLFPSYRSLDDPASLEEERRLCYVGITRAKERLFLSHASERRLWGGMREPAVPSVFLSELPEALVQGEIPRSGGAAIRREQRLDRLTRVDRDQPSSAPANAVRRRQAGPAPGKRWSVGDRVLHSSFGEGEVTHTFGSGEKVSIAVKFAGMGPKILDPRLAPIEPIDR

SEQ ID NO: 43977 - DNA, 2199 bp, Leptospira interrogans serovar Copenhageni str. Fiocruz L1-130
  CDS (1)..(2199): transl_table=11
gtggactcctcatttttatccgatttaaacgaagaacaaaaaaaagctgtcttacaagtaaacgggccggttttaattttggcgggagcaggttccggtaaaacaagagttatcactcatagaattgcaaatcttctaatcaatcatgggatcgatcgtatctgtgcagtaacctttaccaataaggcggctgcggagatggtagaaagagtaaaaaaaatagttccttttttacccgcaaacgttcagatcaaaaccttccattctctttgtttgtatattttaagaagagaagcttcctttttcggatttgataacggttttacaatttatgataccactcttcaagaatcacttttaaaacaagtaattaaggatctttctttggatcctaaattttataaaccctccacacttggaaactatataagcggtttgaaagataaaatgttgtctcctgaaagttatttggaaaaagaaggtcgcaacgatttttctaaggccgtatctgcaatttataaggaatacgaaaaaagaaaggatgcaaattatgctttcgatttcggagatctgatatggaaaacggttcaactatttcaaaaatcttcggatgcaatttctaaataccgtcataagtgggaatacgtgatggtagatgaatatcaagatacgaataaggttcaatacgaacttgtacttcttcttgcaggagaaaaaagaaacctatgtgtggttggagacgatgatcaatctatttattcttggagaggagctgacataggaaacattctgaatttcgaaaaagattttccagaatcagtggtgatcaaactggaagaaaactatcgttctacatctaatattatattagctgcttctaatgtaatttcaaacaacactcagagaaaagaaaaggaaatatttacgaataacccggaaggtgctccggttgtgttaaacgaatttgaaaatgaatctgaggaggctcacggagtgatcactagaatacgctccgcgtattccggaggaacggaatataagaatattgcaatattctacagaactaattctcagtccagatattttgaagaagctttgagaaatgtaggaattccgtataaaattttcggaggtttccgtttttttgacagagcggaaattaaggatttgattgcatatttaaacgtggtttcgaaccctctggatagcgtttcgcttcttagaatcataaattatcctccgagaggaattggggattctggagttgaaaaaattcgagagttttcactcgaaaaaggaatttccattttggaagttttgggtcaagaagacattcctctcaaaaaagcagctaagtctaaaggaaaggaactttataatttattttgcgatttgatcgaaaaatcggaaaaaggtttgtctccttccgaaatcgcattagaacttttgaatcgttccggtctcatgtctcatctcaaagatgaaggaacggaagaatctgtagctcgtttagaaaaccttcaagaattagtcaattcgatagaggaatacgaaaaaaattcggattctccttctttggaagaatatttaaatcagattagtttgattacaagcgaagaagattctaaagaactcaccgattatgtgaatctaatgactgtgcataacgcaaaaggacttgaatttgaagtcgtttttctttctggattggaagagggaacttttccacatagtatgagtttagaagaatctcattttggggacgaagaagaaagaaggcttttttacgttgctcttactcgggctcgtgaggaattatttctaagttattgtaggacttccagaaagtttggtaaggtggaagatagaattccttctcgatttttatctgaaattccaagaaaatgttttggaaatagaggttatgtaagtagagaacgaactgctagaaaacctcagggccctccagtggcttctaaaattagacaagcgaataacgaattggaatcacaccacgcaccaccacctgatccaaataatctctatctaaaaccgggagatcgggtaaaacacaaacaattcgggataggaacaattttgactatttccggtagggaaaaaaatacaaaggtcgccatccgttttggaaacgtagaaaagaacttttttgttgcctataccccgcttgagaaattataa

SEQ ID NO: 43978 - protein, 732 aa, Leptospira interrogans serovar Copenhageni str. Fiocruz L1-130
MDSSFLSDLNEEQKKAVLQVNGPVLILAGAGSGKTRVITHRIANLLINHGIDRICAVTFTNKAAAEMVERVKKIVPFLPANVQIKTFHSLCLYILRREASFFGFDNGFTIYDTTLQESLLKQVIKDLSLDPKFYKPSTLGNYISGLKDKMLSPESYLEKEGRNDFSKAVSAIYKEYEKRKDANYAFDFGDLIWKTVQLFQKSSDAISKYRHKWEYVMVDEYQDTNKVQYELVLLLAGEKRNLCVVGDDDQSIYSWRGADIGNILNFEKDFPESVVIKLEENYRSTSNIILAASNVISNNTQRKEKEIFTNNPEGAPVVLNEFENESEEAHGVITRIRSAYSGGTEYKNIAIFYRTNSQSRYFEEALRNVGIPYKIFGGFRFFDRAEIKDLIAYLNVVSNPLDSVSLLRIINYPPRGIGDSGVEKIREFSLEKGISILEVLGQEDIPLKKAAKSKGKELYNLFCDLIEKSEKGLSPSEIALELLNRSGLMSHLKDEGTEESVARLENLQELVNSIEEYEKNSDSPSLEEYLNQISLITSEEDSKELTDYVNLMTVHNAKGLEFEVVFLSGLEEGTFPHSMSLEESHFGDEEERRLFYVALTRAREELFLSYCRTSRKFGKVEDRIPSRFLSEIPRKCFGNRGYVSRERTARKPQGPPVASKIRQANNELESHHAPPPDPNNLYLKPGDRVKHKQFGIGTILTISGREKNTKVAIRFGNVEKNFFVAYTPLEKL

SEQ ID NO: 43979 - DNA, 2172 bp, Mycoplasma mobile 163K
  CDS (1)..(2172): transl_table=4
atggaaaagtcagaaaaaaatctattagattctttaaacaaagatcaaaaactagctgttgtttttaatgattcacctttaagaattattgcaggagcaggtagtggaaaaacaagagttttagtacacaaaattgcttatttaattcaaaaaatgaatgttaagccatatcaaatccttgctgttacttttacaaataaagctgcaaacgaaatgaaagaaagaattaaaactcttgtcgataatcatgaaagtgaacctttaataagcacttttcatgctttatgtgtttatattttaagaagagatattgatgttctaaaatatcctaaaaattttacaattttagacgtcgctgatcaatttgatatcttaaaaaatatttatgaaaaatttgacattaataaaattgatataactttaacttcaatgataaattatatttcttttcacaaaataaacaaaactccaattgaagttttagaaaccgaagataattctgaagatgatagaataaaactaaaaatttatttggaatataatgaaatattaaaaaaattagctttattagattttaatgatttacttttgaaaactcaagaattatttgaaaaatttccagaaattaaacttaaatgatcaagaagatttaagtacattcttgttgatgagtttcaagacacatcaccaattcaatatgaaataattaaaactttagctcaaaatcataatttaactattgtaggagatccagatcaaactatttattcatgaagaggagcaaatgtaaatttaattttagattttcataaggattttgaaaatgcaaaaacaatcaatttaaatctaaattaccgttcaacagaaaaaattttaaaacacgctaattctttaattcatttcaacaaaaaaagattagaaaaagatttagttgcttatacaaaacaaggtcaagaagtaatatttcaccacgcacttagtcccgaattagaagcaagatgagttgttgataaaataaaatgattgatttctatcgaaaaagcaaaattaagcgaaattagtattatttatcgagcaaatttttattctaaaaattttgaagatgctcttttaagagaaagtattcatcaccaagttcatggtggagaaaaattttatgaaagaagcgaaataaaaaatgctctttcatatataaaattattagtcagtgattcagatctagcttttcaaagaattttaaatattcctcagagaagtattggtaacatttatagaaataaaattttagactattgtgatgaaagtaatttgagcattttccaagcaataaacaatcatctagaagatctaccagtttcatctaatattagagaaaaactttttgatcttatttttaaaatcaataagtatcaaaaaattattaatgaaaataatgtgcaagtttctgttgatgaattttttgcagatattaaatattatgattatttagcaaatgaagatacttttaaaaatggaaaagtagataatgttaaagaattattaatcatcatttcaaactgatttagaaataatcctaaaaaaacatttcaagattattttgaagaaatttctctagttccaaatgctagtcaagaagatgataaaaacacggtttcattaatgaacattcataattgtaaaggattggagtttagttatgtttttcttgtgggtttatcagaagaaattttgccttctaaaaaagctttagaaaatgacttcgatgattcaaatcttgaagaagaaagaagattagcttatgtagcaatcacaagagctaaaaaaatgttattcttaacagattctgatggatatttatttggtaattttaaaactcagaaaaaaacttcaagatttattggagaaatgggaattgttcttgaaaatgaaaatcaaaaaacaatggaacaatatatgaattctgtacttttgaataagcaagtagatttaatgaaagattatcaaacaaataatgatgatatctttgtaggggacaaaattgtccataaagttttcggagaaggaattgttcttgaagaatctttaggtcaaattacagtgctttttacaaataaaaaacagcctaagacacttttgaaaaatcatgcatcgatttcaaagattataaattaa

SEQ ID NO: 43980 - protein, 723 aa, Mycoplasma mobile 163K
MEKSEKNLLDSLNKDQKLAVVFNDSPLRIIAGAGSGKTRVLVHKIAYLIQKMNVKPYQILAVTFTNKAANEMKERIKTLVDNHESEPLISTFHALCVYILRRDIDVLKYPKNFTILDVADQFDILKNIYEKFDINKIDITLTSMINYISFHKINKTPIEVLETEDNSEDDRIKLKIYLEYNEILKKLALLDFNDLLLKTQELFEKFPEIKLKWSRRFKYILVDEFQDTSPIQYEIIKTLAQNHNLTIVGDPDQTIYSWRGANVNLILDFHKDFENAKTINLNLNYRSTEKILKHANSLIHFNKKRLEKDLVAYTKQGQEVIFHHALSPELEARWVVDKIKWLISIEKAKLSEISIIYRANFYSKNFEDALLRESIHHQVHGGEKFYERSEIKNALSYIKLLVSDSDLAFQRILNIPQRSIGNIYRNKILDYCDESNLSIFQAINNHLEDLPVSSNIREKLFDLIFKINKYQKIINENNVQVSVDEFFADIKYYDYLANEDTFKNGKVDNVKELLIIISNWFRNNPKKTFQDYFEEISLVPNASQEDDKNTVSLMNIHNCKGLEFSYVFLVGLSEEILPSKKALENDFDDSNLEEERRLAYVAITRAKKMLFLTDSDGYLFGNFKTQKKTSRFIGEMGIVLENENQKTMEQYMNSVLLNKQVDLMKDYQTNNDDIFVGDKIVHKVFGEGIVLEESLGQITVLFTNKKQPKTLLKNHASISKIIN

SEQ ID NO: 43981 - DNA, 2331 bp, Bartonella quintana str. Toulouse
  CDS (1)..(2331): transl_table=11
atgaataacttttttgatcacataccatttttcgaagatgaatcccccccccataagcatgaaaataaccctgggttaaccgcccatgctgtaagtacaaaagaaaaaacacgatgtgacactgattatttagaaaaacttaacccagaacaacaacaagccgtcataaatacagaagggcctcttttagttcttgcgggtgctggtactggaaaaacacgtgttctcactacccgcatttctcatattttacgctctgggcttgcttcccctaagcaaatactcgctgtaaccttcaccaacaaagcagcgctcgaaatgaaaatgcgtattggtgaacttattggtgaaattgttgaaggcatgccttggcttggaacttttcattccactggtgcaaagattttgcgccgtcacgcagaacttgttgacttaaaaaccaattttacaattcttgataacgatgatgttattcgtcttttaaaacagcttattcaagctgaaggattagatgataagcgttggccagcacggtgttttgcaatgatgattgattcttggaaaaaccaaggactttctccagaacgtatttcagaaagtgatgcctattccttcggtaacggcatgggccgtaaactttactgcagctatcaaaatcgattaaaaagtctcaatgcttgtgatttcggcgaccttttgcttcattgtatttctatctttcaaaacaacccagatattcttcacgattatcattccaaattccgctatattctcgtagatgaatatcaagatacaaatacagcgcaatatctttggcttcgccttttggcgcaacaacccaaaggacaacatgtgaacctttgctgtgttggtgatgatgaccaatctatttatggatggcgtggcgcgaaagtcgataacatattacgttttgagaaagatttccctcctgcaaaaattattcgtctagaacgcaattatcgctcaacatcccatattcttaaaaccgcttctcatctgatttctcataaccaaggaaggcttggaaaagtacttttttctgatcaaataaatattgaagaagaaaaagtaaaaattcacgcagcatgggattcgcaaaaagaagcgcgcgccatcggagaagaaattgaacaagcgcaacaagctggtcattcattaaaccatatagctatattggtgcgtgcatcatttcagatgcgtgaatttgaagattggtttgtaacacttggtctcaattaccgcgtcattggtgggccacgtttttatgaacgaatggaaatacgtgatgccttagcttatttacgcgttgtagtccaaccagctgatgatttggcttttgaacgcattatcaacacacctaaacgtggcttaggagatgcaactttacgcaccctttatgagagtgcacgggcacgagatattcctctctttactgctgctgaaataattaaaacggatgagttaaaacccaaagcacgcactgctttgcgaagcattgtcgaaaattttcaccgctggcaaaatatgctgcaatacacaccccatagagagcttgcagaaatagtcctagatgattcgggctacacaaccatgtggcaagaagatcgctcaccagaagcaccaacgcgactagaaaatctcaaagaaatgatccgctctatggaacaatttgaaagccttcatagctttttagaacatgttgcactgattatggatgctgaaaacaatgaaaataccgatgcggttaacatcatgactctgcattcagccaaagggcttgaatttgaaacagtttttcttcctggttgggaagaaggactctttccccatcaacgctccttggatgaaaatggccgttcaggattagaagaagaacgacgactagcttatgtagggctgacaagagcaaaaaaatatctgcatatatggtttgtatccaatcgaagaattcatggactttggcaatctacgcttccctctcgttttcttgatgaattaccaaaagaacatatagaagtcgtagaaatggaaacatcttatggtggttatgggaaatcgcattttaaacatcacactcccttctatagtgattattcaacaccaggatgggagcgtgcacaaaaaaacattgaaggaaaaattgcccaatcagtctttcagacaccctcagatttttcaatcaatgatcgtattttccacatcaaattcggttatggctatatctcagcagtcgatggtcataaattaactattgtgtttgaaaaagctggagaaaagcaagtactcgacaattttgtaagcaaagcttag

SEQ ID NO: 43982 - protein, 776 aa, Bartonella quintana str. Toulouse
MNNFFDHIPFFEDESPPHKHENNPGLTAHAVSTKEKTRCDTDYLEKLNPEQQQAVINTEGPLLVLAGAGTGKTRVLTTRISHILRSGLASPKQILAVTFTNKAALEMKMRIGELIGEIVEGMPWLGTFHSTGAKILRRHAELVDLKTNFTILDNDDVIRLLKQLIQAEGLDDKRWPARCFAMMIDSWKNQGLSPERISESDAYSFGNGMGRKLYCSYQNRLKSLNACDFGDLLLHCISIFQNNPDILHDYHSKFRYILVDEYQDTNTAQYLWLRLLAQQPKGQHVNLCCVGDDDQSIYGWRGAKVDNILRFEKDFPPAKIIRLERNYRSTSHILKTASHLISHNQGRLGKVLFSDQINIEEEKVKIHAAWDSQKEARAIGEEIEQAQQAGHSLNHIAILVRASFQMREFEDWFVTLGLNYRVIGGPRFYERMEIRDALAYLRVVVQPADDLAFERIINTPKRGLGDATLRTLYESARARDIPLFTAAEIIKTDELKPKARTALRSIVENFHRWQNMLQYTPHRELAEIVLDDSGYTTMWQEDRSPEAPTRLENLKEMIRSMEQFESLHSFLEHVALIMDAENNENTDAVNIMTLHSAKGLEFETVFLPGWEEGLFPHQRSLDENGRSGLEEERRLAYVGLTRAKKYLHIWFVSNRRIHGLWQSTLPSRFLDELPKEHIEVVEMETSYGGYGKSHFKHHTPFYSDYSTPGWERAQKNIEGKIAQSVFQTPSDFSINDRIFHIKFGYGYISAVDGHKLTIVFEKAGEKQVLDNFVSKA

SEQ ID NO: 43983 - DNA, 2040 bp, Acinetobacter sp. ADP1
  CDS (1)..(2040): transl_table=11
atgtctgcagccagtcatttaaatgacaaacaacaagaagccatgaaatatactcaaggaccgttgttagtgcttgcaggagcaggttcaggcaaaacttccgttatcacgcaaaaaattgcatatttagtcaagcaatgtcgtattcctgcgcatcgtattaccgcgatgacctttaccaacaaagctgcacgtgagatgaaagaacgtgtagctaagttactttcgcgtgaagatgcaaaaggtttatctgtttcaacgtttcatacctttggtctgaatttattaagattagagcttaaacatacacccctgaaaaataatttttcaattttggattcggatgactgcaaacgcatcctgatggacttgatgcaacgtgacaatctttcaggtgcagaaagcaaagaattgattgccaaagccatgaaaaagatttcagactggaaaaatgatctgattgtgcccgaacaagcacattcaacatgtgaaaccgttgaagacgttcagtttgcacacctctatcaactctatgagcgtaatttgcgtgcctacaatgcagtcgattttgacgacctgattgtattacctacacggctgcttcaggaaaatgctgaagtacgtgacaagtggcaaaaccgtactcgttatttattggtggatgaatatcaagacaccaatacagcacagtatattttagttaagctcttggttggggtgatggggcagtttactgcggtaggcgatgatgaccagtcgatttacgcttggcgtggtgctaaaccagaaaacatggcgctattgaaagaagattttccaaatttaaaagtcattaagcttgaacagaattatcgttcgaccagtcgaattttgaaagcagccaacgccgttattgaaaacaatccacatatttttgataaaaagctgtggagtgacaaagggcatggtgaagtgattcggattattacctgtcgtaatgatgatgatgagtctgaacgtgtggtcaaggatttgatgactcataagctgatgaatggaaaaaactggaaggattatgcagtactgtatcgcggtaactttcaggcacgagttttagaaacccagctacgtcagatgcagattccttataagctttcgggtggacaatcattttttgcgcgggctgaaatcaaagacgttatgagttatttgcgtttgattattaacccagaagatgatagtgcttttttgcgtattattaatacgcctaaacgcgcgattggacctgtgacactggaaaagcttggactattttctcaagaaaatcatttatctttattggctgctgccgctgaccagcgtttgagtatggtgattccgaaaaaagctgcatctcaattacatgaatttgcagattttattaccacatttacccgtgaattattagatgatgacgagcctgtgcctaaggtgcgtcagatgatgaatgaagcgggctatattgattatatccgtgagcaggcagcaacccctgcgcaagaaaaaaccaagctcgataatatcgagagtttatttagcagcatccaaaacctgttaaatcgtaccgaagatgtcgatgagaaaaatattgaaagtgtgattcgtaagctggttttgctcgatatgctggaacaacagcaggaagaagaagataccgataaggtcaatcttttaactttgcatgcagctaaaggtctagagtttccatttgtttatattatggggcttgaggaagagttgttgccacacaaaaactcaattgcagcagatacgattgaagaagagcgtcgcttgatgtacgtgggaattacccgtgcgcgtcaaggcttgactctaacgcttgccgagcaacgtaaaaatggcggacaaatgaaacaaatgacaccaagccgctttctggatgaattgcctcaagatgagctggaatggctaggtcgtaagaaaaagctggcaggcaatgttgatccgaaagagcaggctcagcagtatttagccaatttaaaagcgttattaaagaaataa

SEQ ID NO: 43984 - protein, 679 aa, Acinetobacter sp. ADP1
MSAASHLNDKQQEAMKYTQGPLLVLAGAGSGKTSVITQKIAYLVKQCRIPAHRITAMTFTNKAAREMKERVAKLLSREDAKGLSVSTFHTFGLNLLRLELKHTPLKNNFSILDSDDCKRILMDLMQRDNLSGAESKELIAKAMKKISDWKNDLIVPEQAHSTCETVEDVQFAHLYQLYERNLRAYNAVDFDDLIVLPTRLLQENAEVRDKWQNRTRYLLVDEYQDTNTAQYILVKLLVGVMGQFTAVGDDDQSIYAWRGAKPENMALLKEDFPNLKVIKLEQNYRSTSRILKAANAVIENNPHIFDKKLWSDKGHGEVIRIITCRNDDDESERVVKDLMTHKLMNGKNWKDYAVLYRGNFQARVLETQLRQMQIPYKLSGGQSFFARAEIKDVMSYLRLIINPEDDSAFLRIINTPKRAIGPVTLEKLGLFSQENHLSLLAAAADQRLSMVIPKKAASQLHEFADFITTFTRELLDDDEPVPKVRQMMNEAGYIDYIREQAATPAQEKTKLDNIESLFSSIQNLLNRTEDVDEKNIESVIRKLVLLDMLEQQQEEEDTDKVNLLTLHAAKGLEFPFVYIMGLEEELLPHKNSIAADTIEEERRLMYVGITRARQGLTLTLAEQRKNGGQMKQMTPSRFLDELPQDELEWLGRKKKLAGNVDPKEQAQQYLANLKALLKK

SEQ ID NO: 43985 - DNA, 2163 bp, Erwinia carotovora subsp. atroseptica SCRI1043
  CDS (1)..(2163): transl_table=11
atggacgtttctgatctgctcgatggcctcaacgacaaacagcgtgccgcggtagccgcgccgcgcagcaatttattggtgctggcaggggcgggcagcggcaagactcgggtactggttcatcgtattgcctggttattgtccgtcgaaaactgttcgccgtactccatcatggcggtgacgtttaccaacaaagccgcggcagagatgcgtcatcgtatcaaccatctgatcggtaccagtcagggaggcatgtggattggcacctttcacggattggcacaccgtctgctgcgtgcgcaccatatggatgccaatctgccgcaggatttccagattctggacagcgacgatcagttgcgcctgttgaaacgactgattcgggcgctgaatctggatgagaagcagtggccgccgcgtcaggcgatgtggttcatcaacggtaagaaagacgaaggtttacgtccgcagcacattgaaagctacggcaaccctatcgagcaaacgtggcagcgtgtctatcaggcttatcaggaagcgtgcgatcgcgctggactggtggatttcgccgaactgctgctgcgcgcgcatgaactgtggctgaacaaaccgcatgtgctgaaccactatcgtgagcgttttaccaatattctggtggacgaatttcaggataccaaccgcattcagtacgcttggatccacatgttggcgggcgatagcgccaaggtgatgatcgttggagatgacgatcagtcgatttacggctggcgtggggcgcaggtcgaaaatattcagctgttcctgaaagatttcgccggcgcagaaacaatccgtctggagcagaactatcgttcgaccagcaatattctgaaagcggcgaatgccctgattgcccacaacggcgggcggctcggcaagaacctatggacggaaggtgtcgagggcgaacctatttcgctttactgcgcattcaacgaactggatgaggcacgttacgtcgttaaccgaattaaagcctggcaggaaaagggtggtgtgctgaaagataacgccattctgtatcggagcaacgcccagtcgcgcgtattggaagaggcgctgttgcagcagagtatgccataccgcatctacggcggaatgcgcttcttcgaacgtcaggaaattagagattcgctatcttatctgcgtctcatctccaatcgtaatgacgatgcggcgttcgagcgtgtggtgaatacgccgacgcgcggcattggcgatcgcacgctggacgtggtgcgtcagacggcgcgcgatcgtcaactgacgctgtggcaatccacgcgggtgctgttgcaagagaaagtgctggctgggcgtgcggcggcatcactgcaacgctttgtcgaattgatcgatgcgctggcctatgaaacgtctgaactgccgctgcatgtgcaaaccgaccgggcgattaaagattctggcctgtggagtatgtacgaacaggaaaaaggcgagaaagggcaggcacgagtagaaaacctggaggaactggtgacggctacgcgccagttcagctatcaggaagaagatcaggatctgatgccgcttcaggcattcctgtcacatgccgcgctggaagcgggtgaaggtcaggcggatgccaatcaggacgcggtgcagcttatgacgctgcactcggcgaaagggctggaattcccgcaggtgtttatcgtcggtatggaagaaggcatgttccccagccagatgtcgctggatgaaggtgggcgtctggaagaagaacgtcgtctggcttatgttggcgtcacgcgcgcaatggaaaagctgacgataacctacgccgaatcccgccgtttatacggcaaggaagcctatcatcggccttcccgattcgtcggtgaactgcctgaagaatgcgttgaagaggtgcggttacgtgccagcgtctcccgcccggtcaatcaccagcgccttggcacgccgataacggaaaatgacagcggctacaagctgggacaacgggttcgccatgcgaaattcggcgaaggcaccatcgtgaatctggaaggcagcggtgagcacgcccgtcttcaggtcgcgtttcagggacagggtattaaatggctggttgccgcctacgccagactggaaacggtgtga

SEQ ID NO: 43986 - protein, 720 aa, Erwinia carotovora subsp. atroseptica SCRI1043
MDVSDLLDGLNDKQRAAVAAPRSNLLVLAGAGSGKTRVLVHRIAWLLSVENCSPYSIMAVTFTNKAAAEMRHRINHLIGTSQGGMWIGTFHGLAHRLLRAHHMDANLPQDFQILDSDDQLRLLKRLIRALNLDEKQWPPRQAMWFINGKKDEGLRPQHIESYGNPIEQTWQRVYQAYQEACDRAGLVDFAELLLRAHELWLNKPHVLNHYRERFTNILVDEFQDTNRIQYAWIHMLAGDSAKVMIVGDDDQSIYGWRGAQVENIQLFLKDFAGAETIRLEQNYRSTSNILKAANALIAHNGGRLGKNLWTEGVEGEPISLYCAFNELDEARYVVNRIKAWQEKGGVLKDNAILYRSNAQSRVLEEALLQQSMPYRIYGGMRFFERQEIRDSLSYLRLISNRNDDAAFERVVNTPTRGIGDRTLDVVRQTARDRQLTLWQSTRVLLQEKVLAGRAAASLQRFVELIDALAYETSELPLHVQTDRAIKDSGLWSMYEQEKGEKGQARVENLEELVTATRQFSYQEEDQDLMPLQAFLSHAALEAGEGQADANQDAVQLMTLHSAKGLEFPQVFIVGMEEGMFPSQMSLDEGGRLEEERRLAYVGVTRAMEKLTITYAESRRLYGKEAYHRPSRFVGELPEECVEEVRLRASVSRPVNHQRLGTPITENDSGYKLGQRVRHAKFGEGTIVNLEGSGEHARLQVAFQGQGIKWLVAAYARLETV

SEQ ID NO: 43987 - DNA, 2502 bp, Leifsonia xyli subsp. xyli str. CTCB07
  CDS (1)..(2502): transl_table=11
gtggccgccgcagcgggtgtcgcgagcgccggaccgttgggaagcgacggacagcgctccgacagcgggggcgctcgcagcggccgcgcggacggggccccgggcgcagactggcggaatgcgagccagcggctgttcgacgggctgaaccctcagcagcgcatcgcggcggagtaccgcgggcaggcgctgctcatcgtcgcgggagcgggttccggcaagacgagcgtcctcacccggcgcatcgccggcctgatcgagagccgggaggcgtggccgagcgagatcctcgcgatcacgttcaccaacaaagcggcgaacgagatgcgcgagcgcgtcgagcagctgctcggcgggcgagcgcaggggatgtggatctccacgttccactcggcgtgcgtgcgcatcctgcgccgcgaggccgagaccatcggcaagacccagagcttcaccatctacgactcgggcgacagccgagccctgctcaagcggatcgtcaaggagctggacgcggacacgctcggcttcacggtcgctgcgacaggcggccgcatctcgaagctcaagaacgagttgacggacatcgaggccttcgcgcgctcgaccaatctgagcgatccgaaggaggtcatgttcgtcgagatcttccgtcagtacacccgcgagctccgccgcgcgaacgcgttcgacttcgatgatctgatcgccgagacggtgtacctcttccgagcgttcccgaaggtcgccgcgctctatcagtcgcggttccgtcacatcctggtcgacgagtaccaggacacgaatcacgcgcagtacgcgctcatccgtgagctgaccatgccgatcgctccggacatcgctgacgagctggagtcgtacggccgcaacatcggcaagctgcgcgacgccgtgggcgtcgtcccgagcgcgtcgctcaccgtcgtcggcgactccgaccagtccatctacgccttccgcggtgcggacatccgcaatatcgtggagttcgagagggacttcccgggagcgaaggtcgtcctgctcgaacagaactaccgatcgacgcagaacatcctgagcgcggccaacgccgtgatcgccaacaacttcgatcgcaaggacaagaagctctggacggcggtcggcgacggcgagaagatcgtcggctacaccggctactccggccacgacgaggcgcagttcgtcgcggacgagatcgagaaactgcactcggacggcatggactacaaggacatcgccgtcttctaccggacgaacgcgcagacccgggcgctggaggagatcttcatccggtccgccctgccctacaaggtgatgggtggcaccaagttctacgagcgcgccgagatcaaggatgcgatggcgtacctcatcacggtcgccaacccggccgatatgctcgcgctccgccgcatcctgaacaccccgaaacgcggtatcggccccgcgacggagacgcagctcgccagctacgccgtcgacaacggtgtcaccttccgggacgcgatgcgcgacgcgggctccctcggtctcggtccgaaggtcacggccgcgatcgtgcagctgtccggcctgctggacgaggcgaccgcgaaggcggacccggcgaacccagcgggcgcggcggccgtcgcggacaccctgatgttcctgctcgacggcagcgggtatctggaggtgctgcgcaacagccgtgatccacaggatgaggcgcgtgcggagaacgtggaggaactggtggcagtgacgcgcgagttcgcgcggaacaacccggacggcacgctggtggacttcctcaccgaggtctcgctcgtcgccgccgccgatgagatcgacgactccagcgggtccgtttcgctcatgacgctgcacaccgccaagggcctcgaatacgatgccgtgttcctcaccggaatcgaggaggatctgcttccccaccggatgtctgcgaacgagccgggtggcccggcggaggagcggcgcttgttctacgtgggaatcacccgtgcgaagaagcgcttgtttttgtcgctggcgatgacgcgcgcacagttcggcgagaccgccgtggcgatgccgagtcgatacctgcaagagatcccctccgatctgatcgactggcggcagtctcttggcgcggcgaacggccgtggcgggtcgcagtcgcgtgcgctcaacgcgcgctgtccggggctcggctccgggggcacggccgggcgctggaacgagagtttcccggtcggcggttcgggcatcccggagcggccgaaagcggagtggccgaaccgggtcaccggcaaggtccgcgacaatggcgaccttgagcttgcgtcgggcgatcgcatccgtcactccgacttcggcgagggccgcgtgacgaccgtgaccggcgagggcgcgaagcgcatcgcacacgtccagttcgagaaggcgggcgcgaagaaactcctcatcaagatcgccccgatcgacaaactgtga

SEQ ID NO: 43988 - protein, 833 aa, Leifsonia xyli subsp. xyli str. CTCB07
MAAAAGVASAGPLGSDGQRSDSGGARSGRADGAPGADWRNASQRLFDGLNPQQRIAAEYRGQALLIVAGAGSGKTSVLTRRIAGLIESREAWPSEILAITFTNKAANEMRERVEQLLGGRAQGMWISTFHSACVRILRREAETIGKTQSFTIYDSGDSRALLKRIVKELDADTLGFTVAATGGRISKLKNELTDIEAFARSTNLSDPKEVMFVEIFRQYTRELRRANAFDFDDLIAETVYLFRAFPKVAALYQSRFRHILVDEYQDTNHAQYALIRELTMPIAPDIADELESYGRNIGKLRDAVGVVPSASLTVVGDSDQSIYAFRGADIRNIVEFERDFPGAKVVLLEQNYRSTQNILSAANAVIANNFDRKDKKLWTAVGDGEKIVGYTGYSGHDEAQFVADEIEKLHSDGMDYKDIAVFYRTNAQTRALEEIFIRSALPYKVMGGTKFYERAEIKDAMAYLITVANPADMLALRRILNTPKRGIGPATETQLASYAVDNGVTFRDAMRDAGSLGLGPKVTAAIVQLSGLLDEATAKADPANPAGAAAVADTLMFLLDGSGYLEVLRNSRDPQDEARAENVEELVAVTREFARNNPDGTLVDFLTEVSLVAAADEIDDSSGSVSLMTLHTAKGLEYDAVFLTGIEEDLLPHRMSANEPGGPAEERRLFYVGITRAKKRLFLSLAMTRAQFGETAVAMPSRYLQEIPSDLIDWRQSLGAANGRGGSQSRALNARCPGLGSGGTAGRWNESFPVGGSGIPERPKAEWPNRVTGKVRDNGDLELASGDRIRHSDFGEGRVTTVTGEGAKRIAHVQFEKAGAKKLLIKIAPIDKL

SEQ ID NO: 43989 - DNA, 2202 bp, Desulfotalea psychrophila LSv54
  CDS (1)..(2202): transl_table=11
atgaatattgataaaacaaattttgcaacagctgatccctcccccattgatctgagtggtctgaatccagcccagcatttggctgtgaccaccaccgaagggcctgttttggtcattgccggtgccggaagtggcaagacccgcaccctgatatacagggtagcgcacctcctggataagggagtggccccggagtctatccttcttttgacctttacccgcaaggcatcccaggaaatggtttggcgtgcaggtgaactcctgggggaaaactgttcccgggtgatggggggtacatttcacggtgtcgccaatatgttacttcgccaatatggcagtcatatgggttggggcaagggttttactattattgaccgggccgatgcagagggtatcattaatttgctgaaatcttctcttgagatgggcaagggagataagcgttttccgggaaagcggatcattattaatataatcagtggatcgattaataagtctaccccgatggaagagttgatccatgatcagtatggacatctggctgatcactgcgctgatattttgagacttggcagacattatcatacctttaagagggataatgtccttatggattatgatgacctgttggttaactggaagctcctgctccaggagtcgcccgaggtgcgttccatgatgtcccatcgatttcgttatgtgatggttgatgagtatcaggataccaatcttattcaggccgatattattcgattgcttgcctcggaacatagcaatgtgatggtggtgggggatgattcccagtccatctactcctttcgaggggcagacttctataatattatgcgttttcccaaggagtttcctggggccaaactgataaagttggaggaaaattatcgttcgactcagcccatcctctccttgaccaatgatctcattgccaatgcctcggaaaaatataccaagtccctccacagtaatataaaaggtgagcagcggccgattgtttatggggctcgtgatgagcaggccgaggcaacgtttattctcgccagggttcagcaacatattcgggatgggattgacccctcggaaattgccgtgctctttcgttcgggctttcactcctataaacttgagattggtctgggagcagcaggcattgagtttgagaaacgtggtgggctaaaacttactgaagccgcccatatgaaagatgttctctcctttctccgcctcttggttaatccccgggataatctctcctggaatcgggttttgctccagcttgaccgtattggtcccaagacagcacagaagattaccacaactattgtgcccacctttgacccctttcttagcctgaagaactatcctgctagtaaggcctccgtggatattattgcaggtctagccgatctctttcgggagctccgggttacagagaggacacccgcggcgctctatgagttggttttgaactactatacacctctgtttgagcgcctctatagtgatgattatcccaagcgcgagaaggatcttgagcattttaagggtgttattgctggctatgatgacttgcaaaaatttatcgatgataccacccttgatccgccggcacccacagcagataaaacccctgacggtaagcggatggtgctttcaactattcactcttcaaagggtctggagtttgatgctgtctttgttatgggtcttgccgagggacgttttccccacgctaacactgtcggttttggcccacagtgggaggaggaacgccgtctcctctatgttgccgcaaccagagcaagaaaacatctctatttgacctatccacgacagatgatgacccccgatcgtcagtttaagagggtggggatgtctccctatttggttgagcttaaggatatgctctatgagagagtggagggctcatcgacatcctctttgagcagaccctcccgttttgcggagagtaactctccccgtccggtgggcatacctgcagggaggcgttcaagacctgcggggttgaagagggctgatttgtcccttggcactcgggtaaagcatccattttttggggagggaacggtgaaaaaaatgccgggtggccctgccattgaggtggagtttgaacagtatggaaccaaggcgctccatttggattatgcaaaactagagctcgtctaa

SEQ ID NO: 43990 - protein, 733 aa, Desulfotalea psychrophila LSv54
MNIDKTNFATADPSPIDLSGLNPAQHLAVTTTEGPVLVIAGAGSGKTRTLIYRVAHLLDKGVAPESILLLTFTRKASQEMVWRAGELLGENCSRVMGGTFHGVANMLLRQYGSHMGWGKGFTIIDRADAEGIINLLKSSLEMGKGDKRFPGKRIIINIISGSINKSTPMEELIHDQYGHLADHCADILRLGRHYHTFKRDNVLMDYDDLLVNWKLLLQESPEVRSMMSHRFRYVMVDEYQDTNLIQADIIRLLASEHSNVMVVGDDSQSIYSFRGADFYNIMRFPKEFPGAKLIKLEENYRSTQPILSLTNDLIANASEKYTKSLHSNIKGEQRPIVYGARDEQAEATFILARVQQHIRDGIDPSEIAVLFRSGFHSYKLEIGLGAAGIEFEKRGGLKLTEAAHMKDVLSFLRLLVNPRDNLSWNRVLLQLDRIGPKTAQKITTTIVPTFDPFLSLKNYPASKASVDIIAGLADLFRELRVTERTPAALYELVLNYYTPLFERLYSDDYPKREKDLEHFKGVIAGYDDLQKFIDDTTLDPPAPTADKTPDGKRMVLSTIHSSKGLEFDAVFVMGLAEGRFPHANTVGFGPQWEEERRLLYVAATRARKHLYLTYPRQMMTPDRQFKRVGMSPYLVELKDMLYERVEGSSTSSLSRPSRFAESNSPRPVGIPAGRRSRPAGLKRADLSLGTRVKHPFFGEGTVKKMPGGPAIEVEFEQYGTKALHLDYAKLELV

SEQ ID NO: 43991 - DNA, 2184 bp, Mannheimia succiniciproducens MBEL55E
  CDS (1)..(2184): transl_table=11
ttgatggatatttcagaattactcgacggattaaacgataaacaacgtgaagctgtagcggcgccgcttggaaattatcttgtgttggccggtgccggcagcggtaaaaccagagtgctaacgcaccgaatcgcttggttaattgccgttgaagggatttctgaaggcagtatcatggcggtaacctttaccaataaagcggcggcggaaatgcgccagcgtattgaatccaccctttcacaacattcttcccgccgtttgttcggtatgtgggtgggcacttttcacagtattgcccaccgattattgcgtgctcattatctggatgcgaatttaccgcaggatttccaaattctggacagcgaagatcagctacgtttactgaaacgcctgcttaaactacataattacgatgaaaaaatgtttcccgcaaaacaggcttgctggtatatcaataataaaaaagatgacggattacgccctcaccaaattgatgataataacgataaacaagagcgtgaatggattaatatttatcgcatttatcaggatacctgcgatcgagccggattagtggattttgcggaaattttattgcgtgcctacgaattattcctcaaaaaaccggtaattctgcagcgttatcggcaacgtttccagcaaattttagtagacgaatttcaggataccaacaaaattcaatatgcctggattcgattgctggcgggcgagaccggcaatgttatgatcgtgggtgatgacgatcaatccatttatggctggcgcggtgcgcaagttgaaaatattcagcgttttttagatgatttccataaagcgaaaaccattcgtttagaacaaaattatcgttctacgggcaatattctgcaatcggcaaaccagcttatttccaataacagtaaccgtttgggaaaagatctttggaccgagggcgacaaaggcgagcccgtcggtatttatgccgcatttaacgaattggatgaagctttgtttgtttcttctcaaattaaaatctggtgggaagacggcggcgaactcaatgattgtgcggtgttatatcgcagtaacagtcagtcccgcgtgattgaagaggctttgattcgcgcgcaaattccttatcggatttatggcggtatgcggttcttcgagcgtcaggaaattaaagatgcgttggcgtatttgcgtttgattgcgaatcggcaggatgacgccgcttttgaacgggttatcaatacgccgacacgcggtattggcgatcgcactttagatgtgttgcgtaatcttacccgcgagcgggaaattaccttatggcaagccactcagttagctatcggtgaaaataaactggcaggacgttcggcaacggcattactgcgcttttgcgaattaattaattccttggcgcaggaaacggaagaaatgcctttatttgcgcaaacggattttgtcattaagcattccggtttatatgaaatgtataaacaggaaaaaggcgaaaaaggtgaggttcgtattgaaaacctggaagaactggtttccgcaacgcgggaattcatcaaacctgatgatgcggaagatatgtcggatctaagcgcctttttaacgcatgcatctcttgaggccggtgaagagcaggcatctcctcatcaatcctgtgtgcaaatgatgactttgcattcggctaaaggtctggaatttccgcgggtgtttatggtcggcgtagaagaaggcttattccctagttttatgtctttagaagaaccggggcgtttggaagaagaacgccgtttggcttatgtggggatcacccgagcaaaacagaaattgactatttgctatgcggaaagtcgccgattatacggcaaagaagagcgtcatattccgtcccgttttatcaatgaattaccgcaggaatgtattcaggcggttcgtttgcggggtacggttacccgcgcttacaatcaaagtgcggtcggttctgtgaaaatttcaccgttaaacgacagcggttggaaaaccgggcaaaaagtgaaacacggcaaattcggcacgggaacggtgattaatgttgaaggctcggataataacacccgtttgcaaatcgcgttccaggggcaggggatcaaatggttaattgcgcatttggcaaatttagaaaagctttag

SEQ ID NO: 43992 - protein, 727 aa, Mannheimia succiniciproducens MBEL55E
MMDISELLDGLNDKQREAVAAPLGNYLVLAGAGSGKTRVLTHRIAWLIAVEGISEGSIMAVTFTNKAAAEMRQRIESTLSQHSSRRLFGMWVGTFHSIAHRLLRAHYLDANLPQDFQILDSEDQLRLLKRLLKLHNYDEKMFPAKQACWYINNKKDDGLRPHQIDDNNDKQEREWINIYRIYQDTCDRAGLVDFAEILLRAYELFLKKPVILQRYRQRFQQILVDEFQDTNKIQYAWIRLLAGETGNVMIVGDDDQSIYGWRGAQVENIQRFLDDFHKAKTIRLEQNYRSTGNILQSANQLISNNSNRLGKDLWTEGDKGEPVGIYAAFNELDEALFVSSQIKIWWEDGGELNDCAVLYRSNSQSRVIEEALIRAQIPYRIYGGMRFFERQEIKDALAYLRLIANRQDDAAFERVINTPTRGIGDRTLDVLRNLTREREITLWQATQLAIGENKLAGRSATALLRFCELINSLAQETEEMPLFAQTDFVIKHSGLYEMYKQEKGEKGEVRIENLEELVSATREFIKPDDAEDMSDLSAFLTHASLEAGEEQASPHQSCVQMMTLHSAKGLEFPRVFMVGVEEGLFPSFMSLEEPGRLEEERRLAYVGITRAKQKLTICYAESRRLYGKEERHIPSRFINELPQECIQAVRLRGTVTRAYNQSAVGSVKISPLNDSGWKTGQKVKHGKFGTGTVINVEGSDNNTRLQIAFQGQGIKWLIAHLANLEKL

SEQ ID NO: 43993 - DNA, 2220 bp, Bacillus licheniformis ATCC 14580
  CDS (1)..(2220): transl_table=11
ttgaattacattagcgaccaattattaagcggattgaacaagatgcagcaggaagcggtcaaaacgacggacggtccgcttttgatcatggcaggagcaggaagcggaaagacgcgggtattgacgcaccgcattgcgtatttaatggcggagaagcgcgttgccccgtggaacatactggcgattacatttacgaacaaagcggccagagaaatgaaagaacgtgtggaaagcattctcggaccgggagcggatgacatctggatttcgacgttccacagcatgtgcgtcagaattttgcggagagacatcgacagaatcggcatcaaccggaatttctcgattcttgatacgtctgaccagctttccgtcattaaaggaatcctgaaagaaagaaacatcgatccgaaaaaattcgatccgagaagcatactaggatcgatcagcagtgcgaaaaacgagttgatcgccccggaagaatacgagaaaacagccggcggtttttttgaacaagtcgtcagcgatgtctacaaagattatcagaagaaactgcggaaaaaccagtcgctcgattttgacgatttgattatgacgacgattgtcctgtttgaccgggtgccggaagtgcttgaatactaccagcggaaattccaatacattcatgtcgatgagtatcaggatacgaacagggcgcagtatttgctcgtcaaaaaaatggcgcagcgcttccaaaacatctgcgttgtcggggactccgaccagtcgatctacagatggcgcggagcggatatcgccaacatcctgtcgtttgaaaaagactatccgaatgcgagcgtcattctgctcgaacaaaactacagatcgacaaagcggatattgaacgcggccaatgaagtgattcagaacaactcaaacagaaagccgaaaaacctctggaccgaaaatgacgaaggggcgaaaatctcctacttcagaggcgacaacgaatttggcgaaggccaatttgtcgcgggcaaaatcagggagctcgtcggctctggaaaacgatccttctcagatatcgcgattttgtaccggacgaacgcccagtcgcgggtcattgaggaaacgctgatgaaggcgaacatcaactacaacatcgtcggcggcacgaagttctatgacagaaaagaaatcaaggacatcctcgcgtatttgcgcctcgtcgcaaaccctgacgacgatatcagctttgcgcggatcgtgaacgtcccgaagcgcggcgtcggtgcgacttcagtcgataaaatcgcggcctatgccgacatgaacggtatgtctttatttgaagcgctcggccaggttgactttatcggcctcagtgctagagcggccaacgcgcttgatgagttcagacagacgatcgaaaacctgacgaatatgcaggaatacttatccgtcacagagcttacggaagaaatccttgaaaaaaccgaataccgcgaaatgctgaaagcggaaaaatccttggaggcgcagagccgccttgagaatatcgacgaatttctctccgtaacgaaaaactttgagcagcaaagcgaagacaaatcgctcgtcgcttttttgaccgatttggcgctcatcgccgatatcgatcagcttgatcagaaggaagaagagaccggaaatcaagacgcggtcatcttaatgacgcttcatgctgcaaaaggactcgaattcccggtcgtgttcctgatggggcttgaagaaggagtgttcccgcacagccgctccctgatggaggaagcggagatggaagaagagcggagactcgcgtacgtcggcatcacgagggctgaggaagaactttatttaacgaacgcgcggatgcggacgttgttcggaagaacgaatatgaacccggaatcaaggttcattgcggaaataccggaggaattattggacaatctaaacgagaagaaaaaagatctgaaaacgccgtttggaagaaagcccgagcggagaggccccgttacccgtccggctgcatcgtacagcaaaaccggcggcgacggcgtcaattgggcagtcggcgacaaagcctcccataaaaaatggggcgtcggaaccgttgtcagcgtcaagggatccggcgaatcgacagagcttgacatcgcctttccgagcccgaccggagtgaagcgtcttctcgcggcctttgcgccaattgaaaagcaataa

SEQ ID NO: 43994 - protein, 739 aa, Bacillus licheniformis ATCC 14580
MNYISDQLLSGLNKMQQEAVKTTDGPLLIMAGAGSGKTRVLTHRIAYLMAEKRVAPWNILAITFTNKAAREMKERVESILGPGADDIWISTFHSMCVRILRRDIDRIGINRNFSILDTSDQLSVIKGILKERNIDPKKFDPRSILGSISSAKNELIAPEEYEKTAGGFFEQVVSDVYKDYQKKLRKNQSLDFDDLIMTTIVLFDRVPEVLEYYQRKFQYIHVDEYQDTNRAQYLLVKKMAQRFQNICVVGDSDQSIYRWRGADIANILSFEKDYPNASVILLEQNYRSTKRILNAANEVIQNNSNRKPKNLWTENDEGAKISYFRGDNEFGEGQFVAGKIRELVGSGKRSFSDIAILYRTNAQSRVIEETLMKANINYNIVGGTKFYDRKEIKDILAYLRLVANPDDDISFARIVNVPKRGVGATSVDKIAAYADMNGMSLFEALGQVDFIGLSARAANALDEFRQTIENLTNMQEYLSVTELTEEILEKTEYREMLKAEKSLEAQSRLENIDEFLSVTKNFEQQSEDKSLVAFLTDLALIADIDQLDQKEEETGNQDAVILMTLHAAKGLEFPVVFLMGLEEGVFPHSRSLMEEAEMEEERRLAYVGITRAEEELYLTNARMRTLFGRTNMNPESRFIAEIPEELLDNLNEKKKDLKTPFGRKPERRGPVTRPAASYSKTGGDGVNWAVGDKASHKKWGVGTVVSVKGSGESTELDIAFPSPTGVKRLLAAFAPIEKQ

SEQ ID NO: 43995 - DNA, 2193 bp, Legionella pneumophila subsp. pneumophila str. Philadelphia 1
  CDS (1)..(2193): transl_table=11
ttggactttttctgttggaaatattctatgaccatagcagcacttctcaagggattaaacgaaaagcaacgtgacgctgtaacctccccattaggtaatatgctggttttagctggtgcaggcagtggtaaaacaaaagtattggtgagccgaattgcctggttaattgaagaacagcatctctccccgcacgctatattagcagtaacatttacgaataaagcggccggtgaaatgagatcgagacttagcagtatgttgtctacaccgacgttgggtttatgggttggtacttttcatggattatgtcatcgtttattacgccgccactacaaggaggctaaccttccagaacagtttcatattctggattcggaagaccaggcacgagttatcaagcgagtcattctttcacttaatcttgatcctgagcaatggcaagtcaaacaagcgcaagcatttattaatagtaaaaaggatgaaggcttgcgtccacaacatattaatgcactgcattatggtccggccaagactttggttgcaatttataaagcgtatgaagacgtttgccaaacctcaggggtaatcgatttcgctgaactattactacgaactcatgaattgctacgagataatgaagagatacttgctcattaccgcgaacgcttccaggctattttagttgatgaatttcaggataccaatacgattcaatatgcatggatccgcttgcttgctggtgatcatacagcggtattggctgtaggagatgatgatcagtcaatttatggttggcgtggagccaaagtggaaaatattcagcagtttgttcatgattttaaagatacacatatcataaggcttgaacaaaactacaggtcgaccgcaatgatattaaatgcagcaaatgcattgattctcaataacagtactcgtatgggcaaagagttatggaccgctggtagtgagggagaaaaaattcttgtatacagtgcattcaatgaattggatgaggcacgttttgttactgaacgaattggcatggaattaaatcagggcgccagtgcggatgagattgcagtgttgtatcgttcgaatgcccaatcccgtgttttggaagaggctttgttacgtgcaggtatagcctacaggatatatggaggagtccgtttctttgacagggcagaaattaaagatactttggcttacttacgattgttagttaatccaaatgacgatactgcgtttgaaagagtagttaattttcctactcgaggaataggagaaaaaacattggatgaggttcgccagtacgccagagcagaacagtgttcgttgtggggcgcttccaagggcatacttcaatccacaggattagggcaaagggggagcttggcattagccaagtttattgatttgatcgaaaaattacaggttgtggttgctaataaggagttggatgagcagatctctgatgtaatacagcatagtggtttatacgcccactttagcaaaatcaaaggtgataaatcagaatcacgtgtggataacctgcaagaattaattaatgctgccaaacaatttcgatatgagtacgatgaagaggaggagttaccgttggttaattcattccttgctcatgcttcattagaatcgggggaattgcaggctgatgaacatgaacgctccgttcacttgatgaccttacatgcagccaaagggcttgagtttccgattgtgtttttggttggtatggaagaaggaatatttccaggcagacaatcgcttgaagagcctggtcgcttggaggaagagcgtcgattatgttatgtcggcatgactcgtgccatgcgtaaattggttttatcctatgctgaggtcagaagacaatatggtcgtgaagagtatcacagatcatcaagatttttgcgtgaaattcctcaacaatttcttgatgaagtaagagttaaatcacgttctcagtggcctggaactacaaaaagcaaattgccagtggctgacgaggtgtcgggcattacaattgggcaaaatgtgcagcatgccaaatttggacagggtgtcgttcttgccattgagggcagcggggctcatacaagagttcaagtaaaattcagtgaacatggtgtaaaatggttggttttggcctatgctaatttgactgaatgcctgtag

SEQ ID NO: 43996 - protein, 730 aa, Legionella pneumophila subsp. pneumophila str. Philadelphia 1
MDFFCWKYSMTIAALLKGLNEKQRDAVTSPLGNMLVLAGAGSGKTKVLVSRIAWLIEEQHLSPHAILAVTFTNKAAGEMRSRLSSMLSTPTLGLWVGTFHGLCHRLLRRHYKEANLPEQFHILDSEDQARVIKRVILSLNLDPEQWQVKQAQAFINSKKDEGLRPQHINALHYGPAKTLVAIYKAYEDVCQTSGVIDFAELLLRTHELLRDNEEILAHYRERFQAILVDEFQDTNTIQYAWIRLLAGDHTAVLAVGDDDQSIYGWRGAKVENIQQFVHDFKDTHIIRLEQNYRSTAMILNAANALILNNSTRMGKELWTAGSEGEKILVYSAFNELDEARFVTERIGMELNQGASADEIAVLYRSNAQSRVLEEALLRAGIAYRIYGGVRFFDRAEIKDTLAYLRLLVNPNDDTAFERVVNFPTRGIGEKTLDEVRQYARAEQCSLWGASKGILQSTGLGQRGSLALAKFIDLIEKLQVVVANKELDEQISDVIQHSGLYAHFSKIKGDKSESRVDNLQELINAAKQFRYEYDEEEELPLVNSFLAHASLESGELQADEHERSVHLMTLHAAKGLEFPIVFLVGMEEGIFPGRQSLEEPGRLEEERRLCYVGMTRAMRKLVLSYAEVRRQYGREEYHRSSRFLREIPQQFLDEVRVKSRSQWPGTTKSKLPVADEVSGITIGQNVQHAKFGQGVVLAIEGSGAHTRVQVKFSEHGVKWLVLAYANLTECL

SEQ ID NO: 43997 - DNA, 2364 bp, Burkholderia pseudomallei K96243
  CDS (1)..(2364): transl_table=11
atgcccgatctgctcgcgaacctgaaccccgaacaactcgccgccgtcacgttgccgaacgagccggcgctgatcctcgccggggcgggcagcggcaagacccgcgtgctcatcacgcggatcgcgtggctgatccggcaaggctatgcggcgcccgccaccgtgctcgccgtcacgttcacgaacaaggccgcgcgcgagatgatggcgcgcctgtccgcgatgatgccgatcgacacgcgcggcatgtggatcggcacgttccacggcctgtgcaaccggatgctgcgcgcgcactaccgcgacgcggggctgccgcagacgttccagatcctcgataccgccgaccagctctccgcgatcaagcggctgatgaaggcggcgaacgtcgacgacgagaagtacccgccgaagaacgtccagtacttcatcaacaacgcgaaggagcaggggctgcgccccgagaaggtcgacgcgaccgacagcttcaaccgcaagttcgtcgagctgtaccaggcgtacgagcagcagtgccagcgcgagggcgtcgtcgatttccccgagctgctgttgcgctgctacgagttgctcgcgcacaacccgccgctgcgcgcgcactaccaggcgcgcttcaagcacatcctcgtcgacgagttccaggatacgaacaagctgcagtacgcgtggctcaagctcctcgcgggcggccacaacgcgatcttcgcggtcggcgacgacgaccagtcgatctatgcgtttcgcggcgcgaacgtcggcaacatgcgcgatttcgagcacgaattccgcgtgcgcaacctgatcaagctcgagcagaactaccgctcgcacggcaacatcctcgacgcggcgaaccacctgatcgcgaacaacgcgcaccggctcggcaagaacctgcgcaccgacgcgggccacggcgagcccgtgcgcgtgtacgaagcggccaccgacgcgcaggaagcggcgtggatcgtcgaggagatccgctcgctcgtgaacgcggggctcgcgcgcagcgaggtggcggtgctgtaccggagcaacgcgcagtcgcgctcgatcgagcacacgctgatgacggcgggcatcgcgtaccgcgtgtacggcggcctgcgcttcttcgagcgccaggaggtgaagcacgcgctcgcgtatctgcgcctcatcgacaatccgaacgacgacaccgcgttcgcgcgcgtcgtcaactttccgacgcgcggcatcggcgcgcgctcgatcgagcagctcgccgacgcggcgcgcctgtacgactgctcgatggcggccgcgattccgtacgtggcgggcaaggcgggctcgagcctggcgtcgttcgcgaacctgatcgcgaagatgcgcgcggagaccgcgcggatgagtctgcccgagacggtcgagcacgtcgtgcgcgcgagcggcctcgccgatttctaccagggcgagcgcgaagggcaggatcgcctcgagaatctgcaggaactggtgaacgcggccaccgcgttcgtctccgaggagggctacgggctcgacacgcccgcgcgctcgattccgctgcatgcgcgcgcgagcgcggcgccggagctcgccgcgggcggcgccgatccggccgacgcggtgctcgcgcccgcgaacctcgccgatcccgcgcagaacccggacgcgatgacgccgctcgccggcttcctgtcgcacgcgtcgctggaggcgggcgacaaccaggcgcaggcgggccaggacgcggtgcaactgatgacggtccacgcggcgaaggggctcgagttcaccgcggtgttcatcaccgggctcgaggaagggctcttcccgcacgagaacagcgcgctcgaatccgacggcctcgaagaggaacgccggctgatgtacgtcgcgatcacgcgcgccaaggagcggctctacctgtcgttcgcgcagagccggatgctgcacggccagacccgctacaacatccgctcgcgctttttcgacgagctgccgcagcacgtgctcaagtggctcacgccgaaggtcgaggcgggcgcccgctggggcggccgctcggacaacgccggctggagccgcgactggttcgcgcggccgggcggcggcgcgcggcagggcgtggtcgacgcggcggtgtccgcgccgctgcccgcgctcgcgaaccagcagcgcgaggcgcagaacggcttgcggatcggccagcaggtgttccacacgaagttcggcgaaggcacggtgacggcgctcgaaggcagcggcaccgacgcgaaggcgcaagtcaaattcaagcggcacggcgagaagtggctcgcgctcgcggtcgcgaaactgcaggcggtcgaatga

SEQ ID NO: 43998 - protein, 787 aa, Burkholderia pseudomallei K96243
MPDLLANLNPEQLAAVTLPNEPALILAGAGSGKTRVLITRIAWLIRQGYAAPATVLAVTFTNKAAREMMARLSAMMPIDTRGMWIGTFHGLCNRMLRAHYRDAGLPQTFQILDTADQLSAIKRLMKAANVDDEKYPPKNVQYFINNAKEQGLRPEKVDATDSFNRKFVELYQAYEQQCQREGVVDFPELLLRCYELLAHNPPLRAHYQARFKHILVDEFQDTNKLQYAWLKLLAGGHNAIFAVGDDDQSIYAFRGANVGNMRDFEHEFRVRNLIKLEQNYRSHGNILDAANHLIANNAHRLGKNLRTDAGHGEPVRVYEAATDAQEAAWIVEEIRSLVNAGLARSEVAVLYRSNAQSRSIEHTLMTAGIAYRVYGGLRFFERQEVKHALAYLRLIDNPNDDTAFARVVNFPTRGIGARSIEQLADAARLYDCSMAAAIPYVAGKAGSSLASFANLIAKMRAETARMSLPETVEHVVRASGLADFYQGEREGQDRLENLQELVNAATAFVSEEGYGLDTPARSIPLHARASAAPELAAGGADPADAVLAPANLADPAQNPDAMTPLAGFLSHASLEAGDNQAQAGQDAVQLMTVHAAKGLEFTAVFITGLEEGLFPHENSALESDGLEEERRLMYVAITRAKERLYLSFAQSRMLHGQTRYNIRSRFFDELPQHVLKWLTPKVEAGARWGGRSDNAGWSRDWFARPGGGARQGVVDAAVSAPLPALANQQREAQNGLRIGQQVFHTKFGEGTVTALEGSGTDAKAQVKFKRHGEKWLALAVAKLQAVE

SEQ ID NO: 43999 - DNA, 2181 bp, Methylococcus capsulatus str. Bath
  CDS (1)..(2181): transl_table=11
atggacatcaccgatatcatcgcccccctgaacgaagcccagcgtgaggccgtcaccgcgccggaccgctcactgctggtgctggccggcgccggcagtggcaagacccgcgtgctgatacaccgcatcgcctggctgcttcgggcggagggcgtctcgccgcacgccattctcgccgtgaccttcaccaacaaggcggcgaacgagatgaaggcgcggctcgaggcgctgctcgacctgtcgacccgagacctgtgggtcggcactttccatggcctggcgcaccgcctcctgcgccgccacgccgccgacgccggactgcacgagggtttccagattctcgattccgacgaccagtaccggttgatccgccggctgctcaagaccctggagctggacgaggcgcgctggccgccgcgccagatccagtggtacatcaacgcccagaaggatcaaggccgccgggccaggaaccttcccgactcctacgacccgttcgaacggcagatgcggcggatctatctcgcctatgaggaactgtgccaacgttccggcctggtggatttcgccgagctgctgctgcgcacccacgaattcctgcgcgacaacgccgacgtcctcgcccactaccaggaacgcttccagcacgtactggtcgatgaattccaggacaccaacgacgtgcagtacgcctggctgcggttgttgacccaggaccgcgacaatctcagcgtggtgggtgatgacgaccagtccatctacggctggcgcggcgccaaggtcgaaaacctgcaccgtttccggagggactatccgcgccaccgcatgatccgcctcgagcagaactaccgttccaccggcaacatcctcagcgccgccaataccttgatcgcccggaacgagggacggctcggcaagaatctgtggaccgagggcggccggggggaaccgatctcggtctatgccgccttcaacgagcaggacgaggccggtttcgtcgtcaaccggatcggccgctgggtgcgggaaggcggaaggcgcagcgacgcggccattttgtaccggtccaacgcccagtcgcgccagttcgaggagaggctgctggcccacggcatcccctaccgggtctatggcggcctgcgtttcttcgagcgcgccgaaatcaaggatgccctcgcctacctgcggctgatggccaaccggcatgacgatcccggcttcgaacgggtcatcaacacgccgacccgcggcatcggcgcaaagaccctcgatctcgtccgtgaactggcgcgcttcgaacggctctcgctgtggagcgcggcacggaagctgatcgccgacaatgtgctccccgctcgggcgacgggcgccctggccggcttcctagatctcgtcgaaaccatggctggcgcggcccaggggcgggctctgtgggaacaggtcgaactcgcagtcaaaggctcaggcctgctggaacattaccgcaaggaaaaaggcgagcaggcggaagcccgggtagaaaacctggaggaactggtcggcgccgcccgccagttcgagctgagcccgctgatcgatcccgaactgggcggcctcgaccagttcctcgcccatgcggcgctggaagccggcgaaaaccagggagaaactttcgaggactgcgtccagctcatgaccctgcatgcagccaagggcctggaattcgacctggtgttcctggtcggtctggaggagggcctgtttcccagcctgcagtcgctggaagaccccgcccgccttgaagaagaacgccggctctgctacgtcggcatcacccgggcacggcgcaagctctatatcacccacgccgaatgccgtcggctctacggcaaagagacctatccgcggcgatcccgtttcctgcgggaactgccgccggactgtctggaagaagtcaggatgaaaggcggtgtcagccggcccgtcgcatcggcgatgcagtcgggcgatgcgtcggccatgctcggcgcagacgctccgggggaattcaggttgggccagcgggtccgccacggcaagttcggcgagggcgtgatcctgcaacgggagggtgacggagcccaggcgcgggtccatgtcaatttcgcggaggtgggcgcaaaatggctgatgttggcctatgccaagctcgaaccgatctga

SEQ ID NO: 44000 - protein, 726 aa, Methylococcus capsulatus str. Bath
MDITDIIAPLNEAQREAVTAPDRSLLVLAGAGSGKTRVLIHRIAWLLRAEGVSPHAILAVTFTNKAANEMKARLEALLDLSTRDLWVGTFHGLAHRLLRRHAADAGLHEGFQILDSDDQYRLIRRLLKTLELDEARWPPRQIQWYINAQKDQGRRARNLPDSYDPFERQMRRIYLAYEELCQRSGLVDFAELLLRTHEFLRDNADVLAHYQERFQHVLVDEFQDTNDVQYAWLRLLTQDRDNLSVVGDDDQSIYGWRGAKVENLHRFRRDYPRHRMIRLEQNYRSTGNILSAANTLIARNEGRLGKNLWTEGGRGEPISVYAAFNEQDEAGFVVNRIGRWVREGGRRSDAAILYRSNAQSRQFEERLLAHGIPYRVYGGLRFFERAEIKDALAYLRLMANRHDDPGFERVINTPTRGIGAKTLDLVRELARFERLSLWSAARKLIADNVLPARATGALAGFLDLVETMAGAAQGRALWEQVELAVKGSGLLEHYRKEKGEQAEARVENLEELVGAARQFELSPLIDPELGGLDQFLAHAALEAGENQGETFEDCVQLMTLHAAKGLEFDLVFLVGLEEGLFPSLQSLEDPARLEEERRLCYVGITRARRKLYITHAECRRLYGKETYPRRSRFLRELPPDCLEEVRMKGGVSRPVASAMQSGDASAMLGADAPGEFRLGQRVRHGKFGEGVILQREGDGAQARVHVNFAEVGAKWLMLAYAKLEPI

SEQ ID NO: 44001 - DNA, 2223 bp, Azoarcus sp. EbN1
  CDS (1)..(2223): transl_table=11
atgtccgatctgctcgccaacctcaatcccgaacaactccaggccgttaccttgccgccgcaacacgcgctggtcctggccggcgccggttccggcaagacccgcgtcctgacgacgcgcatcgcgtggctcgtgcagaccgggcaggtcgatccgcaaggtgtcctggccgtcactttcacgaacaaggcggcaaaggaactgctcgcgcgcctgtccgcgatgctgccgctgagcttcaaccggtcggcgcgcggcatgtggatcggcacgtttcacggactctgcaaccgtttgttgcgcgctcaccaccgcgacgccggcctgccccaactgttccagatcctcgattcgggcgaccagctcgccgcgatcaagcggctcctgaaggcgctgaacgtcgacgacgagaaattcccgccgcgcgaactgcagcatttcatcaacggccagaaagaagccgggctgcgtccccatgccgtcgaagcttgggacgattacacgcgccgccgggtcgagctgtacatcgagtacgagtcgcagtgccagcgcgagtctgtcgtggattttgccgagctgctgttgcgcacttacgagctgctggagcgcaatgagccgatccgcaagcattaccagcagcgtttccgccacatcctcgtggacgaattccaggacacgaatcggctccagtaccgctggctgaagctgcttgccgacacgggtcgcgacggcgcagcgaagctgttctgcgtcggcgacgacgaccagtcgatctatcgtttccgcggcgccgacgtcggcaacatgcgcgatttcgagcgcgagtttcacgtcgccaacgttatccgcctcgagcagaattaccgttcgcacggcaacatcctcgatgccgcgaacgcgatcatccggcataacgccggccgtctcggcaagaatctgtggaccgaacgcggcgccggcgagccgatccgcgtgttcgaggcctgcggcgacctggacgaggcgcgctggatcgtcgacgaaatccagtcgctggtgcgcgacggcatgagccgttccggcatcgcgctgctgtatcgctcgaacgcgcagtcgcgcgtcctggagcaccagctcttttccagcggcatttcctaccgcgtctacggcggcctgcgtttcttcgagcggcaggaaatcaagcatgcgctcgcgtacctgcgcctgatcgccaatccggacgacgacaccgcgttcagccgcgtcgtcaattttccgacgcgcggcattggcgcccgttcgatcgaggcgctgcaggatgcggcgcgcacatggaacagcagcctgtacgcggcagtgccgcatgtggcggggaagccgggcaccgtgctggcccagttcgtgcgcctggtcgaagacctgcggcgcgacaccgcaaagctgccgctgccggaactcgtcgaccatgtgctcgatgtgtcgggcttgcgcaatcatttccgcaacgagaaggaaggccaggagcggctcgaaaacctcgatgaactgatcaatgcagcagcgaatttcgttgccgaagcaggcgtgcaggccgatgcgcaggacatggcgcatgcgctgctcgccgactttcttgcgcacgcatcgctcgaggccggggagcaccaggccgatgccggcagcgacgcggtgcagttgatgacggtgcattcatcgaaagggctggaattcgatgcggttttcctgtcgggcctcgaggaagggctgtttccgcacgagaacagcatcatggagacggaagggctggaggaggagcggcggctgatgtatgtagcggtgacgcgggcacgccagcggctttacctgtcgttcgcgcagagtcgcatgctgcacgggcagacgcgctacaacctgcgttcgcgctttctcgaggaaattccggaggaactcacgaagtggctgtcaccgccgaatccgcgcacgagcgcggtgcgcagcgggttcggcggctactatcagccgtcgcgcggcggcgtggtggcgaaggcgccggaacaaccggtttcgcgcagccgcgatctgggcggcttgcgtgtgggtcagctggtcacccacgccaagttcggccagggcgtgatcgtcgccgccgaaggcagcggctcggacgcccgactccagatcaacttcggcgccgccggcgtcaagtggctgatgctcgcggtcgcgaagctcgatcccgcgtga

SEQ ID NO: 44002 - protein, 740 aa, Azoarcus sp. EbN1
MSDLLANLNPEQLQAVTLPPQHALVLAGAGSGKTRVLTTRIAWLVQTGQVDPQGVLAVTFTNKAAKELLARLSAMLPLSFNRSARGMWIGTFHGLCNRLLRAHHRDAGLPQLFQILDSGDQLAAIKRLLKALNVDDEKFPPRELQHFINGQKEAGLRPHAVEAWDDYTRRRVELYIEYESQCQRESVVDFAELLLRTYELLERNEPIRKHYQQRFRHILVDEFQDTNRLQYRWLKLLADTGRDGAAKLFCVGDDDQSIYRFRGADVGNMRDFEREFHVANVIRLEQNYRSHGNILDAANAIIRHNAGRLGKNLWTERGAGEPIRVFEACGDLDEARWIVDEIQSLVRDGMSRSGIALLYRSNAQSRVLEHQLFSSGISYRVYGGLRFFERQEIKHALAYLRLIANPDDDTAFSRVVNFPTRGIGARSIEALQDAARTWNSSLYAAVPHVAGKPGTVLAQFVRLVEDLRRDTAKLPLPELVDHVLDVSGLRNHFRNEKEGQERLENLDELINAAANFVAEAGVQADAQDMAHALLADFLAHASLEAGEHQADAGSDAVQLMTVHSSKGLEFDAVFLSGLEEGLFPHENSIMETEGLEEERRLMYVAVTRARQRLYLSFAQSRMLHGQTRYNLRSRFLEEIPEELTKWLSPPNPRTSAVRSGFGGYYQPSRGGVVAKAPEQPVSRSRDLGGLRVGQLVTHAKFGQGVIVAAEGSGSDARLQINFGAAGVKWLMLAVAKLDPA

SEQ ID NO: 44003 - DNA, 2256 bp, Bacillus clausii KSM-K16
  CDS (1)..(2256): transl_table=11
gtgagtgacatgcaagatacaataattgaacggatgctatctgagttaaaccctgagcaacaaaaagctgtgacccattcgaacgggcctttgctgttaatggcgggtgcaggaagcggcaaaacccgtgtgctgacttaccggatcagttatttgctccggcgccattcgacgccgccttgggctgttctcgccctcacattcacgaacaaagcagcgcgagaaatgaaagacagggtggcccagttggttggaccaatagctgaagatatttggatttccactttccattcgatgtgcgtgcggatgttgcgccgtgatattgaccggatcggctacagccgcaattttacgattttggattcatctgaccagctttcggtcataaagcaaattttgaaaagccaaaacgtcgaccctaagaaatttgacccaaaagcgatattagggatgatttctgctgctaaaaacgaattgcaaacggcaagcaaatttgcgcaaatcgcttcaggcgtatttgagcaagtagcggccgacgtgtatagtgaatatgaaaaacgattgaaacaaaacaacgcacttgactttgatgatttaattatgaagacgatccaattgtttaacgaagtgccggaagtgctcgatttttaccaacgcaaattccagtacattcatgttgatgaatatcaagatacaaacaaagcacaataccgccttgtgaaactccttggtgaccgtctgcaaaacatttgcgttgtcggcgattccgaccaatcgatttaccgttggcgcggagccgatattcaaaatatcctctcctttgaaaaagactacccggatgcgactgtcattttgcttgaacaaaactaccgttcgacaaaaacgattctgaaagcggccaacagtgttattgctaacaatggcaaccgcaagccaaaaaacctttggactgaaaatgacgaaggagcgaaaatcagcgtatacgaggcggctacagaacaagctgaagcacagtttgtcgtcgaaaaaataaaagaagcagcagcagaaccaggattttcttacaaagatgtggcgattctgtacagaaccaatgcccaatcgcgtattattgaggaatattttgtgaaatctaatctcgactacaatatcgtcggcggtactaagttctatgaccgcaaagagattaaagacgtccttgcttacttgcgcttagttgccaaccctgatgatgacattagcttacagcgtgttgtcaatgtgcctaagcgtggcattggtgcgacgacggtagacaagatcgctgcttatgctgatgcccatgggctctcgatgttcaaagcgcttggggaactggagcaaatcggcgttacggccagagcgcggacgaaacttgtggaatttcgcgaccaagtgaataactgggtgcacatgcaagattatctttccgtgacagagctagtggaagaattgcttgataaaaccggttatcgcgaaatgcttaaaaacgagcagacgattgaagcacagtctcggcttgagaacatcgacgaatttattacggtcacccaagagtttgagaagcggagcgaagaaaaagatctcgtgtctttcttgacggacttagcccttgttgccgatattgaccaactcgataaggacgaggaagcgacaaaaaaagaggccattacgctgatgacgcttcattcagcaaaaggacttgaattcccatatgtctttttgattggaatggaggaaggggtgttcccacatagccgttccttgtttgaggaagaagaaatggaagaggagcggcgcctcgcctatgttggcattacccgtgccgaaaaacggctctatttgacgagtgccaaaatgaggacgctctatggccgaacgaataccaacccgacttcccgctttattgctgaaatcccggctgaattgattgaagaagacagtcaaatgcccgcttggggaacagggggttctaggcagccagccgccgcaagtgcagctgcccgtgtacgctcaagcgtctttgcaggcaagagcggatcgccacgagtaacagtaacaggcggagaaagttttgactggtcagtcggcgacaaagcggtccataaaaaatggggaacaggaacagtcgtcagcataaaaggagaaggggattccatcgagctggacatcgccttcactccgcctacgggtgtaaagcggctatttgccaaatttgcgcctatcacgaaagcttag

SEQ ID NO: 44004 - protein, 751 aa, Bacillus clausii KSM-K16
MSDMQDTIIERMLSELNPEQQKAVTHSNGPLLLMAGAGSGKTRVLTYRISYLLRRHSTPPWAVLALTFTNKAAREMKDRVAQLVGPIAEDIWISTFHSMCVRMLRRDIDRIGYSRNFTILDSSDQLSVIKQILKSQNVDPKKFDPKAILGMISAAKNELQTASKFAQIASGVFEQVAADVYSEYEKRLKQNNALDFDDLIMKTIQLFNEVPEVLDFYQRKFQYIHVDEYQDTNKAQYRLVKLLGDRLQNICVVGDSDQSIYRWRGADIQNILSFEKDYPDATVILLEQNYRSTKTILKAANSVIANNGNRKPKNLWTENDEGAKISVYEAATEQAEAQFVVEKIKEAAAEPGFSYKDVAILYRTNAQSRIIEEYFVKSNLDYNIVGGTKFYDRKEIKDVLAYLRLVANPDDDISLQRVVNVPKRGIGATTVDKIAAYADAHGLSMFKALGELEQIGVTARARTKLVEFRDQVNNWVHMQDYLSVTELVEELLDKTGYREMLKNEQTIEAQSRLENIDEFITVTQEFEKRSEEKDLVSFLTDLALVADIDQLDKDEEATKKEAITLMTLHSAKGLEFPYVFLIGMEEGVFPHSRSLFEEEEMEEERRLAYVGITRAEKRLYLTSAKMRTLYGRTNTNPTSRFIAEIPAELIEEDSQMPAWGTGGSRQPAAASAAARVRSSVFAGKSGSPRVTVTGGESFDWSVGDKAVHKKWGTGTVVSIKGEGDSIELDIAFTPPTGVKRLFAKFAPITKA

SEQ ID NO: 44005 - DNA, 2208 bp, Neisseria gonorrhoeae FA 1090
  CDS (1)..(2208): transl_table=11
atgtttcccgaccaatccgcccccaatctgctgcaaggcttgaaccccgaacaactctccgccgtaacctggccgccgcaatccgccctcgttttggcaggcgcaggcagcggcaaaacgcgcgtgctgaccacgcgtatcgcatggcttttgcaaagcggacaagccagcgtacacagcattatggcggtaacgtttaccaacaaggccgccaaagagatgcaaacccgactcggcgcaatgattcccatcaacgtccgcgctatgtggctcggcacgttccacggtttgtgccaccgctttttgcgcctgcaccaccgcgacgcaggcctgccgtcttcctttcaaatcctcgacagcggcgaccagctttccctcatcaaacgcctgctcaaaagcctcaacatcgccgaagaaatcatcgcgccgcgttcgctgcaaggctttatcaacgcgcaaaaagaatccggtttgcgcgcttccgtcttgggcgcgcccgatccgcacacaagccgcatgattgggtgctacgccgaatacgacaaaatctgccaacgcgaaggcgtggtcgatttcgccgaactcatgctccgcagctacgaaatgctgcaaagtaacgaaatcctgcgccggcactaccaaaaccgcttcaaccacattctggtcgacgagtttcaagacaccaacaaactgcaatacgcctggctcaaactcatggcgggcggtaacgcagcggtatttgccgtcggcgacgacgaccaaagcatttaccgcttccgcggcgcaaacgtcggcaacatgaccgcactgatggaagaattccacatcgacgcgcccgtcaaactcgaacaaaactaccgctccgtcggcaacatcctcgccgccgccaacgccgttatcgaaaacaacgacgaacgtctcggcaaaaacctgcgcaccgacgccgaagcaggcgacaaaatccgctactactccgcctttaccgacctcgaagaagcccggttcatcgtggatgaaaccaaagccctcgaacgcgaaggctgggatttggacgaaatcgccgtcctctaccgcagcaacgcccaatcgcgcgtcatcgaacaaagcctgttccgcagcggcatcccctacaaaatctacggcggcctgcgcttttacgaacgccaagaaatcaaacacgccctcgcctacctgcgcctcgccgtcaatcccgacgacgacaacgccctcttgcgtgtcatcaacttcccaccgcgcggcatcggcgcgcgcaccgtcgaaaaccttcagacggcctcaaacgaacaaggcatcaccctctggcaggcagcctgcaacgccggcgcgaaagccgccaaagtcgtcgccttcgtccgcctgattgaagccctgcgcaaccaagtcggacaaatgcacctgtccgaaatcatcgtcggcatcctcaaagacagcggtctgaccgagcactaccgaacccaaaaaggcgacaaccaagaccgcctcgacaaccttgacgaactcgtcaacgccgccatcgagttcaaacccgaagacagcaactttgaaaccctgcccgaaaacatttcagacgatcccgccttccccatcctcgccttcttgagcaacgccgccctcgaatccggcgaaaaccaagcaggggcaggcgaaaaagccgtccaactgatgaccgtccacgccgccaaaggcttggaattcaacgccgtcttcctcaccggtatggaagaggggcgtttccccagcgaaatgagccttgccgagcgcggcggcctcgaagaagaacgccgcctcatgtacgtcgccatcacccgcgcccgcaaacgcctctacatcaccatggcacagcaacgcatgctgcacggacaaacccaattcggcatcgcatcccgcttcgtcgaagaaatcccgccagaagtattgcactacctgtccgtcaaaaaacccgccttcgacagctacggcaacacgcgccaaaccaccgtacaacgggacaaaatcatcgatgacttcaaacagccgcaaacctacgcaggcttccgcatcggacaaaacgtccgtcacgccaaattcggcaccggcgtgattatcgatgccgcagacaaaggcgaatccgcccgactgaccatcaacttcggcaaacagggcgtgaaagagctggataccaagtttgcgaaattggaagcgatgtaa

SEQ ID NO: 44006 - protein, 735 aa, Neisseria gonorrhoeae FA 1090
MFPDQSAPNLLQGLNPEQLSAVTWPPQSALVLAGAGSGKTRVLTTRIAWLLQSGQASVHSIMAVTFTNKAAKEMQTRLGAMIPINVRAMWLGTFHGLCHRFLRLHHRDAGLPSSFQILDSGDQLSLIKRLLKSLNIAEEIIAPRSLQGFINAQKESGLRASVLGAPDPHTSRMIGCYAEYDKICQREGVVDFAELMLRSYEMLQSNEILRRHYQNRFNHILVDEFQDTNKLQYAWLKLMAGGNAAVFAVGDDDQSIYRFRGANVGNMTALMEEFHIDAPVKLEQNYRSVGNILAAANAVIENNDERLGKNLRTDAEAGDKIRYYSAFTDLEEARFIVDETKALEREGWDLDEIAVLYRSNAQSRVIEQSLFRSGIPYKIYGGLRFYERQEIKHALAYLRLAVNPDDDNALLRVINFPPRGIGARTVENLQTASNEQGITLWQAACNAGAKAAKVVAFVRLIEALRNQVGQMHLSEIIVGILKDSGLTEHYRTQKGDNQDRLDNLDELVNAAIEFKPEDSNFETLPENISDDPAFPILAFLSNAALESGENQAGAGEKAVQLMTVHAAKGLEFNAVFLTGMEEGRFPSEMSLAERGGLEEERRLMYVAITRARKRLYITMAQQRMLHGQTQFGIASRFVEEIPPEVLHYLSVKKPAFDSYGNTRQTTVQRDKIIDDFKQPQTYAGFRIGQNVRHAKFGTGVIIDAADKGESARLTINFGKQGVKELDTKFAKLEAM

SEQ ID NO: 44007 - DNA, 2184 bp, Haemophilus influenzae 86-028NP
  CDS (1)..(2184): transl_table=11
atgatggatatttctgaattacttgacgggcttaacgataaacaacgcaaagccgtagctgctcctcttggtaatcacctagtgctagctggtgcaggatcgggcaaaacgcgtgtattgacgcaccgtattgcttggttaattgcggtcgaaaatatttctgaaggcagcattatggcggtgacctttaccaataaagccgcagcagaaatgcgtcatcgtattcaatctacccttgccaaacacgcacaacatcaattagttggtatgtggattggcacctttcacagcattgcccatcgtttattacgagctcatcatttagatgtgggattgccacaagatttccaaattttagattcagaagatcaacttcgtttaattaaacgattattaaaattacataattttgatgaaaaagcttttccgcctaaacaggcttgttggtacatcaataacaaaaaagatgaaggcttgcgaccaaatgatattgaagattttaatgatcgccaagaacgtgaatggattaaaatttatcagatctatcaagacacttgcgatcgcgcagggttggtcgattttgctgaattattaattcgggtctatgaattatttgagaaaaaaccattaattttgcaacgttatcaacaacgttttcagcatattttggtggatgaatttcaagacaccaataaaatccaatataaatggatcaaaattctttctggaaaaacaggcaaagtcatgattgtgggcgatgatgatcaatctatatacggttggcgtggtgcacaaatagaaaatatccaaaaattcttgaaagatttcaaagccgaaacaattcgccttgaacaaaactatcgttctaccgccaatatcctaaacagcgcaaatgaattaattgcaaacaatagtgatcgtcttggtaaaaatttatggacagagggtgaaaaaggcgatcctgtgggcatctatgctgcctttaatgaattagacgaagcaaaatttgtcgcctcacaaattcaggattgggtggaacatggcggaaaacttgatgattgcgctgtactttatcgtagtaatagccaatcacgggttattgaagaagctttaattcgttgtcaaattccataccgtatttatggcggtatgcgtttcttcgaacgtcaagaaattaaagatgcgttagcctatcttcgtttgattaataatcgtcaagatgatgcggcttttgagcgtgtaattaatacgccaacccgtggcattggcgaccgcactttagatatattgcgtaacttaacacgtgaacgccaaattaccttatggcaagcagtacaagtcgcaacacaagaaaatatgttggcagggcgagcctcaacagccttattacgtttccaagaattaattaattcactacaacttgataccgcagaaatgccgcttttcgcacaaactgattttgtgattaaacattcgggcttatatgaaatgtatcaacaagaaaaaggcgaaaaaggcgaagtgcgtattgaaaatttggaagaattagttaccgcaacccgtgaatttatcaaacctgataatgcggaagaaatgaccgaactcactgcctttttaacgcacgcttccttagaagctggcgaagaacaagcctcgccgcatcaatcttgtgtagaaatgatgacgttgcactctgcgaaaggcttagaatttcctcgtgtatttatggtgggcgtagaagaaggattattcccaagttttcgttcttttgaagaacccggacgtttagaagaagagcgtcgtttagcttatgtcggtattactcgtgcgcagaaaaaactgaccatctcttatgcggaaagccgtcgattatatgccaaagaagaacgccatttgccatcacggtttatcgcagaattaccgagagaatgtatccaagaaattcgtttacgagggacagtcacgcgtgcgatgaacctagcaaaagtcggttcattgtcgaataccagtgcggtcgaaaatgaatggaaaatgggtcaaaaagttaaacacgaaaaatttggtttcggcacagtgattaatgtggaaggatctgaaaataacacacgtttacaaatagcgttccaagctcaaggcattaaatggttgattgcgcatttggcaaaattggaaaaagtgcggtag

SEQ ID NO: 44008 - protein, 727 aa, Haemophilus influenzae 86-028NP
MMDISELLDGLNDKQRKAVAAPLGNHLVLAGAGSGKTRVLTHRIAWLIAVENISEGSIMAVTFTNKAAAEMRHRIQSTLAKHAQHQLVGMWIGTFHSIAHRLLRAHHLDVGLPQDFQILDSEDQLRLIKRLLKLHNFDEKAFPPKQACWYINNKKDEGLRPNDIEDFNDRQEREWIKIYQIYQDTCDRAGLVDFAELLIRVYELFEKKPLILQRYQQRFQHILVDEFQDTNKIQYKWIKILSGKTGKVMIVGDDDQSIYGWRGAQIENIQKFLKDFKAETIRLEQNYRSTANILNSANELIANNSDRLGKNLWTEGEKGDPVGIYAAFNELDEAKFVASQIQDWVEHGGKLDDCAVLYRSNSQSRVIEEALIRCQIPYRIYGGMRFFERQEIKDALAYLRLINNRQDDAAFERVINTPTRGIGDRTLDILRNLTRERQITLWQAVQVATQENMLAGRASTALLRFQELINSLQLDTAEMPLFAQTDFVIKHSGLYEMYQQEKGEKGEVRIENLEELVTATREFIKPDNAEEMTELTAFLTHASLEAGEEQASPHQSCVEMMTLHSAKGLEFPRVFMVGVEEGLFPSFRSFEEPGRLEEERRLAYVGITRAQKKLTISYAESRRLYAKEERHLPSRFIAELPRECIQEIRLRGTVTRAMNLAKVGSLSNTSAVENEWKMGQKVKHEKFGFGTVINVEGSENNTRLQIAFQAQGIKWLIAHLAKLEKVR

SEQ ID NO: 44009 - DNA, 2184 bp, Pseudomonas fluorescens Pf-5
  CDS (1)..(2184): transl_table=11
atgcgcgatgatctctccctcctgttgaactccctcaacgacgcccaacgccaggccgtagccgcctccgtgggtcgtcagttggtcctggccggtgctggctccggcaaaacccgtgtgctggtgcaccgtatcgcctggttgatccaggtcgagaacgcctcaccccactcgatcctgtcggtgaccttcaccaacaaggccgcagccgagatgcgccaccgcatcgaacaactgctgggcatcaacccggcaggcatgtgggtcggcaccttccacggcctggcccaccgcctgctgcgggcccactggcaggaagcggggttgagccagaccttccagatcctcgacagcgacgaccagcaacgcctggtcaagcgggtgatccgcgagctgggactggacgaacagcgctggccggcccgccaggcccagtggttcatcaacgggcagaaggacgaaggcctgcgcccgcaacatatccaggccagcggcgacctgttcctggccaccatgcgcggcatctatgaggcctacgaggccgcttgccagcgtgccggggtcatcgacttctccgaactgctgctgcgcgccctggacctgtggcgcgaccacccgggtttgctggcgcactaccagaagcgtttccgccacgtgctggtggacgaattccaggacaccaacgccgtgcaatacgcctggctgcggttgctggcccagggtggcgacagcctgatggtggtgggcgacgacgaccagtcgatctacggctggcgcggggcgaaaatcgagaacatccaccagtactccgccgacttcccggacaccgaagtgatccgcctggagcagaactaccgctctactgccggcatcctcaaggctgccaacgccctgatcgccaacaacaccgggcgcctgggcaaggagctgtggaccgacggcggcgacggtgaagccatcaacctgtatgccgccttcaacgagcacgatgaagcccgctatgtagtggaaaccatcgagagcgcgctgaagaccggcctggcccgcagcgacatcgccattctctaccgctccaacgcccagtcccgggtgctggaagaagccttgctgcgcgaacgcattccgtaccgcatctatggcggccagcgcttcttcgagcgggcggaaatcaagaacgccatggcttacctgcgcctcttggaaggccgtggcaacgacgcagccctggagcgggtgatcaacgtgccagcccggggcatcggcgagaagaccgtcgaagccatccgcgagcatgcgcgccacagcgatgtatcgatgtgggaagccatgcgccagctggtggccaataagggcctgaccgggcgcgctgcaggtgcgctgggggcctttatcgaactgatcgaaaacctcgccgccaagaccctggaaatgcccctgcacctgatgacccagaccgtcatcgagcagtcggggctgattgcctaccacgaagcggaaaaaggcgaaaaaggccaggcccgggtggaaaacctcgaggaactggtgagcgccgcgcgcaacttcgagaacaccgaagaggatgaagacctgacgcccctggcggccttcctcggccacgcgtccctggaagccggcgatacccaggccgacgagcatgaagacagcgtgcaactgatgaccctgcacagcgccaagggtctggagttcccctacgtgttcctggtgggcatggaagaaggcctgttcccccacaagatgagcctggaagaacccggccgccttgaggaagaacgccggctggcgtatgtgggcattacccgggccatgcaaaacctggtgatgacctacgcggaaacccgacgcctgtacggcagcgaaacctacaacaaggtgtcgcgtttcgtgcgcgaggtgcccaaggggctgattcaggaagtgcggctgtccaacagcgtcagccggcctttcggcggcggccagtcacaaagtaccagcagcctgttcggcggcagcgaaatcccggacaccggcctgagcctcggccaggcggtacggcactcggtgttcggcgacggggtgatcctcaatttcgagggcgccggcgcccaggcccgggtccaggtcaacttcagcgaaggcagcaagtggctgatgctgggctacgccaagctggaagccatctaa

SEQ ID NO: 44010 - protein, 727 aa, Pseudomonas fluorescens Pf-5
MRDDLSLLLNSLNDAQRQAVAASVGRQLVLAGAGSGKTRVLVHRIAWLIQVENASPHSILSVTFTNKAAAEMRHRIEQLLGINPAGMWVGTFHGLAHRLLRAHWQEAGLSQTFQILDSDDQQRLVKRVIRELGLDEQRWPARQAQWFINGQKDEGLRPQHIQASGDLFLATMRGIYEAYEAACQRAGVIDFSELLLRALDLWRDHPGLLAHYQKRFRHVLVDEFQDTNAVQYAWLRLLAQGGDSLMVVGDDDQSIYGWRGAKIENIHQYSADFPDTEVIRLEQNYRSTAGILKAANALIANNTGRLGKELWTDGGDGEAINLYAAFNEHDEARYVVETIESALKTGLARSDIAILYRSNAQSRVLEEALLRERIPYRIYGGQRFFERAEIKNAMAYLRLLEGRGNDAALERVINVPARGIGEKTVEAIREHARHSDVSMWEAMRQLVANKGLTGRAAGALGAFIELIENLAAKTLEMPLHLMTQTVIEQSGLIAYHEAEKGEKGQARVENLEELVSAARNFENTEEDEDLTPLAAFLGHASLEAGDTQADEHEDSVQLMTLHSAKGLEFPYVFLVGMEEGLFPHKMSLEEPGRLEEERRLAYVGITRAMQNLVMTYAETRRLYGSETYNKVSRFVREVPKGLIQEVRLSNSVSRPFGGGQSQSTSSLFGGSEIPDTGLSLGQAVRHSVFGDGVILNFEGAGAQARVQVNFSEGSKWLMLGYAKLEAI

SEQ ID NO: 44011 - DNA, 2034 bp, Psychrobacter arcticus 273-4
  CDS (1)..(2034): transl_table=11
atgagtcaacttaatcccaaacaacaagaagccatgctctacgtatccggtccgctgctggtattagcaggtgccggctccggtaagacctcagtgattacgcgcaaaattgcttatttgattgaagaatgtaatatgccagctgagcgcatcaccgcggtgacctttaccaataaagcggcgcgtgagatgaaagctcgagtcagtaaattgctaccgagtgaaaagacgcgtgggctgacagtatcaacctttcaccagtttgggctacagtttttgcgttatgagctgcttcatacgccccttaagggcaacttctccatcatggacagcgatgatagcaagcgtctgctgatggagctgatgatgcgtgacaacttaagtggcgctgaaagtcgagagttggtcggcaaagcgataaaaatgatttctgattggaaaaacgatttgattgagccggataaggcgatggaaaccttagacgatccagaagatatgatttttgcgacgctttatgcgctgtatgagcgaaatctgcgggcttataatgcggtcgattttgatgacttgattgtattgccgaccaaaatcttacgtgaaaacagagagctacgtgacaagtggcaaaaccgtattcgctatttgttggtcgatgaatatcaagataccaatacggctcagtatgagatgattaaatatctggtcggaccgcaagggcgctttaccgtcgttggtgatgatgaccaatctatttacgcatggcgcggtgctaaacctgaaaacatggggctgctcaaagaagattttcctaagctaaaaatcgtcatgcttgaacaaaattatcgctcgaccacgcgtattttaacttcagcaaatgcggttattactaataatgagcatttatttgaaaagaaactctggtcagacaaaggtcaaggcgaaaaaattcgaattattaactgccgtaatgatgatgatgagtctgagcgcgtcgccaaagaaatcgtcactcataaactgcgctttggcaatgaatgggaacaatacgcggttctctatcgtagtaactttcaggcgcggatgcttgaagcacaacttcgtcaattgcaagtaccttataaattgtccggtggtcaatcattctttgcccgtagtgaaatcaaagacgttatgagctacttgcgtctgattttaaacccagaagacgacagtgcatttttacgggtgattaatacacccaagcgcggtatgggaccagccacgctcgaaaagcttggcttattttcacaagagcatagcatctcactacttgcctcttgtacgcatgccggtcttgctcatgtcttgccatcaaaagcttacagcacgctaaaagagtttggcgattttattgagcattacactcgtgagcttgatcaacatcctgaccctgtaccaatcgtacgccagatgattgatgagactggttatattgattttgtccgcagtgactctaaaacaccgcagcaagaaaaaaaccgtattgataatatcgatatgctttataccagtatccaatcgctgattaatcgcgctgaagaagacgaagatcggacgattgataccatcattcgcaagttggtattgcttgatatgcttgagcagcagcaagaagaagaaaataccaataaagtcaatctgatgaccttacatgccgccaagggcttggaatttgatttcgtgtatatcatgggtctggaggaagagatgctaccgcatcgcaactcaattttaagcgagacggtcgaagaagaacgacgcttgatgtatgtgggcattactcgcgcgcgtcgtgagctaaccttgacattagccacccagcggcgtgctggcggtcaaatgcgcgtgacctctgaatcacggtttttagatgagttgccagaagatcatatcgactggcctgccaaagcaaaaaaacaaaaagccaccaaagaccccgcagcagtcgctgatgaatacttggctaacattcgggctttattaggcaatcgctaa

SEQ ID NO: 44012 - protein, 677 aa, Psychrobacter arcticus 273-4
MSQLNPKQQEAMLYVSGPLLVLAGAGSGKTSVITRKIAYLIEECNMPAERITAVTFTNKAAREMKARVSKLLPSEKTRGLTVSTFHQFGLQFLRYELLHTPLKGNFSIMDSDDSKRLLMELMMRDNLSGAESRELVGKAIKMISDWKNDLIEPDKAMETLDDPEDMIFATLYALYERNLRAYNAVDFDDLIVLPTKILRENRELRDKWQNRIRYLLVDEYQDTNTAQYEMIKYLVGPQGRFTVVGDDDQSIYAWRGAKPENMGLLKEDFPKLKIVMLEQNYRSTTRILTSANAVITNNEHLFEKKLWSDKGQGEKIRIINCRNDDDESERVAKEIVTHKLRFGNEWEQYAVLYRSNFQARMLEAQLRQLQVPYKLSGGQSFFARSEIKDVMSYLRLILNPEDDSAFLRVINTPKRGMGPATLEKLGLFSQEHSISLLASCTHAGLAHVLPSKAYSTLKEFGDFIEHYTRELDQHPDPVPIVRQMIDETGYIDFVRSDSKTPQQEKNRIDNIDMLYTSIQSLINRAEEDEDRTIDTIIRKLVLLDMLEQQQEEENTNKVNLMTLHAAKGLEFDFVYIMGLEEEMLPHRNSILSETVEEERRLMYVGITRARRELTLTLATQRRAGGQMRVTSESRFLDELPEDHIDWPAKAKKQKATKDPAAVADEYLANIRALLGNR

SEQ ID NO: 44013 - DNA, 2175 bp, Colwellia psychrerythraea 34H
  CDS (1)..(2175): transl_table=11
atggacgtttcagaattactcgactctctcaatgataagcaacgtgatgttgttgcagccccaaagcaaaacatgcttattttagctggcgctggcagtggtaaaactcgagtattagtgcaacgtatcgcctggttaatgcaagttgaggggatctcatcgcacagtattttagcggtaacctttactaataaagcagcggcagaaatgcgtgctcgagtagaacaagtgaccaatggtaatacccacggcatgtggattggtacttttcatggcttggcacatcgtttattaagaatgcatttccaagaagctaatttaccgcaaagctttcaagtattagatagtgatgatcaacttcgtttgattaaacgtattgttcgttcattagagttagatgagaaaaaatggccacctaaacaatttgtttggtatatcaatggtaagaaagatgaaggtttgcgccctcaacatattgatgctcagttcgacccgacggaagaattgtttgttaaagtttataaagcctatcaagaaacctgtgacagagctggtttagttgattttgccgagctgttgcttcgtgcccatgaattatggttgaaaaatccagcactattagatcattatcagcaacggtttggccatattctagtagacgaatttcaagataccaacgccattcaatatgcttggcttactatgctgggcaaagctcgcagtaaggtgatgattgttggtgatgacgatcaatcaatctatggctggcgtggcgctaagattgagaatatcgaacgttttttacaagaatatgatgacgcgaaaactattcgtcttgagcaaaattatcgttcaaccgctaacattttgaaatcagctaaccaattaatctgcaataacaacaatcgcatgggtaaagagttgtggactgatggagaagcgggcgaaaaaatctcaatttatactgcttttaatgaaatagatgaagcgcgctttatcgctggccgtataaaacaatggcgtgacgatggaggaaaacttgatgaaatagccatattgtatcgctcaaatgcacaatcacgcttacttgaagaagcgttattgcaaggacaattgccttatcgaatttacggtggtcaacgattcttcgaacgacaagaaataaaagatgcgcttgcttacatgcgtcttattaataatcgtgatgatgatgcggcctttgagcgtgttatcaatacgcctacgcgtggtattggtaatcaaaccttgtcattagtgagagacgcagcacggggtttggaagtaacaatgtggcaagcttgccagcaaatgttaaaagcagagcaattaaagggtaggggcgctaaaacgatcactgcctttattcaacttatcgaacaattagaagatgatacgactaacttagatttagatcagcaggcgaactttattatcaaccacagtggtttaaaggccatgtatcaggctgaaaaaggtgaacgtgctgcacagcgtattgaaaacttaaatgagctagtcaccgcatgtcaaacctttgaaagcgatcctgagttagcggaagagcaaaccccgttaacggcatttttaacccatgcggcattagaatctggtgaatctcaagcagacgaatttgaagccgcagtacagttgatgacaatgcactcagctaaaggcttagagtttcctttggtctttattgcgggtcttgaagaaggtatgttcccttcgcaacagtcggttgaagaaattggccgtttagaggaagaacgtcgcttgtgttatgtcggcatgaccagagcgatgagcaaactctatttatgccacgccgaaagtcgccgtttatatggacaagaaaaattccataaagcgagccgatttttacgagaattacctgaagattgtatcgaagaaattcgcatgcagtctcaggtaaagcgtcccagtaaagtaggtaaattttcaaatacctttacacttgaaacctttgaaaatactggctttaagttggggcagcaggttaagcatgctaagtttggtgaaggtgtggtccttaactatgaaggcagtggtgctcaatcacgtattcaggtgaatttcgccgatgttggtagcaagtggttggtggtggaatacgctaatttacaagcggtttaa

SEQ ID NO: 44014 - protein, 724 aa, Colwellia psychrerythraea 34H
MDVSELLDSLNDKQRDVVAAPKQNMLILAGAGSGKTRVLVQRIAWLMQVEGISSHSILAVTFTNKAAAEMRARVEQVTNGNTHGMWIGTFHGLAHRLLRMHFQEANLPQSFQVLDSDDQLRLIKRIVRSLELDEKKWPPKQFVWYINGKKDEGLRPQHIDAQFDPTEELFVKVYKAYQETCDRAGLVDFAELLLRAHELWLKNPALLDHYQQRFGHILVDEFQDTNAIQYAWLTMLGKARSKVMIVGDDDQSIYGWRGAKIENIERFLQEYDDAKTIRLEQNYRSTANILKSANQLICNNNNRMGKELWTDGEAGEKISIYTAFNEIDEARFIAGRIKQWRDDGGKLDEIAILYRSNAQSRLLEEALLQGQLPYRIYGGQRFFERQEIKDALAYMRLINNRDDDAAFERVINTPTRGIGNQTLSLVRDAARGLEVTMWQACQQMLKAEQLKGRGAKTITAFIQLIEQLEDDTTNLDLDQQANFIINHSGLKAMYQAEKGERAAQRIENLNELVTACQTFESDPELAEEQTPLTAFLTHAALESGESQADEFEAAVQLMTMHSAKGLEFPLVFIAGLEEGMFPSQQSVEEIGRLEEERRLCYVGMTRAMSKLYLCHAESRRLYGQEKFHKASRFLRELPEDCIEEIRMQSQVKRPSKVGKFSNTFTLETFENTGFKLGQQVKHAKFGEGVVLNYEGSGAQSRIQVNFADVGSKWLVVEYANLQAV

SEQ ID NO: 44015 - DNA, 2142 bp, Dechloromonas aromatica RCB
  CDS (1)..(2142): transl_table=11
atgtccgatctgctcgccaatctgaattccccccagttgcaggcggttaccctgccgcccgtccatgcattgattctcgcgggggcagggagcggcaagactcgtgtgctgacgacgcgcattgcgtggctgatttcgaccggacaggtcggcccgcatggggttctggcggtgaccttcaccaacaaggcggccaaggaaatgacggcgcgcctgtcttcgctggtgccgatcaatgtgcgcggcatgtggatcggtaccttccacggcctgtgtaatcgcttgctgcgggcgcattttcgcgaggccggattgccccagaccttccagattctcgattcggctgaccaattggccatggtcaagcgcttgctgaagaacctgaatattgatgacgaaaaatatccgccgcgcgagttgtgccatttcatcaacgcccataaggaacagggtgtgcgtgccgcacaggccgaggcttacgacaactacacgcaaaagcgcgtcgagatctatgccgagtacgagaatcagtgcaatcgcgagggggtgtgtgactttgccgaactgctgctgcgctgctacgaattgctgcagcgcaacgaacctttgcgggcgcattatcagcagcgtttccggcagattctggtcgatgaattccaggatacgaacgtgttgcagtacgcctggctgaaattgctcgctggcggtggggcgcatatctttgcggtgggcgacgacgaccagtcgatttaccgtttccggggcgccgaggtgggcaacatgcgcgagttcgagcgtgactacgccggtgccaacgtgattcgcctggagcagaactaccgctcgcacggcaacatcctggctgccgccaacgccatcatcaagaacaaccgcgagcgtctgggcaagaatctgtggaccgatgccggtgacggtgagccgatccgcgcgttcgaggcgtattcggatctcgacgaagcgcgtttcattgtcgaggaaattcgcgaattggtccgcgatggcaattcgccgacgcaaattgccattctttaccgttcgaatgcccagtcgcgggtgctggagcacgaactgtttaccaagggtgtgccgtacaaggtctatggcggcctgcgcttcttcgagcgccaggaaatcaagcatgcattggcctatctccgcctgttgggcaatcaggacgacgacacggccttcctgcgcgtcgtcaatttcccgacgcgtggcatcggcgcccgttcgctggaaaacctgcaggccacggcgcaccagatcaattccagcctctataacgctgcggcatccctgaccggcaaggcagggcagaccgtgggcgcgtttgtccgcctgatcgagaccttgcgtcaggaaacggccaatctgcccttgcccgagatcatcgaacatgtcgtcgaaaagtccggactggcccagcattaccgggtcgagaaggaagggcaggagcgcctggaaaaccttgatgaactgatcaatgccgccgccaccttcgttgacgacgaaggcgctattggcgaaggcggggcgctggcttccttcctggcgcatgcctcgctggaagcgggcgagcaccaggccggcgaagggcaggaggcggtgcagctgatgtcggtgcatgccgccaagggcctggagttcgacgtggtgttcatcagcggcctcgaacagggcttgttcccgcacgagaactcggtcaatgagggcaaggatgggctggaggaagagcgccggctgatgtacgtcgccgtgacgcgggcccgtcagcggctttatgtgtcttgtgcgcagacccgcatgctgcatggccagacgcgctactgcgtgccgtcgagcttccttgacgaaatcccggaaggcctgatgcgcaagctgaacaagaaggcagagtcggccacggccgtgccggcctttggctcgttcggaggcggttacgccgagcctgccgccggtggtttgcgggtcgggcagacggtcgagcatgccaaattcggtgtcggtgtgatcgtgtctaccgaggggcgtgggagcgatgcgcgggttcaggtcaatttcggtggtgccggcatgaaatggctggcgctggagtacgcgaaactgaccccggtgtga

SEQ ID NO: 44016 - protein, 713 aa, Dechloromonas aromatica RCB
MSDLLANLNSPQLQAVTLPPVHALILAGAGSGKTRVLTTRIAWLISTGQVGPHGVLAVTFTNKAAKEMTARLSSLVPINVRGMWIGTFHGLCNRLLRAHFREAGLPQTFQILDSADQLAMVKRLLKNLNIDDEKYPPRELCHFINAHKEQGVRAAQAEAYDNYTQKRVEIYAEYENQCNREGVCDFAELLLRCYELLQRNEPLRAHYQQRFRQILVDEFQDTNVLQYAWLKLLAGGGAHIFAVGDDDQSIYRFRGAEVGNMREFERDYAGANVIRLEQNYRSHGNILAAANAIIKNNRERLGKNLWTDAGDGEPIRAFEAYSDLDEARFIVEEIRELVRDGNSPTQIAILYRSNAQSRVLEHELFTKGVPYKVYGGLRFFERQEIKHALAYLRLLGNQDDDTAFLRVVNFPTRGIGARSLENLQATAHQINSSLYNAAASLTGKAGQTVGAFVRLIETLRQETANLPLPEIIEHVVEKSGLAQHYRVEKEGQERLENLDELINAAATFVDDEGAIGEGGALASFLAHASLEAGEHQAGEGQEAVQLMSVHAAKGLEFDVVFISGLEQGLFPHENSVNEGKDGLEEERRLMYVAVTRARQRLYVSCAQTRMLHGQTRYCVPSSFLDEIPEGLMRKLNKKAESATAVPAFGSFGGGYAEPAAGGLRVGQTVEHAKFGVGVIVSTEGRGSDARVQVNFGGAGMKWLALEYAKLTPV

SEQ ID NO: 44017 - DNA, 2265 bp, Thermobifida fusca YX
  CDS (1)..(2265): transl_table=11
gtgtcctcccaagagcagcttctcgaaggtctcaacgagctccagcgcgccgcggtgctccaccacggcagcccgctgctgatcatcgctggagcggggtcaggcaagacccgtgtcctcacccaccgcatcgcctacctgctggccgagcggggagtccgccccagcgaggtgctcgcgatcaccttcaccaacaaagccgcagccgagatgaaggagcgtgtcgagcggctgctcggtgaacgcacggccagcgccatgtgggtgatgaccttccactcggcctgtgtgcgcatcctgcgccgcgaggcggcccgcctgggataccccagcagtttcaccatctacgactccgcggactcccagcggctgatgcaactggtctgccgcgaactcgacctggaccccaaacgcttcccgcccaagtcgttctccgcccaggtgtcgagcctgaagaacgaactggtggactacgacacgttcgcggggcgggcagaaaccgtgcaggagcgcgctctcgcggaggcgtaccagctctaccagcagcgcctctacgaggcgggggcgatggacttcgacgacctcatcatggtcacggtccatctgctgcagatgttccccgaggtcgccgagcactaccggcggcggttccggcacctgctggtcgacgagtaccaggacaccaaccacgcccaatacgccctgatccgggagctcgtaggcgacggcgaccccgccaccccgggaccggaattgtgcgtggtgggcgacgccgaccagtccatctacgccttccgcggggcgacgatccgcaacattctggagttcgagcgcgactacccgcaggccaccaccatcctgctggagcagaactaccggtccacgcagaccatcctctccgcagccaacgccgttatcgcgcacaacacggagcgccgcccgaaaaacctgtggtccgcccagggagagggcgagcctatcgtcggctatgtcgccgacgatgagcgcgacgaggcaacgttcgtcgtccaggagatcgacgccctcaccgacgcgggaacctgcacccccggcgatgtcgcggtgttctaccggaccaacgcccagtcccgcgtactggaggaagtgttcgtccgcaccggcatgccgtaccggatcgtcggcggggtgcggttctacgaacgcaaggagatccgcgacatcctcgcctacctccgcgtgctggccaaccctgaggactcggtgagcctgcgccgcattctgaacgtgccgaaacgcgggatcggggagcgggccgagcaggtcatcgaacagttcgcggcacaggagcggatcacgttcgcgcaggccctgcgccgcgcagacgaagcaccgggaatcgccacccgctcgctcaaagcgatcaaagagttcgtcgcgctcctcgaagaactcgaggagctggctgccacccgcagcccggccgagacgattgaagcggtcctggaacgcaccggctacttggaagagctcgtcaactccaaggacatccaggacgagagccgcgtggagaacctcgaggagttcgtcggcgtcgcccgcgagttcgaatcgtcttttgacgccgcgctggccgcagaaggagccgacggggaaaccggccgcgacggtgcggaaccgaccctggtggacttcctcgagcaggtctccctcatcgccgacaccgaccagctccctgacgaggacgaccagggcggggccgtcaccctcatgaccctccactcggccaaaggattggagtttcccgtggtcttcctcaccgggttggaggacggggtcttcccgcacctgcgggcgctcggcgaccggtccgcactggaagaggagcggcggctggtctacgtcggtatcacccgtgcccaggagcggctctacctgacccgggctgcgacacgcagctcctggggggccgcggcctacaaccctccgtcgcggtttttggacgagattcccgcagaactcgtgacctggcgccgggcagagtccacgacggaggcgctccgccgttccgtgtcccctgcccgcacgtcgcggccgacccgcaaggccgagcgcccggtgctagcgctgcggccaggcgacaaggtgaaccacgactcctttgggctgggcaccgtgctctcggtcgacggcaccggggatcggacgcgggcccgtgtcgacttcggagcgggggtcgggcagaaggacctcatggtcaagttcgctccgttggagaagctctga

SEQ ID NO: 44018 - protein, 754 aa, Thermobifida fusca YX
MSSQEQLLEGLNELQRAAVLHHGSPLLIIAGAGSGKTRVLTHRIAYLLAERGVRPSEVLAITFTNKAAAEMKERVERLLGERTASAMWVMTFHSACVRILRREAARLGYPSSFTIYDSADSQRLMQLVCRELDLDPKRFPPKSFSAQVSSLKNELVDYDTFAGRAETVQERALAEAYQLYQQRLYEAGAMDFDDLIMVTVHLLQMFPEVAEHYRRRFRHLLVDEYQDTNHAQYALIRELVGDGDPATPGPELCVVGDADQSIYAFRGATIRNILEFERDYPQATTILLEQNYRSTQTILSAANAVIAHNTERRPKNLWSAQGEGEPIVGYVADDERDEATFVVQEIDALTDAGTCTPGDVAVFYRTNAQSRVLEEVFVRTGMPYRIVGGVRFYERKEIRDILAYLRVLANPEDSVSLRRILNVPKRGIGERAEQVIEQFAAQERITFAQALRRADEAPGIATRSLKAIKEFVALLEELEELAATRSPAETIEAVLERTGYLEELVNSKDIQDESRVENLEEFVGVAREFESSFDAALAAEGADGETGRDGAEPTLVDFLEQVSLIADTDQLPDEDDQGGAVTLMTLHSAKGLEFPVVFLTGLEDGVFPHLRALGDRSALEEERRLVYVGITRAQERLYLTRAATRSSWGAAAYNPPSRFLDEIPAELVTWRRAESTTEALRRSVSPARTSRPTRKAERPVLALRPGDKVNHDSFGLGTVLSVDGTGDRTRARVDFGAGVGQKDLMVKFAPLEKL

SEQ ID NO: 44019 - DNA, 2361 bp, Ralstonia eutropha JMP134
  CDS (1)..(2361): transl_table=11
atgtccgatctgctcgccaacctgaacgccgaacaactcgccgccgtcacgctgcctgacgagccggccctgatcctggccggcgcgggcagcggcaagacgcgcgtgctgacaacgcgcatcgcgtggctgatccagaacggacgggtgtcgccggcgggcatcctggccgtgaccttcaccaacaaggccgccaaggaaatgcagacgcgcctgtcctcgatgctgccgatcaacacgcgcggcatgtggatcggcactttccacggcctctgcaaccgcatgctgcgcgcgcatttccgcgacgcgggcctgccgcagacgtttgccatcctcgacagccaggaccagctttcggcgctcaagcgcctgctgaaagcgctcaatgtcgatgacgagaagtacccggccaagaacctccagtacttcatcaacaacgccaaggagcagggcctgcgtcctgccgacgtggaggcgaacgacgacttcaaccgccgtttcgtcgacctgtacgccgcatacgatcagcaatgccagcgcgagggcgtggtggacttcgccgagttgctgctgcgctgctatgagctgctacgttacaacgacgccattcgccagcactaccagcaccgcttcagccatgtgctggtggacgagttccaggacaccaacgtgctgcagtaccagtggctcaagctgctggccggccatggcacgcagaatccggcggcggtgtttgcggtcggcgacgacgaccagagcatctacgcgttccgtggcgcgaatgtcggcaatatgcgcgatttcgagcatgagttccgcgtgcgcaagctgatcaagctcgaacagaactaccgctcgcacggccatatcctcgattcggccaatcacctgatctcgcataactcccgacgcctcggcaagaacctgcgtaccgatgcgggccacggcgaaccggtgcgcgtgttccaggcgggatcggacggccaggaggcgtcgtggctggtcgaggagatccgcgaccagattgcgcagggcatgagccggtcggagattgcgatcctgtatcgcagcaacgcgcagtcgcgcgtgattgagcatgcgttgttttcggcgggcattgcgtatcgcgtgtatggcggcctgcgcttcttcgagcgcgctgaaatcaagcacgcgctcgcctacctgcaattgctggagaacccgcgcaacgatgcggcctttggccgcgtggtgaatttccccgcgcgcggcattggcgcgcgctcgctggagcaactgcaggatgccgcgcgccagtacaactgctcgctggccgaggccgtggcctatgtgccgggcgcggccggcagcaagctcgccgcattcgtccgcctgatcgagcagatgcgcgccgagacgcgtcgcatgacgctggccgaggtcgtggagcacgtgaccaatgccagcggactgatcacgcattaccgcggcgagaaggaaggccaggatcgcatcgagaacttgcaggaactggtgaccgccgcgcaggcattcgtcgtggaagagggctacgggctggaggcgctggccgcggtgatcccggtcggcttcgaatcgcgcgcggtccaggccgtgcagcagcttgccgaaggcgatcaggcccagcaggtgctggaccccgaagcgctgcccgtggtgatgacgccgctggtggccttcctcacgcacgcctcgctcgaggccggcgacaaccaggcgcaggcgggccaggacgcggtgcagatgatgaccgtacacgccgccaagggcctcgagttcaacgtggtcttcatcaccgggctcgaagagggcttgttcccgcacgagaacagcgcgatggagcaggacggtcttgaggaagagcgccggctgatgtacgtggcgatcacgcgtgcgcgcgagcggctgtacctgtccttcgcgcagagccgagtgttgcacggccagatgcgttaccacgtgcgctcgcgcttcttcgaagagctgccggaagaggcgctcaagtggctcacgccgcagcagcagagctacggcggcgtgcgccgccaggaacgtgacaacgcatggggccgcgactggttccgcaagcccgaggacgtcccgtattcgggcaacaagccgaccggcggcatggacacgggcaacggctatgccgatgccaagcgcgaagccggcaccggtttccgcgtgggccagcaggtgttccacaacaagttcggcgagggcgtgatcaaggcgctcgaaggcgatggcgcggatgcgcgggcccagatcgacttcaagcgccacggcgccaagtggctcgcgctgtcggtggcgaagctggacccgatcaactga

SEQ ID NO: 44020 - protein, 786 aa, Ralstonia eutropha JMP134
MSDLLANLNAEQLAAVTLPDEPALILAGAGSGKTRVLTTRIAWLIQNGRVSPAGILAVTFTNKAAKEMQTRLSSMLPINTRGMWIGTFHGLCNRMLRAHFRDAGLPQTFAILDSQDQLSALKRLLKALNVDDEKYPAKNLQYFINNAKEQGLRPADVEANDDFNRRFVDLYAAYDQQCQREGVVDFAELLLRCYELLRYNDAIRQHYQHRFSHVLVDEFQDTNVLQYQWLKLLAGHGTQNPAAVFAVGDDDQSIYAFRGANVGNMRDFEHEFRVRKLIKLEQNYRSHGHILDSANHLISHNSRRLGKNLRTDAGHGEPVRVFQAGSDGQEASWLVEEIRDQIAQGMSRSEIAILYRSNAQSRVIEHALFSAGIAYRVYGGLRFFERAEIKHALAYLQLLENPRNDAAFGRVVNFPARGIGARSLEQLQDAARQYNCSLAEAVAYVPGAAGSKLAAFVRLIEQMRAETRRMTLAEVVEHVTNASGLITHYRGEKEGQDRIENLQELVTAAQAFVVEEGYGLEALAAVIPVGFESRAVQAVQQLAEGDQAQQVLDPEALPVVMTPLVAFLTHASLEAGDNQAQAGQDAVQMMTVHAAKGLEFNVVFITGLEEGLFPHENSAMEQDGLEEERRLMYVAITRARERLYLSFAQSRVLHGQMRYHVRSRFFEELPEEALKWLTPQQQSYGGVRRQERDNAWGRDWFRKPEDVPYSGNKPTGGMDTGNGYADAKREAGTGFRVGQQVFHNKFGEGVIKALEGDGADARAQIDFKRHGAKWLALSVAKLDPIN

SEQ ID NO: 44021 - DNA, 1920 bp, Ehrlichia canis str. Jake
  CDS (1)..(1920): transl_table=11
atggaagattacattacttcacttaatgaagatcaaaaagaagctgttattaacataaatggtccaatattaatattggcaggagcaggtacaggtaaaactagaactgtgacatcaagaatagcatacataatcaataataattttgcattacctaatcaaattctcgcagtaacattcaccaataaagcagcaaacgaaatgcttgctaggattaatgaaatgacacctgcatataatatttggctagggacttttcatgcaatagcaacaaaaattctaagactacatgctgaaatagttggattaaaaaatgattttacaatcattaatacagatgatcagctacaagtaataaaaaatattgtcaatgatatgcaccctgaatatggattagatgctcataaaatcatattaaataaaatacaaagatggaaagacaggggccttatggcaaataatataaccgaaacagagttatacaaacctatcaatacggttgcattaagtacatatcatgtatatcaagaaagattaaagtttttaaattgtgttgattttggagatttattactatacaacattcaaatactcactacacaacatgatatattatctcactatcaagaacaatttaagtacataatggtcgatgagtatcaagacatcaatacaattcaatatttatggttaagattattagcacaaaagtataaaaacttatgctgtgttggagatgatgatcaatcaatatatagctggcgtggagcagaagtaggaaatattttaaaattttctgatgatttcccaaatgcaaaagtcgtaagactagaatgcaactatagatcaacatccaatatcctaaatgttgctacagcaataataaacaacaataaatcacggttagggaaaaaactatggacaacaaatgagaaaggacaaaaagtcaatttaatgaaattttgggatagcaaagcagaagcacagtacatatgtgagtacattaaaaattcacatgactatcagtttaatgaaacagcaattttagtaagagcaggatttcaaacaagaatattcgaggaatattttatcaagtacaacataccatataaaataattggtggtacaagattttacgacagacaagaaattagagatattatcgcctacttaaaaataactgcaaatcccaacaacgacattgctttcgaaagaataattaataaacctaaacgtcatataggagcatcaactcttaataaaatatatttatgtgctaaacagaataatacatactttttaaatgctgcaaaacttttagtatcaggcaatcaattatctgacaaagtatccagatctctaaatcacttacttaacaagattgactcttggaaggaatccttgttatctgattcaatatcaaatactgtcaaaatgatagcatatgactcagggtacatagacatgttagaaaatgaaggagaaaatgggctggcaagaatagaaaatataaaagaacttttctctgcactattaagttttaacgatgtaaacgaatttttagaacacatcagtcttgtaacagaaatggattcattagattacaacaacaattacacatatattatgacattacatgcagcaaaaggactagaattccctatagtatttttacctggatgggaagaaggaatatttccacacgaaaaatctttacaagatagaacaggagaagcactagaagaagaaagaaggttagcttatgttggaataacacgagcacgtgaacaattattcatatcatgtgcagcagtacgagatatcaataactggcgtcaacaaatgaaaatatcaaggtttattaaagaattacctgcagcacatgtacaagttataaaaaatatttcaagttattactaa

SEQ ID NO: 44022 - protein, 639 aa, Ehrlichia canis str. Jake
MEDYITSLNEDQKEAVININGPILILAGAGTGKTRTVTSRIAYIINNNFALPNQILAVTFTNKAANEMLARINEMTPAYNIWLGTFHAIATKILRLHAEIVGLKNDFTIINTDDQLQVIKNIVNDMHPEYGLDAHKIILNKIQRWKDRGLMANNITETELYKPINTVALSTYHVYQERLKFLNCVDFGDLLLYNIQILTTQHDILSHYQEQFKYIMVDEYQDINTIQYLWLRLLAQKYKNLCCVGDDDQSIYSWRGAEVGNILKFSDDFPNAKVVRLECNYRSTSNILNVATAIINNNKSRLGKKLWTTNEKGQKVNLMKFWDSKAEAQYICEYIKNSHDYQFNETAILVRAGFQTRIFEEYFIKYNIPYKIIGGTRFYDRQEIRDIIAYLKITANPNNDIAFERIINKPKRHIGASTLNKIYLCAKQNNTYFLNAAKLLVSGNQLSDKVSRSLNHLLNKIDSWKESLLSDSISNTVKMIAYDSGYIDMLENEGENGLARIENIKELFSALLSFNDVNEFLEHISLVTEMDSLDYNNNYTYIMTLHAAKGLEFPIVFLPGWEEGIFPHEKSLQDRTGEALEEERRLAYVGITRAREQLFISCAAVRDINNWRQQMKISRFIKELPAAHVQVIKNISSYY

SEQ ID NO: 44023 - DNA, 2181 bp, Thiobacillus denitrificans ATCC 25259
  CDS (1)..(2181): transl_table=11
atgtcctcctcccccgacgggcaccagcgcctgctggattcgctcaatcccgaacagcgcgccgcggtgacgctgccgcacgagtccgcgctgatcctcgccggggccggctcgggcaagacgcgcgtgctgaccacgcgcatcgtctggctcgtccagaccggccaggtgtcgccgcacggcatcctcgccgtgaccttcaccaacaaggcggcgaaggagatgctcacgcgcatttcggcgatgctgccgatcaacacacgcggcatgtgggtcggcaccttccacggcctcgccaatcgcctgttgcgcacgcactggcgagaagccggattgccgcagtccttccagatcctcgacgcctccgaccagctctcggcgatcaagcggctcatgaaggcgatgaacgtcgacaccgagaaatacgagccgaagaaggtgcagtggttcatcaacggccacaaggaggccggacgccgcgcgcgcgacgccgaggcctacgacgagtactcgatgcggctggccgagatctacgaagcctacgacgcgcagtgccagcgcgagggcgtggccgacttccccgaactgctgctgcgctcctacgaattgctctaccgcaacgagccgctcaggcagcattaccaggatcgcttccggcacatcctggtcgacgagttccaggacaccaacacgctgcaataccgctggctcaagctcttcgccggcgcgcacagcgtgatcttcgcggtcggcgacgacgaccagtcgatctacgccttccgcggcgccgacaccgccaacatggccgcgttcgaacgcgaattcgcgcacggcaacgtgatcaagctcgagcagaactaccgcagccacggcaacatcctgaccgccgcgaacacgctgatcgcgcagaatgcccaccgcctcggcaagaacctgtggaccgccgcgggcgaaggtgagccgatccgcgtcttcgaggcgtattccgaccaggacgaggcgagtttcgtcgtcgacgaggtgcggaatctgaaccgggaaggcatcgcctacgccgacatggcgctgctttaccgctccaacgcgcagtcgcgcgtgctcgaacacgccctgttctcggccggcgtcgcctatcgcgtatacggcggcctgcgcttcttcgagcgccaggaagtcaagcacgccctcgcctacctgcgtcttctgacccaccccgaggacgacggcgccttcctgcgcgtggtcaacttccccacccgcggcatcggcgcgcgcacgctcgagcaattgtccgagaccgccgcgcgcgcgggaacgagcctctggcaggccgcctgcaccagcggcggcaaggtcgcggcgttcgcgcggctgatcgaggacatcaagcgcgccacggccgacctgcccttgcccgaagcgatcggccacgtcgtcgaggcgtcgggcctggccgattactaccgtgccgacaaggacggcgccgaccgcctggagaacctcaacgaactcgtcaacgcggccgcgcttttcgccgaggagtcggctgccgaggcttcggcgtccgacgagccggcgccgtccgaactggaccgttttctcgcccatgccgcgctcgaggccggcgagcaccaggccgaggcggggcgcgacgcgctgcagttgatgaccgtgcacgcggcgaagggcctcgagttcgaggcggttttcatcaccgggctcgaggaaagcctgtttccgcacgagcaaagcacgctccagggcagcgggacacacgccgacgaggggctcgaggaagagcggcggctgatgtacgtcgcgatcacgcgggcgcggcgcaggttgtatctctcgcacgcgcaatcgcgcatgctgcacggccaggtgcgctacggcatcgcctcgcgttttctgtccgaactgcccgagcaggtgctactgcacctcaatcgccgggcgacgccggcgcatgtgcgcgaagcgccggcgccatcgccgcgggccgcgcgcgccggcgaagacacggggtatcgcgtcggtcagagcgtcgcgcacgccaggttcggcaccggcatcatcatcgacttcgaaggacgcgggcccgacgcgcgcgtgcaggtcaagttccgtgatggaacgaagtggcttgcgctcgcctacgccaagctgtcgccggcctga

SEQ ID NO: 44024 - protein, 726 aa, Thiobacillus denitrificans ATCC 25259
MSSSPDGHQRLLDSLNPEQRAAVTLPHESALILAGAGSGKTRVLTTRIVWLVQTGQVSPHGILAVTFTNKAAKEMLTRISAMLPINTRGMWVGTFHGLANRLLRTHWREAGLPQSFQILDASDQLSAIKRLMKAMNVDTEKYEPKKVQWFINGHKEAGRRARDAEAYDEYSMRLAEIYEAYDAQCQREGVADFPELLLRSYELLYRNEPLRQHYQDRFRHILVDEFQDTNTLQYRWLKLFAGAHSVIFAVGDDDQSIYAFRGADTANMAAFEREFAHGNVIKLEQNYRSHGNILTAANTLIAQNAHRLGKNLWTAAGEGEPIRVFEAYSDQDEASFVVDEVRNLNREGIAYADMALLYRSNAQSRVLEHALFSAGVAYRVYGGLRFFERQEVKHALAYLRLLTHPEDDGAFLRVVNFPTRGIGARTLEQLSETAARAGTSLWQAACTSGGKVAAFARLIEDIKRATADLPLPEAIGHVVEASGLADYYRADKDGADRLENLNELVNAAALFAEESAAEASASDEPAPSELDRFLAHAALEAGEHQAEAGRDALQLMTVHAAKGLEFEAVFITGLEESLFPHEQSTLQGSGTHADEGLEEERRLMYVAITRARRRLYLSHAQSRMLHGQVRYGIASRFLSELPEQVLLHLNRRATPAHVREAPAPSPRAARAGEDTGYRVGQSVAHARFGTGIIIDFEGRGPDARVQVKFRDGTKWLALAYAKLSPA

SEQ ID NO: 44025 - DNA, 2319 bp, Anabaena variabilis ATCC 29413
  CDS (1)..(2319): transl_table=11
atgactaccgactttctcagtcatctgaatcccagccaacgtcaagccgtggaacactattgcggccccttgttagttgttgctggtgctggttccggtaaaacacgagcgctaacttatcggattgctaatttaatactaaagcaccgcgttgctcccgaaaatattttggcggtgactttcaccaacaaagccgccagggagatgaaagaacggattcaacggctgtttgcggaacaattagccttgacagaacacggaaagcgtttagatttattaccagaacacgaacaaactaaattgcgatcgcgcgtttataaaactactattaaagaactgtggtgtggtactttccacagtttattttcccgtattctccgctttgatatcgaaaaataccaagatgaaaaagggcgacaatggaatcgtaatttttccatttttgatgaatctgatgtacaaggtctcatcaaagaaatcgtcacgaaacaattaaatctagatgataagaagtttgagccgcgttctgtccgctacgccattagtaatgccaaaaatcaaggactttcaccccaggaatttgaaaaagaccagccaaattatcgtgggagagtaattgctgatgtctataatcgttatcaagataaactagcagaaaacaacgctcttgattttgatgatttaatcttaattcctacgagattatttcaacagaatgaacaagttttaggttactggcatcgcaagttttgtcacattcttgtagacgaatatcaagatactaaccgcacacaatacgatttaattcgcctgttgacaaccaatggcgaagagagaaaaagtgcatgggaatggcaaaatcgctcggtttttgttgtcggtgatgcagaccaatctatttacagctttagaatggcagatttcaccatcctgctggagtttcagaatcaatttggtgatggtttgccagatgaagatacccgcacaatggtgaagttagaagagaactatcgctcatgtgaaaacattctccaagttgctaacgaactgattgaaaataatactcaaagaattgataaagtcctgaaggcgacgcggggagcaggtgaggaaatttactgccacaaggcagataatgaattagaagaagctgattttgtaattcgtcaaatccgcacattagagcatcaaaacccggagttagattggggtagctttgcgattttgtatcggacaaatgcccaatctcgtccctttgaagaattgttagtcaggaatcagattccttacacagttgtgggtggaatgaagttctatgaccgcaaagaaattaaagatgtcatagcttatttaagggcgatcgctaatccctcggatacagttagtctattacgagtgattaacacccctcggcgtggtatcggtaaggcgactattgataacttaatcaatgcttcccagcaattaggtacaactctctgggaaattttaagtgatgaaacatcagtcaacacgttagctgggcgatcggctaaaggggtaaatcactttgcccaaatgattaaccgttggcaagagcaaataaccacagccccagttacagaaatagttatggggattttagaagattctggttacgtacaagatttacaaaaccaaggaacagacgaatctgaagaccgcatccaaaacgtacaggaactttacaacgccgtcttacaattccaagaagagaatgaagatgtttctttaacagcgtttctacaaagtacagcccttagttccgatttagataacctcaaggaaggtcaaacagccgtttctctaatgactctgcacgcttccaaaggtttggaatttcctgtagtcttcttggtaggtttggaacagggattattccccggctaccgttcactaaatgaccccgcagccttagaagaagaacgccgcctctgttatgtagggattactcgcgcccaagaacggttgtatttatccttcgcccgtgaacgccgcttatatggctcacgggaacccgccatgcgatcgcaatttctcgacgaactaccagccgaattaatcaccacccaataccaagtccgacaaacctatactaaacccccatcaactaccaatggtaagcaaacagcaaatcaagattggcaagtaggggacagagttttacacaaaagttttgggattggggaaataacccacgtttttggttctggtagcaagctttctgtcgcggttaaatttacgagcttgggtcagaaaattattgaccccagagtagcgcaattacaaaaggtggattag

SEQ ID NO: 44026 - protein, 772 aa, Anabaena variabilis ATCC 29413
MTTDFLSHLNPSQRQAVEHYCGPLLVVAGAGSGKTRALTYRIANLILKHRVAPENILAVTFTNKAAREMKERIQRLFAEQLALTEHGKRLDLLPEHEQTKLRSRVYKTTIKELWCGTFHSLFSRILRFDIEKYQDEKGRQWNRNFSIFDESDVQGLIKEIVTKQLNLDDKKFEPRSVRYAISNAKNQGLSPQEFEKDQPNYRGRVIADVYNRYQDKLAENNALDFDDLILIPTRLFQQNEQVLGYWHRKFCHILVDEYQDTNRTQYDLIRLLTTNGEERKSAWEWQNRSVFVVGDADQSIYSFRMADFTILLEFQNQFGDGLPDEDTRTMVKLEENYRSCENILQVANELIENNTQRIDKVLKATRGAGEEIYCHKADNELEEADFVIRQIRTLEHQNPELDWGSFAILYRTNAQSRPFEELLVRNQIPYTVVGGMKFYDRKEIKDVIAYLRAIANPSDTVSLLRVINTPRRGIGKATIDNLINASQQLGTTLWEILSDETSVNTLAGRSAKGVNHFAQMINRWQEQITTAPVTEIVMGILEDSGYVQDLQNQGTDESEDRIQNVQELYNAVLQFQEENEDVSLTAFLQSTALSSDLDNLKEGQTAVSLMTLHASKGLEFPVVFLVGLEQGLFPGYRSLNDPAALEEERRLCYVGITRAQERLYLSFARERRLYGSREPAMRSQFLDELPAELITTQYQVRQTYTKPPSTTNGKQTANQDWQVGDRVLHKSFGIGEITHVFGSGSKLSVAVKFTSLGQKIIDPRVAQLQKVD

SEQ ID NO: 44027 - DNA, 2184 bp, Pseudomonas fluorescens PfO-1
  CDS (1)..(2184): transl_table=11
atgcgcgatgatctctcccttctgctgaactccctcaacgatgcccaacgccaggccgtagcggctcccgttggtcgtcaattggtcctggccggtgccggctccggcaaaacccgagtgctggtgcaccgtatcgcctggttgatccaggtcgagaacgcctcgccccactcgattctgtcggtgaccttcaccaacaaggccgctgccgagatgcgtcaccgcatcgaacaattgctgggcatcaatccggccggcatgtgggtcggcaccttccacggcctggcgcaccgcctgctgcgggcgcactggcaggaagccgggctgagccagaccttccagattctcgacagcgacgaccagcaacgcttggtcaagcgggtgatccgcgagctggggctggacgagcaacgctggccggcccgtcaggcccaatggttcatcaacgggcagaaagacgaaggtctgcgtccgcaacacattcaagccagcggcgatctgttcctggccaccatgcgcggcatttatgaagcgtacgaggccgcatgccagcgtgccggcgtcatcgatttctccgaactgctgctgcgcgccctcgacctgtggcgcgaccacccgggcctgctggcgcactaccagaagcgcttccgacacattctggtggacgaattccaggacaccaacgccgtgcagtacgcctggttgcgtctgctgggcaagggcggcgacagcctgatggtggtcggcgacgacgaccagtcgatctacggctggcgcggcgcgaaaatcgagaacatccaccagtattcttcggacttcccggactcggtgaccatccgtctggagcagaactaccgctccacggccggcatcctcaaggccgccaacgccctgatcgccaacaacaccgggcgtctgggcaaagagctgtggaccgatggcggcgatggcgaagcgatcaatctttacgccgccttcaacgagcacgatgaagcacgctacgttgtcgaaaccatcgaaagcgcgctgaaaaccggcttggcccgcagcgatatcgcgattctctaccgctccaacgcccaatcgcgcgttctggaagaagccttgctgcgtgaacgcattccgtaccgcatctatggcggccagcgcttcttcgagcgggcggaaatcaagaacgccatggcttacctgcgtttgctggaaggtcgcggcaatgatgcggccctggagcgggtgatcaacgtcccagcgcgcggcatcggcgagaaaaccgtcgaagcgatccgcgaccatgcccgtcacagcgatgtgtcgatgtgggaagccatgggccagctggtggccaacaaaggcctgaccggtcgcgccgccggtgcgctgggcgcgtttatcgaactgatcgaaaacctggctgccaagtgcgccgagatgccgttgcacctgatgacccagaccgtcatcgagcaatccggactgatcgcctaccacgaagcggaaaaaggcgagaaaggccaggcccgggtggaaaaccttgaggaactggtcagcgctgcgcgcaacttcgagaacaccgaagaagacgaagaactgacgccactggcggcatttctcggccacgcttcactggaggccggtgacacccaggccgacgagcacgaagacagcattcagttgatgaccctgcacagcgccaagggcctggaattcccttacgtgttcctggtgggcatggaagaaggcttgttcccgcacaagatgagcctggaagagccgggacgccttgaggaagaacggcgcctggcctatgtcggcattacccgggcgatgcagaatctggtgatgacctatgctgaaacccgacgcctgtacggcagcgaaacctacaacaaggtgtcgcgtttcgtacgggaagtaccgaaaggcctgattcaggaagtacgcctgtccaacagcgtcagccggccgttcggcggtaaccagtcgatgggcggcagcaacctgttcagcggcagcgagattccggaaaccggcctgagccttggccaggctgtccgtcactcgatcttcggcgacggcgtgatcctcaacttcgaaggcgccggcgcccaggcccgggtgcaggtgaatttcgccgaaggcagcaagtggctgatgctcgggtacgcgaagctggaagccatataa

SEQ ID NO: 44028 - protein, 727 aa, Pseudomonas fluorescens PfO-1
MRDDLSLLLNSLNDAQRQAVAAPVGRQLVLAGAGSGKTRVLVHRIAWLIQVENASPHSILSVTFTNKAAAEMRHRIEQLLGINPAGMWVGTFHGLAHRLLRAHWQEAGLSQTFQILDSDDQQRLVKRVIRELGLDEQRWPARQAQWFINGQKDEGLRPQHIQASGDLFLATMRGIYEAYEAACQRAGVIDFSELLLRALDLWRDHPGLLAHYQKRFRHILVDEFQDTNAVQYAWLRLLGKGGDSLMVVGDDDQSIYGWRGAKIENIHQYSSDFPDSVTIRLEQNYRSTAGILKAANALIANNTGRLGKELWTDGGDGEAINLYAAFNEHDEARYVVETIESALKTGLARSDIAILYRSNAQSRVLEEALLRERIPYRIYGGQRFFERAEIKNAMAYLRLLEGRGNDAALERVINVPARGIGEKTVEAIRDHARHSDVSMWEAMGQLVANKGLTGRAAGALGAFIELIENLAAKCAEMPLHLMTQTVIEQSGLIAYHEAEKGEKGQARVENLEELVSAARNFENTEEDEELTPLAAFLGHASLEAGDTQADEHEDSIQLMTLHSAKGLEFPYVFLVGMEEGLFPHKMSLEEPGRLEEERRLAYVGITRAMQNLVMTYAETRRLYGSETYNKVSRFVREVPKGLIQEVRLSNSVSRPFGGNQSMGGSNLFSGSEIPETGLSLGQAVRHSIFGDGVILNFEGAGAQARVQVNFAEGSKWLMLGYAKLEAI

SEQ ID NO: 44029 - DNA, 2364 bp, Burkholderia sp. 383
  CDS (1)..(2364): transl_table=11
atgcccgacctgctcgccaatctgaaccccgaacaactcgccgccgtcacgttgccgaacgaaccggcgctgatccttgcaggggcgggcagcggcaagacccgcgtgctgatcacccgcatcgcgtggctgatcaagcagggctacgcatcgccgcccaccgtgctcgccgtgaccttcacgaacaaggccgcgcgcgagatgatggcgcgcctgtcggcgatgatgccgatcgacacgcgcgggatgtggatcggcacgttccacggcctgtgcaaccggatgctgcgcacgcactggcgtgacgccggcctgccgcagaccttccagatcctcgatacggccgaccagctgtccgcgatcaagcggctgatgaaggcggcgaacgtcgatgatgaaaagtacccgccgaagaacgtgcagtacttcatcaacaatgcgaaggagcaagggctgcgtcccgacaaggtcgacgcatccgacaacttcaaccgcaagttcgtcgagctgtaccaggcatacgaccagcagtgccagcgcgagggcgtcgtcgatttccccgaactgctgctgcgctgctacgaactgctcgcgtacaacgcgccgctgcgcgcgcactaccaggcgcgcttccggcacatcctcgtcgacgagttccaggacaccaacaagctgcagtatgcgtggctcaagatgctcgcgggcggcgagaacgcgatctttgcggtcggcgacgacgaccagtcgatctacgcgttccgcggcgcgaacgtcggcaacatgcgcgacttcgaagacgaattccgcgtgcgcaacctgatcaagctcgagcagaactaccggtcgcacggcaacattctcgacgcggcgaaccagctgatctcgaacaacgcgcaccgtctcggcaagaacctgcgtaccgacgccggccacggcgagcccgtgcgcgtgtacgaggcgagcaccgattcgcaggaagccggctggatcgtcgaggagatccgctcgctgatcaacaccgggatggcgcgtagcgaagtggccgtcctgtaccgcagcaacgcgcagtcgcgctcgatcgagcacacgctgatgtcgtccggcatcccgtaccgcgtgtacggcggcctgcgcttcttcgagcgccaggaagtgaagcacgcgctcgcgtacctgcgcctgatcgacaacccgaacgacgacaccgcgttcgtgcgcgtcgtgaacttcccgacccgcggcatcggcgcgcgctcgatcgagcagctggccgacgccgcgcgcctgtacggctgctcgatggccgccgcgattccgtacgtgacgggcaaggccggcacgagcctcggcgggttcgcgaacctggtcgcgaagatgcgcgccgatacgcagcacatgaacttgcccgacaccgtcgagcacatcgtgcgcgccagcggtctcgccgatttctaccagggcgagcgcgaaggccaggaccgtctcgagaacttgcaggaactggtcaacgcggccaccgcgttcatcgccgaggaaggctacgggctcgacacgccggcccgttcgatcccgctgcgcgcaggcgcaattgcggcgcccgagctcggcaccgcgacggacgatccggcggtcgacgtgctcgatccggtgtcgcctgccgacccggcacagaaccccgacacgatgacgccgctcgccggcttcctgtcgcatgcgtcgctggaggccggcgacaaccaggcgcaggccgggcaggacgccgtgcaactgatgacggtgcacgcggcgaaggggctcgaattctcggccgtgttcatcacgggcctcgaggaagggctgttcccgcatgagaacagcgtgctcgaatcggacggcctcgaggaagagcgccggctgatgtacgtcgcgatcacgcgcgcgaaggagcggctctacctgtcgttcgcgcagagccggatgctgcacggccagacgcgctacaacgtgcgctcgcgtttcttcgacgaactgcccgaacacgtgctcaagtggctgacgccgaaggtcgaggccggttcgcgctggggcggtcggtcggacaacgccgggtacgggcgcgactggttcgcgcggccgggtggcggcagtcgcgagcagatcgtcgatccggccgtatccgcgccgttgcccgcgttcgcgaacaagcagcgcgcggccgatgccggtttccgggtcggccagcaggtgttccacaccaagttcggcgaaggcacggtcaccgcgctcgagggcaacggcaccgatgcgaaggcgcaggtgaaattcaagcggcacggcgagaagtggctcgcgctggcggtcgcgaaactgcaggcggtggaatga

SEQ ID NO: 44030 - protein, 787 aa, Burkholderia sp. 383
MPDLLANLNPEQLAAVTLPNEPALILAGAGSGKTRVLITRIAWLIKQGYASPPTVLAVTFTNKAAREMMARLSAMMPIDTRGMWIGTFHGLCNRMLRTHWRDAGLPQTFQILDTADQLSAIKRLMKAANVDDEKYPPKNVQYFINNAKEQGLRPDKVDASDNFNRKFVELYQAYDQQCQREGVVDFPELLLRCYELLAYNAPLRAHYQARFRHILVDEFQDTNKLQYAWLKMLAGGENAIFAVGDDDQSIYAFRGANVGNMRDFEDEFRVRNLIKLEQNYRSHGNILDAANQLISNNAHRLGKNLRTDAGHGEPVRVYEASTDSQEAGWIVEEIRSLINTGMARSEVAVLYRSNAQSRSIEHTLMSSGIPYRVYGGLRFFERQEVKHALAYLRLIDNPNDDTAFVRVVNFPTRGIGARSIEQLADAARLYGCSMAAAIPYVTGKAGTSLGGFANLVAKMRADTQHMNLPDTVEHIVRASGLADFYQGEREGQDRLENLQELVNAATAFIAEEGYGLDTPARSIPLRAGAIAAPELGTATDDPAVDVLDPVSPADPAQNPDTMTPLAGFLSHASLEAGDNQAQAGQDAVQLMTVHAAKGLEFSAVFITGLEEGLFPHENSVLESDGLEEERRLMYVAITRAKERLYLSFAQSRMLHGQTRYNVRSRFFDELPEHVLKWLTPKVEAGSRWGGRSDNAGYGRDWFARPGGGSREQIVDPAVSAPLPAFANKQRAADAGFRVGQQVFHTKFGEGTVTALEGNGTDAKAQVKFKRHGEKWLALAVAKLQAVE

SEQ ID NO: 44031 - DNA, 2229 bp, Geobacter metallireducens GS-15
  CDS (1)..(2229): transl_table=11
atggaccttctgaaaaatctcaacccgccccagaaggaggcggttctccacggcgaggggccgctcctggttctggccggagccggatccggcaagacccgggtcatcgtccaccgtatcgctcacctgatctgcaacctcggcgtccccccgtggcagattctggcggttaccttcaccaacaaggccgccggcgagatgcgggagcgggtggagcggctcgtgggagccggcgaggctcccctcatcgccaccttccactccacctgcgcccggttcctgcgccgcgatatccaccacctggggtatgactcctccttcgctatctacgacgacaaggacgcggaaaagcttctgaaggaggtgatcgccggcctcggcctggacgagaaacgcttcccggcccgctcctttgccgccgccatcgacgactgcaagaaccggggcatcccccccggggagatccccaccggcgactacaccggcgagatgctggcccgggtctacggcgcctaccaggagcggctgaagaagtgcaacgccctggacttcggcgatctcctcatgctgacggtccgtctcttagaagagcaccccgaggtgctggcccgctaccgggacaaatatcgctggatccttgtggacgagtatcaggatacgaacccgattcagtaccggctcgtgcggcttctggccggggagcggcgcaacctctgcgtggtgggggacgatgaccagtcaatctatcggtggcggggggccgacatccggaacatcctcgacttcgagaaggattttcccggcgtggtcacagttaagctggagcagaactaccgttccacccaaaacatcctggccgcggccggggccgtggtggccaaaaaccgcggccgcaaggccaagaccctctggagcgagaacccggccggcgaggccattgtctaccggcgcctctccgacgagcgggaggaggcccgcttcgtctgccgggaggtggagaagcatgtgcggcgcggcggggatctgcgggacgtggcggtcttctaccggaccaacgcccagtcccgggtcatcgaggacgccatggtggccgacgggattccctaccacatggtgggggggatgcggttctacgagcggatggaggtaaaggacatcctcgcctacctgaaggtcctcgtgaaccccgccgacgaggtgtccctcaagcggatcatcaacgtcccggcccggggtatcggccacgccaccgtggacaaggtggcggagctggcattccgcaaggggatcattctctacgacgccttcagcgaggcgtccaccagcggactcctctccaccggcccccgggggaaaatcgccggcttcatggcactcatggagcagtttgccggcctcgccggcacggtacccctgtcggagctcgcctcccgcatcatcgacgggaccggctacgccgccaaactgaaggaagagcggagcgacgaggcccaggaccgcctcgacaacctccaggaactctgttccgccatggaggagttcgagcgaacgagcgacgagaagaccctggccgccttcctggagcaggtggccctcgtgtcggatctggagcggggcgaggggaagcgggaatcggccaccctcatgaccctccacgcggccaaggggctcgaattcccagtggtattcatgatcggaatggaggagaagcttttcccacacgtccgctccctggacgaccccgaggccatggaggaggagcggcgcctctgctacgtggggatgacccgggcgagggagcggctgatcctcaccaacgcccgccgccggcgactcttcggccaggaccaggtgaacatgtcgtcccgcttcatcgccgacgttccccgggatctcctggatctggaagacgagtaccagtcctccttcggcttcggcgcaggacgggggctggagcgggagacaacagccgccgaaccgacgcgccacaacctggcgagcatcttcgaaacggagatcgagcccgatttcgacgacatcgaggtgatccccgacgagcccgaggacggcggcatctggctcggcatgaaggtgcgccacggcaagttcggcgtcggcgtcatccgcaagatcgaggggaagggggacgaccagaaggtgatcgtctggttcaactccgtggggccgaagaagctgttggtgcggtttgcagggttggagcgggtttga

SEQ ID NO: 44032 - protein, 742 aa, Geobacter metallireducens GS-15
MDLLKNLNPPQKEAVLHGEGPLLVLAGAGSGKTRVIVHRIAHLICNLGVPPWQILAVTFTNKAAGEMRERVERLVGAGEAPLIATFHSTCARFLRRDIHHLGYDSSFAIYDDKDAEKLLKEVIAGLGLDEKRFPARSFAAAIDDCKNRGIPPGEIPTGDYTGEMLARVYGAYQERLKKCNALDFGDLLMLTVRLLEEHPEVLARYRDKYRWILVDEYQDTNPIQYRLVRLLAGERRNLCVVGDDDQSIYRWRGADIRNILDFEKDFPGVVTVKLEQNYRSTQNILAAAGAVVAKNRGRKAKTLWSENPAGEAIVYRRLSDEREEARFVCREVEKHVRRGGDLRDVAVFYRTNAQSRVIEDAMVADGIPYHMVGGMRFYERMEVKDILAYLKVLVNPADEVSLKRIINVPARGIGHATVDKVAELAFRKGIILYDAFSEASTSGLLSTGPRGKIAGFMALMEQFAGLAGTVPLSELASRIIDGTGYAAKLKEERSDEAQDRLDNLQELCSAMEEFERTSDEKTLAAFLEQVALVSDLERGEGKRESATLMTLHAAKGLEFPVVFMIGMEEKLFPHVRSLDDPEAMEEERRLCYVGMTRARERLILTNARRRRLFGQDQVNMSSRFIADVPRDLLDLEDEYQSSFGFGAGRGLERETTAAEPTRHNLASIFETEIEPDFDDIEVIPDEPEDGGIWLGMKVRHGKFGVGVIRKIEGKGDDQKVIVWFNSVGPKKLLVRFAGLERV

SEQ ID NO: 44033 - DNA, 2160 bp, Desulfovibrio desulfuricans G20
  CDS (1)..(2160): transl_table=11
atgattgattataaaaaagaactgaacgcggctcagtacgaagccgccaccaccctcgaaggccccatgctggtcatagccggagcaggcagcggtaaaacccgcacagtggtgtaccggctggcaaacatggtgcagcagggcattgccgcgtccaatattcttctgcttacgttcacccgcaaggccgcacaggaaatgcagcacagagcggcccagctgctgggccagtccgcgggcatggtgggcggagtgcagggaggtacgttccatgcctttgcctattccattttgcgcatgcacaaaccgcaggggtacgaaggcgatctgtccgtcatggattccgccgatgccgccggtgcgctgaaacactgcaaggatacgctgggactgggcaaaggggaccggagttttcccaaaacgcagaccgtcatggggctgctgtccaaagcgcgcaacaaggaactgacggtggaggatgtcctgcggcgcgaagcctttcacctggcatcctacgcgggcgatcttacgcgcatcagcgacacctacagggcgttcaagcgcagacatgcgcttatggattatgatgacctgctgtttgagctggaaaggctgctgcagtccgatgccgacctgctggcgtactaccgcgaccggttcagatatatcatggtggacgaatttcaggacaccaacctggtacaggcgcggttggtgcgtttgctgggcagcggccacaacaacgtgatggctgtgggcgacgacgcgcagtccatctacgcgttccgcggtgccaatgtgcagaatattcttgattttcctgacatgtttcccggaacgcgtatcatcaagctggaagagaattaccgttcggtacagcctgtgcttgatctgaccaacgccattctggacgatgcgccgcaggcgttccgcaaaaagctgttcacccggcgcgaaggaggtcctacccctcatgtgctgcgcccgctttcagacctgactcaggcgtccatggtcacatcaaaaataaccgagctgctgcgtacatacccaccggatgaaatcgccgtgctgttccgcgccggataccagtcctaccatgtggagatgcagctgggaaagctgggcgtcaagttcaagaagtacggcggggttcgttattctgacgccgctcatgtcaaggacgttctttcctacatacggctggtggtcaacccgctggatctgccggcgtttcagcggatggcttcgctggtaaagggcataggggcaaaaacctgcctgaagctgtacgatgcggcccagaaagcggacagaagtgttttgaaaaaggcctgtgcacggtttcccgacctgcagcacgatctggacatgctggatgcactgcgggcaaagccgcttactccggccggtctgacgcaggccgttattgagcattaccagccgcggctcgaagccaactatcctgacgactacccccgcagacagcacgggctggaacagcttgtccagattgcggcatcgtacaacgatgtggatctgatgctttcggacctgtgtctggaggaccccgcaacggacaaaggtgaagacatcagcgcggtcacgttgtccaccgtgcattccgccaaggggctggaatggtcggcggtgctgctcattgatctggtggaagaccgttttccctcgcgccatgccctgaacaaggcagaggactttgaggaagagcggcggcttatgtatgtggcgtgcacgcgggcccgtgattatctggcgctgtttgtgcctgccaccatctacgaccgcagcggaggcggcaatacaccggccaatcccagcccctttgtgcgtgacctgcccgcccatctttatgaagactggcgcgaaaactttaccggcacgcttacccgcaggcaggatgcccgtccggttactgtttctgccgcgcgcacgtccggccctgcgtccggcggtggccggcaggcggaacagggcggcggcgcgctgggcaacggcggcagaccggcttcggggtattgcacgcacaagattttcggcaggggcaaaattattcagcatgtgccgcccgacaagtaccgcgtcaattttccgggattcggtctcaaggtcattatggcccagtatcttactctggaatga

SEQ ID NO: 44034 - protein, 719 aa, Desulfovibrio desulfuricans G20
MIDYKKELNAAQYEAATTLEGPMLVIAGAGSGKTRTVVYRLANMVQQGIAASNILLLTFTRKAAQEMQHRAAQLLGQSAGMVGGVQGGTFHAFAYSILRMHKPQGYEGDLSVMDSADAAGALKHCKDTLGLGKGDRSFPKTQTVMGLLSKARNKELTVEDVLRREAFHLASYAGDLTRISDTYRAFKRRHALMDYDDLLFELERLLQSDADLLAYYRDRFRYIMVDEFQDTNLVQARLVRLLGSGHNNVMAVGDDAQSIYAFRGANVQNILDFPDMFPGTRIIKLEENYRSVQPVLDLTNAILDDAPQAFRKKLFTRREGGPTPHVLRPLSDLTQASMVTSKITELLRTYPPDEIAVLFRAGYQSYHVEMQLGKLGVKFKKYGGVRYSDAAHVKDVLSYIRLVVNPLDLPAFQRMASLVKGIGAKTCLKLYDAAQKADRSVLKKACARFPDLQHDLDMLDALRAKPLTPAGLTQAVIEHYQPRLEANYPDDYPRRQHGLEQLVQIAASYNDVDLMLSDLCLEDPATDKGEDISAVTLSTVHSAKGLEWSAVLLIDLVEDRFPSRHALNKAEDFEEERRLMYVACTRARDYLALFVPATIYDRSGGGNTPANPSPFVRDLPAHLYEDWRENFTGTLTRRQDARPVTVSAARTSGPASGGGRQAEQGGGALGNGGRPASGYCTHKIFGRGKIIQHVPPDKYRVNFPGFGLKVIMAQYLTLE

SEQ ID NO: 44035 - DNA, 2385 bp, Synechococcus elongatus PCC 7942
  CDS (1)..(2385): transl_table=11
atgtccagcgactttctaagccagctcaatacctcccaacgtcgagccgtcgaacactacagcgggccgctgttggtggttgctggtgctggttctggcaaaacgcgggcactcacctttcggattgcccatctgctgcgacagcatcgggtcgatccagaaaacattttggcggtgaccttcaccaataaagcggcgaaggaaatgaaggagcggctggagcgcttatttgctcagcaactggcggagttgcagtacggccagcccttcacgacactgcgagaaatagaaaaaactcaactgcgatcgcgtgtctatcgcgaagttaccaaggatttgtggattggcactttccacgcaatttgtgcacggattcttcgctttgatatcgacaagtattgcgatcccaatggccgccgttggacaaagcagttctccatctttgatgaaaatgatgtccaaggcttaatcaaagagattgttggcaatcagctcaatttagataccaagaagtttgagccaaaatctgttcgctacacaatcagctcggctaagaacaatggttggtcacccgatgaatttgagcgccagcagccgaactatcggggccgcgtgatcggtgaggtctatcggcgttatttagatcaactagcggcaaataatgctcttgatttcgatgacttgttgctgattccagtgcaactcttccggcaaaacgaacaggttttggcctattggcatcagcgctttcgccatgttttggttgatgagtatcaggatacaaaccgcactcagtacgatttgattcggctgctgacaacgaatggtgctgaaacgcgagattttgatcagtggaatcatcgctcagtctttgtcgtaggcgatgctgatcagtcaatctattctttccgagccgcagacttcaccattctgatgggctttcaggatgattttggcgatcgtctgccggatgatgacactcgcacgatggtcaagctggaagaaaattatcgttcgactgaaaacattcttcaggctgccaatgagctaattcgtaacaacactgagcgcatcgataaggttttgcgccccacccgaggtagtggcgaagcgatcgcctgctatcgggctgacgatgaaatggccgaagcggagtatgttgttcaacaaattcgccagcttgagcaacagcatcctgagttgaattggggcgattttgcaattctctaccgcactaacgctcaatcgcgagcctttgaagattctctcgttcgctggaatgttccctacaccgtcattggtggcttgcggttctatgatcgccgcgaagtcaaagatatcttggcctatctgcgggcgatcgccaatcccttcgatgcggttagcttactacgggtggtgaacgttcctaaacgcggcgtgggcaaaaccacgattggccgattggttgatgctgcgcaagagctaaatgtacccctttgggaaatcctgagtgattccgaaacggtgcaaaacctggcggggcgatcggcgaaaggcatcctagagtttgctaatttagttcagcattttcaagatcaagcagatgaattacgcccctccgaattgattcgccagctcttagaagcatctggttatattgctgaattacaacgcagcggcactgatgaagacgaggaccgtcgtcggaacttggaagagttggtgaatgcagctgttcaacatgaggaggagaatgatgaccctagcctgattggctttttgggaacagcttcactagcctcagatgcagataacaaagaagcgaaccagcaagtctcattaatgactttgcatgcttcaaaaggccttgagtttccggttgtttttctagttggactagaacagggcctcttccccagtttccgatcgctcgacgatccgcgcgccgttgaagaagaacgacgcctctgctacgtcggcatcacacgcgcccaagagcgactgttcttgacccatgccagtgctcgtcgtctgtggggtggaggtcgagagcccgccattccctccaatttcctgagtgaactaccggcagaactgatcgtgggtcactcaccacagacccgtcgtcagacccaagcaaacttcaagccaccggttacccatgagcgccgcgccagcctgcgcgatcgcgtggccgcgaatgcagccaaagtgcaacaagttcagcaaccggcccgccattggcaagtcggcgatcgccttcagcatcgtcagtttggcgttggacgcatcacccgaattttcggtgcgggcgatcgccaatcgattgtggtccagttcagcggcgcgacaggtcagcgcatcctcgatccacgcctagcaccgattgaacccctcggttga

SEQ ID NO: 44036 - protein, 794 aa, Synechococcus elongatus PCC 7942
MSSDFLSQLNTSQRRAVEHYSGPLLVVAGAGSGKTRALTFRIAHLLRQHRVDPENILAVTFTNKAAKEMKERLERLFAQQLAELQYGQPFTTLREIEKTQLRSRVYREVTKDLWIGTFHAICARILRFDIDKYCDPNGRRWTKQFSIFDENDVQGLIKEIVGNQLNLDTKKFEPKSVRYTISSAKNNGWSPDEFERQQPNYRGRVIGEVYRRYLDQLAANNALDFDDLLLIPVQLFRQNEQVLAYWHQRFRHVLVDEYQDTNRTQYDLIRLLTTNGAETRDFDQWNHRSVFVVGDADQSIYSFRAADFTILMGFQDDFGDRLPDDDTRTMVKLEENYRSTENILQAANELIRNNTERIDKVLRPTRGSGEAIACYRADDEMAEAEYVVQQIRQLEQQHPELNWGDFAILYRTNAQSRAFEDSLVRWNVPYTVIGGLRFYDRREVKDILAYLRAIANPFDAVSLLRVVNVPKRGVGKTTIGRLVDAAQELNVPLWEILSDSETVQNLAGRSAKGILEFANLVQHFQDQADELRPSELIRQLLEASGYIAELQRSGTDEDEDRRRNLEELVNAAVQHEEENDDPSLIGFLGTASLASDADNKEANQQVSLMTLHASKGLEFPVVFLVGLEQGLFPSFRSLDDPRAVEEERRLCYVGITRAQERLFLTHASARRLWGGGREPAIPSNFLSELPAELIVGHSPQTRRQTQANFKPPVTHERRASLRDRVAANAAKVQQVQQPARHWQVGDRLQHRQFGVGRITRIFGAGDRQSIVVQFSGATGQRILDPRLAPIEPLG

SEQ ID NO: 44037 - DNA, 2307 bp, Rhodospirillum rubrum ATCC 11170
  CDS (1)..(2307): transl_table=11
atggacgatcccttcgagcttgacgagccgtcgcctcccgccccccgtttccagggagccgagccgccgtggcttgccggccttaatcccgagcagcgcgctgccgtcaccaccaccgatggcccggtgctggtgctgtcgggggcggggaccggcaagacccgggtgctgacggcccgcctcgcccagatcctggccacccggccggtgcggccctggcaggtgctggcggtgaccttcaccaaccgcgccgcccgcgagatgcgcgagcgcgccggggcgatgatcggccccatggccgaacaggtgtggcttggcactttccatgccctgggcgtgcgcatgctgcgccgtcacggcgatttggtcggcttgcgctcgggtttcaccattcttgatgccgacgatcaactgcgcctgctcaagcagatcctggaagccgaggggatcgataccaagaaatggacgccccaggcggggatggggctgatccagcgctggaaggacaaggggctgctgcccgaggcggttcccgccggcgacggcgggcgggagtatgcgggcggacgggcggttgatctgtacaagcagtatcaacaacggctggcggtggtgaacgccgccgatttcggcgatctgctgctgcactgcctgaccatcttcaccaagcatcccgatgttctggccgattattccaagatgtttcactacatcctggtcgatgagtatcaagataccaacgtcgcccaatacctgtggctgcgcctgctggcgcgcggccatggcaatatctgctgcgttggcgatgacgatcagtcgatctattcctggcgcggcgccgaggttggcaacatcttgcgcttcgaggccgatttccccggggcgacggtggtgcgcctggaacgcaattatcgctcgacgccgaccattctggccgccgccagcggcctgatccgccataacaaggggcggctgggcaaggatctgcgggcgggggagggcgacgaggccggcgacgcggtgatcgtgcgcgggctgtgggatggcgaggaggaggcgcgccgggtcgtcgatgacatcgagacccgccaacgcgccggcgatcgcctgaacggcatggcggtgctggtgcgtgccggctttcagacccgcgccttcgaagagcggttgatcctggccggcgtcccctatcgggtggtcggcggcgcgcgtttctacgagcgccaggaaatccgcgacgccatcgcctatctgcgtctggtcgcccaacccgacgacagcctggccttcgagcgcattatcaatctgccgcgccgcggccttggcgatgccagtctgcagacgctgatgcgggcatcgcggatggcctcgatcagcctgatgcgcgccgcccgcgaggcgatcgagaccgacgagttgcggccccaggcccgcaaggccttgcgcgctttcctcgacgacatggggcgctggcggtccctggccgatgccatggcgcccgacgaactctgcgggacggtgcttgatgaaagcggctatctggagatgtggcgcaaggataaatcgcccgatgcccaaggccgggtggaaaacctcaaggaactggtttcggcgctgaaggaattcgaaagcctgggcgccttcctggagcatgtgtcgctggtcatggacaacgaggcccgcgccaccgaggacgcggtgaccctgatgacgctgcatgcggccaagggcctggaattcgatacggtcttcctgcccggctgggaggaggagattttcccccaccgccgcgccctcgacgaaaacggcgccgaggccctggaggaggagcggcgcttggcctatgtcgggctgacccgggcgcgcaaacgggcgatcatcagcttcgtcgccaaccgccgggtctataacgaatggcgggcctgcctgcccagccgcttcatcgacgaactgccgcctgaggtggtcgaacgcgacagcgccagcggcgtttacggctcgggcgctcaaggctatgccgacgcgcccggcggctgggggcggctgggcggtccgggaagctggggcggtggctggggcaacgccgcgccggcccgcgtgccggcggcgggcgacaccccgtggcaaacccgcgaccgcagcggcgacgaccagccgagccttcgccccggggaccgggtgttccacgataaattcggtgggggaaccgttctggccgccgatcagggccggctggagatcgatttcgataaggctggcatcaagaaggtgatggggggattcgtccgcaaagccgagggcacgtaa

SEQ ID NO: 44038 - protein, 768 aa, Rhodospirillum rubrum ATCC 11170
MDDPFELDEPSPPAPRFQGAEPPWLAGLNPEQRAAVTTTDGPVLVLSGAGTGKTRVLTARLAQILATRPVRPWQVLAVTFTNRAAREMRERAGAMIGPMAEQVWLGTFHALGVRMLRRHGDLVGLRSGFTILDADDQLRLLKQILEAEGIDTKKWTPQAGMGLIQRWKDKGLLPEAVPAGDGGREYAGGRAVDLYKQYQQRLAVVNAADFGDLLLHCLTIFTKHPDVLADYSKMFHYILVDEYQDTNVAQYLWLRLLARGHGNICCVGDDDQSIYSWRGAEVGNILRFEADFPGATVVRLERNYRSTPTILAAASGLIRHNKGRLGKDLRAGEGDEAGDAVIVRGLWDGEEEARRVVDDIETRQRAGDRLNGMAVLVRAGFQTRAFEERLILAGVPYRVVGGARFYERQEIRDAIAYLRLVAQPDDSLAFERIINLPRRGLGDASLQTLMRASRMASISLMRAAREAIETDELRPQARKALRAFLDDMGRWRSLADAMAPDELCGTVLDESGYLEMWRKDKSPDAQGRVENLKELVSALKEFESLGAFLEHVSLVMDNEARATEDAVTLMTLHAAKGLEFDTVFLPGWEEEIFPHRRALDENGAEALEEERRLAYVGLTRARKRAIISFVANRRVYNEWRACLPSRFIDELPPEVVERDSASGVYGSGAQGYADAPGGWGRLGGPGSWGGGWGNAAPARVPAAGDTPWQTRDRSGDDQPSLRPGDRVFHDKFGGGTVLAADQGRLEIDFDKAGIKKVMGGFVRKAEGT

SEQ ID NO: 44039 - DNA, 1974 bp, Syntrophus aciditrophicus SB
  CDS (1)..(1974): transl_table=11
atgatcgattatgagaaggaactgaacgaagagcagtgtcacgttgtgctggaagcgggagggcccatgctggttcttgccggcgcggggagcggaaaaacccggacgctgacctatcgggtggcgcgcctggttgagaccgggatcaaacccgagcggattttgctggccacgttcactaacaaggctgcccgttccatgctcaaccgggtccgggaactcgttcctgtggatctcagccgcctctccggcggaacctttcatcacaacggtcatttcatgttgcgggctcacgccgaaaggctgggctatacacggagcttttccatactcgatacggaagacgcccggcagttgatctcgacctgcgttgtcgaggcgggcatcgatacgaaaggggcgacctttcccaaggccaatgttctttatgggatattgagccttgccgtgaatacagcggccgatctttccacgaccgtagcggaacgctatccttttttcagccatcgtcttgaggatatccgaaaagtcgccgctctttatgatctgcgcaagcgtcagtccgatttcatggattttgacgacctgctcctcaactggcgtcgcctgctgctggaatgtcccgatgtcctgcaacattacgctgaacgctttgaacacattctcgtggatgaatatcaggacacgaatcgcatccaggcggaaatcatggatctgctggcatcacgacaccgcaacatcatggtcgtaggggatgactcccagagcatttacgccttccgcggggccaactttgccaacatcatgtctttcccggaaaaatatccggactgccggattttcaaactggagaccaattaccgcagcaccccggaaattctccatctggcaaatctcagcattgaaaacaatgaaaatcagtttgccaagtctctgcgggccgtccgggaagcgggtctgagaccggtggtcgtccctgcccggaatgccctgcaacaggccgaatttgttgcccagcggatactggagcttcacagagacggcattcctctgcacgaaatggcgattctgtaccgggcccattttcacgccatggatgttcagatggagttgacacggcggggaatcccctatgaaatccgttcgggaatccgctttttcgaacaggcccacatcaaggatgtaaccgcttatctgagaattctggggaatccgctggatgaactggcatggaaacggatttttgggctgtgtccgaagatcgggaaaaaaactgccgagaaactctggcaatttctttcggaatcgggagaaccgctggaagctgctttaagggaagattttctgaaggtggtttcgaagacggccagaggcggactcgctttttttcaggaagtattgatcaagctgcgggaggaggctgttcatgcttcgacgctgccggatctcatcagcctgattattgagagaggatatcgaaagtatctgcgggaaacgtataccgatacggcctcacgggaagaagatctcgaacagctcgcggaattttccggcaagttttcctctctggaggactttttgagtgaattgtccctcatgaccaacatggacgccgacggacgggacaaggcagccggcgatgacctccaggaaaacaaggtcattttgagcaccgttcatcaggcaaaggggttggaatggtccgttgtcctgctcgtcggatgcgctgaaggcatgattcccctggaacgggcggttcaggaagccggcggcgaagaagaagagaggagacttttttatgtggccgccacccgggccaaggattacctctacctctgctatccccagacggattattcaagatgggccgggtttgccaatctcagcccatcccggttcattcgagaactggttccctcctcccgaaaaaaagaactgcccttcgaacactgggttgtcgaagagcagtggtga

SEQ ID NO: 44040 - protein, 657 aa, Syntrophus aciditrophicus SB
MIDYEKELNEEQCHVVLEAGGPMLVLAGAGSGKTRTLTYRVARLVETGIKPERILLATFTNKAARSMLNRVRELVPVDLSRLSGGTFHHNGHFMLRAHAERLGYTRSFSILDTEDARQLISTCVVEAGIDTKGATFPKANVLYGILSLAVNTAADLSTTVAERYPFFSHRLEDIRKVAALYDLRKRQSDFMDFDDLLLNWRRLLLECPDVLQHYAERFEHILVDEYQDTNRIQAEIMDLLASRHRNIMVVGDDSQSIYAFRGANFANIMSFPEKYPDCRIFKLETNYRSTPEILHLANLSIENNENQFAKSLRAVREAGLRPVVVPARNALQQAEFVAQRILELHRDGIPLHEMAILYRAHFHAMDVQMELTRRGIPYEIRSGIRFFEQAHIKDVTAYLRILGNPLDELAWKRIFGLCPKIGKKTAEKLWQFLSESGEPLEAALREDFLKVVSKTARGGLAFFQEVLIKLREEAVHASTLPDLISLIIERGYRKYLRETYTDTASREEDLEQLAEFSGKFSSLEDFLSELSLMTNMDADGRDKAAGDDLQENKVILSTVHQAKGLEWSVVLLVGCAEGMIPLERAVQEAGGEEEERRLFYVAATRAKDYLYLCYPQTDYSRWAGFANLSPSRFIRELVPSSRKKELPFEHWVVEEQW

SEQ ID NO: 44041 - DNA, 2298 bp, Novosphingobium aromaticivorans DSM 12444
  CDS (1)..(2298): transl_table=11
atgtcctcccctgtccccgcgaatccgcacgccagcaatgcctggctcgatggcctgaacccgccccagcgcgaggccgtgacgacgaccgaggggccggtgctgatgctggccggcgcgggcaccggaaagaccgccgccctgaccgcacgccttgccaacctgctgcgccagcggctggcctggccgagcgagatcctgtgcgtgacctttaccaacaaggccgcgcgcgaaatgcgcgagcgcgtggggaacctgatcggaccggcggtggaaggcatgccttggctgggcacattccatgccatcgcggcgaagatgctgcgccgccatgccgaactggtcggactgcaatcgaacttcacgatcatcgacaccgacgaccagcttcggctgctcaagcagcttgtcgtggcggaaggcattgacgaaaagcgctggcccgcgcgccagctcgccgggctgatcgacaagtggaagaaccgggggctcaaccctgccgacctcgatgcgctggaaaacgaggcctatgccaacggcaagggccagcggttctatgcactctaccagaatcgcctgcgcgaactgaatgcctgcgatttcggcgacctgctgatgcacatgctcaacatcttccggcgcgaacgcgaggtgctggaaatgtggcagcagcgcttcaagtacgtgatggtggacgaataccaggacaccaacgcggtgcagtacctgtggctgcggctgctggcgcagaaccgcaagaacatctgcgtggtgggtgacgacgaccagtccatctattcctggcgcggcgcggaagtggccaacatactgcgcttcgaaaaggattttcccggcgcgaaggtgatccggctggagcagaactaccggtctaccccgcatatcctgggtgctgcatcggggctgatcgcggagaattccgagcggctcggcaagacattgtggaccgaggtcgacggcggcgacaaggtgcgcgtgatcggcgtgtgggacgcgccggaggaagcgcggcggatcggcgacgagatcgaacggctggagcgcgagggcgcgccgctcgaccgtgtggcgatactggtgcgcgcgcagttccagacgcggacgatcgaagacaggttcatccagatcgggctgggctatcgcatcgtcggcggtttccggttctacgagcgcgcggagatccgcgatgcgctcgcctacctgcggatcatcgcaagcccgcaggacgacctcgccttcgagcggatctacaatacgcccaagcgcgggcttggcgacaagacgctggagaagctgcaccgccacgcacgggcgcggagcattccgctgtcgctggcatcggtcgagatcctcgacaccgacgagcttccggcgcgggcgcggggcacgctggcagcactgatgcgcgacttcggccggtggcgcgatgcgtcgaagtcgctcgtcccggcggaactggcgcgcacgatcctcgacgaaagcggctataccgccgcccttcaggcggagaagaccgcggaggccgccggacgccttgaaaaccttaccgaacttgcccgcgcgatggaggaatacgagacgctgggggacttcctcgagcatgtcagcctggtgatggacaacgaggccgtggccgacgaggaaaaggtcacgatcatgaccatccacgcggccaaggggctggaattcgacaacgtgttcctgcccggatgggaggaaggcgtgtttccttcgcaacgctcgctcgacgaaggcggcctggcctcgctggaagaagagcgccgccttgcctatgtggcgatcacccgcgctcggcggcattgcaccatccttcacgccgccaatcgccagatctatggccagtggaccagttcgatcccctcgcgcttcatcggcgaactgcctgcggagcacatcgaggaagagaccacgctatcgggcggcgcatcgatgtggcgggcgaactggagcgaacgcgaagatcccttcgcccatgtcgcgcaggcaacgccgtcgcgcggagcctcgcgcgggccgggctggcagcgcgccgccgcgcagccctacaacccgcagccgcgccggatcgccgaaaccacccgcagcgcggcgagctttgccgccaagccgcgcagcgacatcagcgtgggcgcgcgcgtcttccacgagaagttcggctacggcaccgtggccgagcaggaaggcaacaagctggagatcgatttcgaaagcgcggggcggaagcgcgtgatcgacagcttcgtgaagctcgctggctag

SEQ ID NO: 44042 - protein, 765 aa, Novosphingobium aromaticivorans DSM 12444
MSSPVPANPHASNAWLDGLNPPQREAVTTTEGPVLMLAGAGTGKTAALTARLANLLRQRLAWPSEILCVTFTNKAAREMRERVGNLIGPAVEGMPWLGTFHAIAAKMLRRHAELVGLQSNFTIIDTDDQLRLLKQLVVAEGIDEKRWPARQLAGLIDKWKNRGLNPADLDALENEAYANGKGQRFYALYQNRLRELNACDFGDLLMHMLNIFRREREVLEMWQQRFKYVMVDEYQDTNAVQYLWLRLLAQNRKNICVVGDDDQSIYSWRGAEVANILRFEKDFPGAKVIRLEQNYRSTPHILGAASGLIAENSERLGKTLWTEVDGGDKVRVIGVWDAPEEARRIGDEIERLEREGAPLDRVAILVRAQFQTRTIEDRFIQIGLGYRIVGGFRFYERAEIRDALAYLRIIASPQDDLAFERIYNTPKRGLGDKTLEKLHRHARARSIPLSLASVEILDTDELPARARGTLAALMRDFGRWRDASKSLVPAELARTILDESGYTAALQAEKTAEAAGRLENLTELARAMEEYETLGDFLEHVSLVMDNEAVADEEKVTIMTIHAAKGLEFDNVFLPGWEEGVFPSQRSLDEGGLASLEEERRLAYVAITRARRHCTILHAANRQIYGQWTSSIPSRFIGELPAEHIEEETTLSGGASMWRANWSEREDPFAHVAQATPSRGASRGPGWQRAAAQPYNPQPRRIAETTRSAASFAAKPRSDISVGARVFHEKFGYGTVAEQEGNKLEIDFESAGRKRVIDSFVKLAG

SEQ ID NO: 44043 - DNA, 1893 bp, Neorickettsia sennetsu str. Miyayama
  CDS (1)..(1893): transl_table=11
atgtggtacgatctggaccaccttgcgcaatcaacaattatgaacctgaacgatgagcaaagacttgctgtggaaactgtaaacggtcctgtcttgatacttgctggtgcgggaacaggtaaaacaaaaacgttagtgcatagaatagcccacctgattaggtcagggtatgcgcatccaaatcaaattatggctgtgaccttcgcaaataaggctgcaaatgaaatgattcagcgtgttaatgagattgtaggggaaatgaaatttcactggattggaacatttcacgcagcagcagcaaagatcctaagaattgaagcagagaaacttggctttaaaccggacttcacaatattagatgtagacgaccaagtcagaatgcttcagaaagtcgctcaagaaaaaaaaatcgaagcagataaagccctacttaaaaagtacttaagcgtgatctctgcatggaaagataaagccttcacgccaagtagagtaaggttcaataatgctgcaaatacatggttcgagaaacaagcactctctgtgtatgatacttaccaaaaaaaactcaaggagaacaatagcatggacttcggagatttgctcatgcacaacgttactctgtttaacaaggacgcagaaaccttggaaaaatacaaagagaaatttagatacatcatggtagatgagtaccaagatacgaatttatgtcaatacctatggttgaggctattagcgcagaagcactcaaacatctgctgcgttggggacgatgatcaatcaatctatgggtggcgtggtgcagaggtagggaacatcttgaggtttgcaaaagattttgaaggagcaaaagtcatcaagctggaacaaaattatcgctcgacgaacaaaatactcactgccgcacacaatatcataaaaaataatcagtccagactcacaaagaagctgtggacagcataccctggcggcgaggaaatacaaattttcacctacatggatagtgaacaggaggcaagagctatcatcagaatgataaaggaaagaaaattattgtgtcgctacagcgatacggccatccttgttagggcaggctttcagacgagagccttcgaggaagcagctattcacgaaaacgtcccctaccgcgtcgttggaggacttaaattctatgagagaaaagaaataagagacattattgcttacttaaggctcgttgtgaatccaaatgacaatttggcctttgaaagaataataaacacaccaaaaaggggcctcggacaggcatcactgaacaagatatataactactcacttgaagaagggtgctcgatgtttgaagcagtcagaaaacttgaggaaaacgaaaaacttaaaagcacagcgcttctgacatttgtaaaacaagttagaaaatggcaggaagaatctctcaatcacagtttgcatgacttgctgaaaaagatcacactggaatccggatatatatcagcgttaaaagagcaagacgagacaagaattgaaaacgttgatgagcttttcagagtgatccaagaattcgatgatgctactgatttcctacaacacgtatcacttttgacagagagtgacgcacaaataaataacagtgatgctgtcaacatgatgacactgcacgcttctaaaggactagaatttgagcaagtattcctcccaggttgggaggatggaacattcccacatgtaaggtctctttgtagtactgaacaaattgaggaggaacgtcgtttagcgtatgttggaataacaagagcaaaaaggtttttaacaataacaagtgctcatagaagattaataagaaattcttggcaaaatactgtaaaatcgagattcatgttggagttagcagagaaataa

SEQ ID NO: 44044 - protein, 630 aa, Neorickettsia sennetsu str. Miyayama
MWYDLDHLAQSTIMNLNDEQRLAVETVNGPVLILAGAGTGKTKTLVHRIAHLIRSGYAHPNQIMAVTFANKAANEMIQRVNEIVGEMKFHWIGTFHAAAAKILRIEAEKLGFKPDFTILDVDDQVRMLQKVAQEKKIEADKALLKKYLSVISAWKDKAFTPSRVRFNNAANTWFEKQALSVYDTYQKKLKENNSMDFGDLLMHNVTLFNKDAETLEKYKEKFRYIMVDEYQDTNLCQYLWLRLLAQKHSNICCVGDDDQSIYGWRGAEVGNILRFAKDFEGAKVIKLEQNYRSTNKILTAAHNIIKNNQSRLTKKLWTAYPGGEEIQIFTYMDSEQEARAIIRMIKERKLLCRYSDTAILVRAGFQTRAFEEAAIHENVPYRVVGGLKFYERKEIRDIIAYLRLVVNPNDNLAFERIINTPKRGLGQASLNKIYNYSLEEGCSMFEAVRKLEENEKLKSTALLTFVKQVRKWQEESLNHSLHDLLKKITLESGYISALKEQDETRIENVDELFRVIQEFDDATDFLQHVSLLTESDAQINNSDAVNMMTLHASKGLEFEQVFLPGWEDGTFPHVRSLCSTEQIEEERRLAYVGITRAKRFLTITSAHRRLIRNSWQNTVKSRFMLELAEK

SEQ ID NO: 44045 - DNA, 2223 bp, Francisella tularensis subsp. holarctica
  CDS (1)..(2223): transl_table=11
atgtctaattatgactttaccttaggattaaatccagagcagcaaaaagctacattactagaggatcgtaatgctttgattctcgctggtgctggcagtggtaaaacaaaagttctaacatcacgtatagcttatctttgtcgtgataaaggagtatctatagaaaatatccttgccgtaacattcactaataaagcagcaaaagagattcagcagcgtgtagaaaagatgcttgggatttctacatttggaatgtggataggtacttttcatggtattgcacatagactattgcgtaagcatgctcatgaacttggcttagataagaactttaggatacttgatcaagatgagcaggcacaactggttaaaaaggtaatcaataatctagatcttgatgataaaaaatatccgcctaaattactgcagaattttatcaataaacaaaaagataaagctatccgtagtaataaactaacaaagcagtatgatgccaattatgcgcatatttatacagcttatgaagaaagacttcagcttgataatgctttggattttgcagatttgcttttacatctttatgagcttttttcttttaatcaacagcttagagaatattatcaaaacaaatttaaatatattttgattgatgagtttcaggatactaaccatgttcaatacatgtggctaaaattacttataactgataataactacatgatggcagttggcgatgatgatcagtcaatatatggttggcgtggtgctgtcgtagataatatccataattatgtaaaagatctcaaaaacgttgagattataaaactagaacaaaactaccgctcaacaaaaaatattctaaaagtagctaattcagtaatcaaaaataatgataataggatgtcaaaggagctgtggtcagcagctgaagatggtgaaaaagtagtgctttattgtgccgttaatgagcgtgatgaggcaaaatatattatagataaaattcgccagttgcataatgatggagttgactatagtgatatagctatcttatatcgttcaaactatctatcacgtgttttagaggaaagttgtatttatgcaagtattccatatcgaatttatggcggttttaggttctttgatagagcagagattaaagatgctttagcatacttaagattagctgttacaaatagtgataatttagcatttgaacgaattattaacacaccaacacgaggaattggtaataagacattagagacaattagaaattatgcgcaaattaattcattatcatattggcaagctactttagatgttattcaaaaagagcttgtaactaaaagaacggcaagtttacttttaaagtttatcgaattaattagtggtatttcggcacaaataaatcagcatagcttagataagctcttagaatcggtaataaatcaaagtggtcttttagcatcatatcaagaaaaaaatagtgaaaaggatcgccaaaagattgataacttaaaagagttgataagtgcagctaaagattttgaaccacagatagagttacttgatgataatactgacatactacaagatttcttgtcatttgctgttctagaagctggtgaaatgcaagctgatgaagctacagatagtgtgcagttaatgactattcatgcttcaaaaggtttagagtttcgttatgtgtttctagttgctgcagaagaaggggtttttccaccaagctcaattgttaactctgaagaagtgttcgataatacaagctctaagaaaatgcaagagaagcttgctgaagagcgtcgccttttttatgtagcagtaacaagagctatgagagccttaactataagttatgcacaagtacgcagtatctttggtcgtagtagttttcaagttaagtcacgtttcgttacagagatagactctcagcatttgagtcagggtaaactagagtttacagcggctaaacctaaaactaaacaaaaagcaaattttgggatgtcgccttttgattttcttaaatcaaataatactaccaatagttttaaacctggtgataaagtatttcataaggtttttggcaaaggagtatttataaaagcgcaagcacaagggacaaaagagttttatactgtagattttggtatagatgttggtcagaaaatattgctagcagatatcgctaatctggttaaggtctga

SEQ ID NO: 44046 - protein, 740 aa, Francisella tularensis subsp. holarctica
MSNYDFTLGLNPEQQKATLLEDRNALILAGAGSGKTKVLTSRIAYLCRDKGVSIENILAVTFTNKAAKEIQQRVEKMLGISTFGMWIGTFHGIAHRLLRKHAHELGLDKNFRILDQDEQAQLVKKVINNLDLDDKKYPPKLLQNFINKQKDKAIRSNKLTKQYDANYAHIYTAYEERLQLDNALDFADLLLHLYELFSFNQQLREYYQNKFKYILIDEFQDTNHVQYMWLKLLITDNNYMMAVGDDDQSIYGWRGAVVDNIHNYVKDLKNVEIIKLEQNYRSTKNILKVANSVIKNNDNRMSKELWSAAEDGEKVVLYCAVNERDEAKYIIDKIRQLHNDGVDYSDIAILYRSNYLSRVLEESCIYASIPYRIYGGFRFFDRAEIKDALAYLRLAVTNSDNLAFERIINTPTRGIGNKTLETIRNYAQINSLSYWQATLDVIQKELVTKRTASLLLKFIELISGISAQINQHSLDKLLESVINQSGLLASYQEKNSEKDRQKIDNLKELISAAKDFEPQIELLDDNTDILQDFLSFAVLEAGEMQADEATDSVQLMTIHASKGLEFRYVFLVAAEEGVFPPSSIVNSEEVFDNTSSKKMQEKLAEERRLFYVAVTRAMRALTISYAQVRSIFGRSSFQVKSRFVTEIDSQHLSQGKLEFTAAKPKTKQKANFGMSPFDFLKSNNTTNSFKPGDKVFHKVFGKGVFIKAQAQGTKEFYTVDFGIDVGQKILLADIANLVKV

SEQ ID NO: 44047 - DNA, 2283 bp, Desulfitobacterium hafniense Y51
  CDS (1)..(2283): transl_table=11
gtgaggtggagtgagatgtatcgtttagaggatttgaacccggttcagcgccaagcggtagagcatcgggaaggtcccctattaatattagcaggggcaggctccgggaaaacacgggttttaacttaccgtatcgcccatttaatcgcccaaggcgttgagccctggcacattctggccattacctttaccaataaagcagcccaggaaatgcgtgaccgggtctacagcctggtaggcagtgaagggagagggctttgggtagcaacctttcactctgcttgtgtgcggattttaagaagcgagatcggctatttgcccggatattcgcggagttttgtcatttatgacagtggggatcagctggcattgatcaaatcctgcatgaaagaactgaacctggatgagaagaaatttgcaccccgggctatcgaagcggtgatcagtgatgccaagaataagctgctgacgccggaggatttttcccgccgggccaaggattattttgagcaaaaggcagaacgggtctacgaactgtatcaaaagaagctcctggccaataatgctctggatttcgatgacatcatcatgctgacggtccggctgttccgggagaaccctgaagtattgtcccagtatcaggataaattccgctacattcttgtggatgagtatcaggataccaaccatgcccaatacgctttggtcaatcttctggctaagaaataccgcaacctctgtgtggtgggggatgacgaccaatccatctatatgtttcgcggggccgatgtgcagaatatcctggattttgaacgggattatcccgaagccaaaaccttgaagctggagcagaattaccgttcaaccaaatctattctccaggccgccaattcagtggttcagaacaataggtcgcgcaaagagaaatccttatggacggaaaatgaggacgggcagcctattgtctattacgtggcagacaatgagcatgatgaagcccgttatatgggtgagcgcattcaacgcctgctcaatgtggaaggccgcaaatttaatgagtttgccgtactttaccgcaccaatgctcaatcccgggttattgaagaacgctttatgaaggaaggaatcccatatcggattttttcgggacttaagttctacgaacggatggaaatcaaggatatcctggcttatctgcgcattcttcataacccggcggatcaagtgagcttttcccgggttttgaatgttcccaagcggggcttgggagagagcactttagaaaagattctcgattatgccaatgaacaggagatgcctgttctggatgcgatcatggaggccgactatatacctgagctgcagtcacgggccaagaagcctttgctggcttttgcccacctgatgcaagagctcagggccttagccgccgcggagagttcagtaaccaaattggttgaagaagtattaaaacggaccggatattgggataatctggttagtgataaatcgccggaagcggaagcccggctggaaaacctgcgggagtttttatccgtgaccgctgaatatgacgagaaagcggataactacgaaaccgcggtggtccaggaggggattgaagatgccctggttcccggactggcagggtttctggagcaagtgtccttagtagctcagatcgactccttggatcaggcagatgatgctgtggtgatgatgaccatccacagtgccaaagggctggaattcccggtggttttcctgggcgggatggaggaaggaatcttccccagcagccgctccatgcttgatccggtgctcttggcggaagagcggagactttgctacgtggccataacccgtgcccgggagcgtctctatctggcttatgcccagcagcggatgctttacggaagaactcaatacaaccggccttccgagttctttcaggaaattcccacccatgtcctggtggaccgggatcctattgatcccccgcccacccgggcccagaaggcccattcagctacggcaaggccggcagcgacgccctcgggaggcccatcaccctggagaaccggggagagaactattggcaatcccgtccaggatgcccccggggtggactataaagtgggagaaaaagtggaacatgccaaatttggcaaaggtgtgattgtagctatcaaaggcgaggggagttcggctgaactttccgtggtctttgggggcgagatcaagaagcttatggcggaatatgccaggcttgttaagctttga

SEQ ID NO: 44048 - protein, 760 aa, Desulfitobacterium hafniense Y51
MRWSEMYRLEDLNPVQRQAVEHREGPLLILAGAGSGKTRVLTYRIAHLIAQGVEPWHILAITFTNKAAQEMRDRVYSLVGSEGRGLWVATFHSACVRILRSEIGYLPGYSRSFVIYDSGDQLALIKSCMKELNLDEKKFAPRAIEAVISDAKNKLLTPEDFSRRAKDYFEQKAERVYELYQKKLLANNALDFDDIIMLTVRLFRENPEVLSQYQDKFRYILVDEYQDTNHAQYALVNLLAKKYRNLCVVGDDDQSIYMFRGADVQNILDFERDYPEAKTLKLEQNYRSTKSILQAANSVVQNNRSRKEKSLWTENEDGQPIVYYVADNEHDEARYMGERIQRLLNVEGRKFNEFAVLYRTNAQSRVIEERFMKEGIPYRIFSGLKFYERMEIKDILAYLRILHNPADQVSFSRVLNVPKRGLGESTLEKILDYANEQEMPVLDAIMEADYIPELQSRAKKPLLAFAHLMQELRALAAAESSVTKLVEEVLKRTGYWDNLVSDKSPEAEARLENLREFLSVTAEYDEKADNYETAVVQEGIEDALVPGLAGFLEQVSLVAQIDSLDQADDAVVMMTIHSAKGLEFPVVFLGGMEEGIFPSSRSMLDPVLLAEERRLCYVAITRARERLYLAYAQQRMLYGRTQYNRPSEFFQEIPTHVLVDRDPIDPPPTRAQKAHSATARPAATPSGGPSPWRTGERTIGNPVQDAPGVDYKVGEKVEHAKFGKGVIVAIKGEGSSAELSVVFGGEIKKLMAEYARLVKL

SEQ ID NO: 44049 - DNA, 2175 bp, Saccharophagus degradans 2-40
  CDS (1)..(2175): transl_table=11
atggacgtatcttacttacttgacggtttaaatgagccccagcgcgaagcggtatccgccccgctgggtaatattcttgtgcttgcgggggctggcagcggtaaaacgcgagtgctggtgcaccgtatcgcctggcatattcaggtggaaggcctttcgccccaccagattatggcggtaacctttaccaataaggccgcgcgcgaaatgcgttcgcgcctagatgagattatgggtgagcgcttaggccctagtggcgtgcgcagtatgtgggtaggtaccttccacggtattgctcaccgcttattaaaggcccactggcaagaagccggtttgccacaaaacttccaaatattggatagcgacgatcaactgcgcgtagttaagcgcgtttatcaagagctgcaaattgacgacagtcgcttcccgttcaagcaagcccagtggtttattaacggtcaaaaagacgaaggtattcggccgcaatatattcaagaggggcacgacccgttccttgccaccatgaagcaggtatacgccgcctacgaagaagcctgcgcgcgtgctggtgtggtggatttcgccgagctgctattgcgatcccacgagttgtggttaaaaaatcccacgttgcttaaacactaccaaaaccgttttcgcgccttgctggtggacgaatttcaagataccaactcggtacagtatgcctggttgcgggtgctggcagggccagagggctgtattacggcggtaggtgacgacgaccaatctatttacggttggcgcggtgccaaaatagaaaatattcagcagtttgaagtagattttaaaaacgtaaacaccattcgcttagagcaaaactaccgttctacgggcaccatattggaagccgccaacgcggttattaccaataactcgcagcgactgggtaaaaaactgtggacatcgggcgccgatggcgagcttatcgatttatattctgcatttaatgagcaagatgaagcgcgttatatcgtcgagcgcatttctgaatgggtgaaagatggcggcgctcgcgaagacgttgctgtgctgtatcgctcgaatgctcaatcgcgggtgctagaagaagcgtttattcgcgaaggcatggcgtaccgcatatacggtggtcagcgattctacgagcgcctagaaattaaaaatgccctggcctatggtcgactcattttaaaccgccaagacgatgccgcctttgagcgggttattaacacgccaacgcgcggtataggcagcaaaacggtggatactcttcgcctaatggcgcgcgagcaaggctttagcatgtacgaagccatgttgggcgctattcgcaatggtgtatttaccgctcgcgcaacaaatgcattaaaagcgttcgacgaattgttaaagctgttagaagccagtattgctgcggcgcgcttgccagatcaaatggatattattattaatgaatctggcttaaaagattttcacgcaaaagaaaaaggtgagcgcggtcaggcgcgactagaaaacttgaacgaattagttgtggcctgcggcgcatttaatgccgaagacgacgagatatctccgctggcagaatttttagatcgcgctgcgctagatgccggcgatcaacaagccgatgagtacgaagatgcggtgcaaatgatgactctgcacagcgcaaagggtttggaattcccgctggtcttcttggtgggcatggaagaaaacctcttcccccataaaatgagtatggaagatgccggtggcttagaagaggagcgtcgactggcttatgtaggcattacccgcgctatgaaaaagctggtgcttacctatgcagaaagccgccgcatgtatggcaacgaaaattttaatgctatatcgcgttttgtaagggaaattcctaagcagcttgttgaagaagtgcgtattaacactaccgttacacgccccagtagttactccacatccccattgttaaccggcacaacctctacagaaggttttagcctaggccaaagtgtgtaccacccaatatttggcgacggagtaatcttgcagtttgagggtcagggtcccagcgcgcgagtgcaggtaaactttagtaccgaaggcaccaaatggttggtgctacagtatgcgaagctggaagctatttaa

SEQ ID NO: 44050 - protein, 724 aa, Saccharophagus degradans 2-40
MDVSYLLDGLNEPQREAVSAPLGNILVLAGAGSGKTRVLVHRIAWHIQVEGLSPHQIMAVTFTNKAAREMRSRLDEIMGERLGPSGVRSMWVGTFHGIAHRLLKAHWQEAGLPQNFQILDSDDQLRVVKRVYQELQIDDSRFPFKQAQWFINGQKDEGIRPQYIQEGHDPFLATMKQVYAAYEEACARAGVVDFAELLLRSHELWLKNPTLLKHYQNRFRALLVDEFQDTNSVQYAWLRVLAGPEGCITAVGDDDQSIYGWRGAKIENIQQFEVDFKNVNTIRLEQNYRSTGTILEAANAVITNNSQRLGKKLWTSGADGELIDLYSAFNEQDEARYIVERISEWVKDGGAREDVAVLYRSNAQSRVLEEAFIREGMAYRIYGGQRFYERLEIKNALAYGRLILNRQDDAAFERVINTPTRGIGSKTVDTLRLMAREQGFSMYEAMLGAIRNGVFTARATNALKAFDELLKLLEASIAAARLPDQMDIIINESGLKDFHAKEKGERGQARLENLNELVVACGAFNAEDDEISPLAEFLDRAALDAGDQQADEYEDAVQMMTLHSAKGLEFPLVFLVGMEENLFPHKMSMEDAGGLEEERRLAYVGITRAMKKLVLTYAESRRMYGNENFNAISRFVREIPKQLVEEVRINTTVTRPSSYSTSPLLTGTTSTEGFSLGQSVYHPIFGDGVILQFEGQGPSARVQVNFSTEGTKWLVLQYAKLEAI

SEQ ID NO: 44051 - DNA, 2196 bp, Methylobacillus flagellatus KT
  CDS (1)..(2196): transl_table=11
atgcaggctatgacgaacccaaccaccaccttgctcgacggcctcaatgaaaagcaactcgaagccgtcacccttccgcaccaatccgcactcatcctggctggcgccggcagcggcaagacccgcgtgctcaccacgcgcattgcctggctgatccaaactggacaagtctcaccgcacggcattctttccgtaacgttcaccaacaaagccgccaaggaaatgctgacccgactgggtgcgatgctgcctatcaacatccgcggcatgtgggccggaaccttccatggtttatgcaaccgcctgctgagggcgcaccatcgtgaagcggaactgccccccacattccagatactggacacggcagaccagctttctgcgatcaagcgcgtcatgaaagcgatgaatatcgatgacgagaagtttccacccaaacaggtgctgggctatatcaacagctgcaaggaggaaggcctgcgcgcctatgcagtagatgcctatgacagccattcgcaacgcatgcgcgaaatcttcgaagaatacgacaagcaatgccagcgcgaaggtgtggtggatttcgcggaactgctgctgcgctgctatgaattattgagcagcaacaaaagcattcgcgaacattaccagcagcgcttcaagtacatcctggtggacgaattccaggacaccaaccgcctgcaatacctgtggctgaagctactcgccggcacgaacaactgcatctttgccgtcggtgatgacgaccagtccatctatgccttccgcggcgcgcgggtgggcaatatgcgcgacttcgagcatgatttcaatgtgcagaacgtcgtgaagctggagcagaactatcgctcccacagcaatatcctggacgcagcgaatgccatcatcatgcataaccgcaaccggctgggaaagaatctctggacatctgcaggcaagggcgaacctatccgcatttacgaaggctacaacgacaaggatgaggcggtgttcatcgttgatgagatcaaggctttgcataaggaaggcatagaactcagccagatcgccctgctttatcgttccaatgcccagtcccgcatcctggagcatgaattgttctcagcaggactgccttaccgcgtctatggcggattacgctttttcgagcgggcggaagtcaagcatgcactcgcctatttacgcctgatcgccaacggcgatgatgatactgccctgttacgtgtcatcaatttccccactcgcggtatcggtgcgcgcagcctggaacaattgcaggaactggcccgccaacaggacagcagcctttggcaggccgcctgtgccaaggcgggtgatggccgcccaggccgtggcctggaaggttttgtcgcgctggtcaagcaaatgcaggaagaatccatcggcctgacacttgctgagcaggtggagctcgccaccaggctttccggcttacgggatcattatgctgcggataaggaaggcgaagaccgccttgccaacctggatgagctggtcaatgccgccattgccttcatgaaccaggatatcggcatgccagtggatgagaacggcgaagtcgccatgtccatgcttgcgcaattccttgcccacgccagcctggaggctggcgaacaccaggcagatgtcggccgcgacgcgctgcagttaatgactgtgcatgccgccaagggcctggagtttcataccgttttcatcagtgggctcgaggagggcctatttccgcacgagcagagcagttacgagtccaatggcctggaagaagagcgtcgcctcatgtacgtagccgtgacccgtgcgcgccagcggttgtatctcagttttgcacagagccgcatgctgcatgggcaggtgcgctacggcatcccgtcacgcttcctggatgaaatcccggaagcgttggtcaagcgcctgaacactgtctcgaacaaatcctatggcagcaccagccaatacccggccgctgctccagctccagctgcgcgccctcaagccagcatgccgtggaaaatcgggcaggccgttgcccacagcaaatttggccagggcgtagtggtcaattacgaaggcaatgccaatgatctgcgcgtacaggtcaactttgggcgtgaagggctgaaatggctggcgctggaatacgccaagctggaaccgctatag

SEQ ID NO: 44052 - protein, 731 aa, Methylobacillus flagellatus KT
MQAMTNPTTTLLDGLNEKQLEAVTLPHQSALILAGAGSGKTRVLTTRIAWLIQTGQVSPHGILSVTFTNKAAKEMLTRLGAMLPINIRGMWAGTFHGLCNRLLRAHHREAELPPTFQILDTADQLSAIKRVMKAMNIDDEKFPPKQVLGYINSCKEEGLRAYAVDAYDSHSQRMREIFEEYDKQCQREGVVDFAELLLRCYELLSSNKSIREHYQQRFKYILVDEFQDTNRLQYLWLKLLAGTNNCIFAVGDDDQSIYAFRGARVGNMRDFEHDFNVQNVVKLEQNYRSHSNILDAANAIIMHNRNRLGKNLWTSAGKGEPIRIYEGYNDKDEAVFIVDEIKALHKEGIELSQIALLYRSNAQSRILEHELFSAGLPYRVYGGLRFFERAEVKHALAYLRLIANGDDDTALLRVINFPTRGIGARSLEQLQELARQQDSSLWQAACAKAGDGRPGRGLEGFVALVKQMQEESIGLTLAEQVELATRLSGLRDHYAADKEGEDRLANLDELVNAAIAFMNQDIGMPVDENGEVAMSMLAQFLAHASLEAGEHQADVGRDALQLMTVHAAKGLEFHTVFISGLEEGLFPHEQSSYESNGLEEERRLMYVAVTRARQRLYLSFAQSRMLHGQVRYGIPSRFLDEIPEALVKRLNTVSNKSYGSTSQYPAAAPAPAARPQASMPWKIGQAVAHSKFGQGVVVNYEGNANDLRVQVNFGREGLKWLALEYAKLEPL

SEQ ID NO: 44053 - DNA, 2352 bp, Burkholderia xenovorans LB400
  CDS (1)..(2352): transl_table=11
atgcccgacctgctagccaatctcaaccccgaacaacacgccgccgtcacgctccccaacgagccggcgctcattctcgccggcgcgggcagcggcaagacccgcgttctgatcacgcgtattgcctggctgatccagcatgggctggcctcgcccgccacgattctggcggtgactttcaccaacaaggccgcccgcgaaatgatgtcgcgcctctcggcgctcctgccgatcgacacgcgcggcatgtggatcggcaccttccacggtctgtgcaaccgcatgctgcgcgcgcatcaccgcgacgcgggcctgccggccaccttccagattctcgacaccgcggaccagctttccgcgatcaagcgtctgatgaagggcctcaatatcgacgacgaaaagtacccggcgaaaaatctccagtacttcatcaacaacgcgaaagaacaaggcctgcggccgaaagacgtcgacgccacggacaacttcaaccgcaaattcgtcgaactctacgaagcctacgaccagcaatgccagcgcgaaggcgtggtcgactttccggaactgctgctgcgctgctacgagctgctcgcgcacaatccgccgctgcgcgcgcactaccaggcgcgcttcaggcacattctggtcgacgagttccaggacaccaacaagctgcaatatgcgtggctcaagctgctggcgggcgaggccaactcgatcttcgcggtcggcgacgacgaccagtcgatctacgcgtttcgcggcgcgaacgtcggcaacatgcgcgacttcgaacacgagttcaacgttcgccacctgatcaagctcgaacagaactaccgctcgcacggccatattctcgacgccgccaatcagctgatcgccaacaactcgcggcgtctgggcaagaatctgcgtaccgacgcgggtcacggcgaaccggtgcgcgtgtatgaatccgccaccgactcgcaggaagccggctggatcgtcgaggaaatcaaggcgctgatcagcaccggcacgtcgcgcagcgaaatcgcgattctttatcgcagcaacgcgcagtcgcgcacgatcgaacacacgctggtcaatgcgggtatcgcgtaccgcgtgtacggcggcttgcgctttttcgagcgtcaggaagtcaagcacgcgctcgcctatctgcgcctgatcgacaatccgaacgacgacaccgcgttcgcgcgcgtcgtcaatttcccgacgcgcggcatcggcgctcgctcgatcgagcaactcgcggacgcggcgcgtcagtacaactgctcgatggccgcggcgattccgtacgtggcgggcaaggcggggtcgagcctcgcgggcttcgcgaacctgatcggcaagatgcgcgccgaaacgcagcagatgagcctgccggaaaccgtcgaatacgtggtgcgcgcaagtggtctgtcggagttctatcagaacgaacgcgaaggccaggaccgcctggagaacttgcaggaactggtcaacgcggccgcggcgttcgtcagcgaagagggctacggcatggacacgccggcgcgctccattccgctgcgtccgggtgcgaccgccgcgcccgaactggcggtcgccaccgacgatccgaataccatcgtgttcgacgcgcccggcatcgccgatccggcgcaaaacccggacacgatgacaccgctcgccggcttcctgtcgcacgcgtcgctggaggcgggcgacaaccaggcgcaagcgggccaggaagccgtgcaactgatgacggtgcacgcggccaagggccttgagttcacggcggtgttcatcaccggtctcgaagaagggctgttcccgcacgagaacagcgcgatggaatcggacggtctggaagaagagcgccgcctgatgtacgtggcgatcacgcgggccaaggagcggctgtatctgtcgttcgcccagagccgcatgctgcacggccagacgcgttacaacatccgctcgcgtttcttcgacgaactgccgcaggaaacgctcaagtggctcacgccgaagatcgagccgggcgcgcgctggggtggccgttcggacaacgcgggttatgggcgcgactggttcgcgcggccgggttacacgggcgccgcgtcgtcgacgcccgcgccgctgccagcgttcgcgaacgaacagcgtgcagcggaaacgggtttccgcgtgggccagcaggtgttccacaccaaattcggcgaaggcacgatcaccgcgctcgaaggcggcggcaccgacgcaaaggcgcaggtcaaattcaagcggcacggcgagaagtggctggcgctcgcggtcgccaaactgcaggcggtggaatga

SEQ ID NO: 44054 - protein, 783 aa, Burkholderia xenovorans LB400
MPDLLANLNPEQHAAVTLPNEPALILAGAGSGKTRVLITRIAWLIQHGLASPATILAVTFTNKAAREMMSRLSALLPIDTRGMWIGTFHGLCNRMLRAHHRDAGLPATFQILDTADQLSAIKRLMKGLNIDDEKYPAKNLQYFINNAKEQGLRPKDVDATDNFNRKFVELYEAYDQQCQREGVVDFPELLLRCYELLAHNPPLRAHYQARFRHILVDEFQDTNKLQYAWLKLLAGEANSIFAVGDDDQSIYAFRGANVGNMRDFEHEFNVRHLIKLEQNYRSHGHILDAANQLIANNSRRLGKNLRTDAGHGEPVRVYESATDSQEAGWIVEEIKALISTGTSRSEIAILYRSNAQSRTIEHTLVNAGIAYRVYGGLRFFERQEVKHALAYLRLIDNPNDDTAFARVVNFPTRGIGARSIEQLADAARQYNCSMAAAIPYVAGKAGSSLAGFANLIGKMRAETQQMSLPETVEYVVRASGLSEFYQNEREGQDRLENLQELVNAAAAFVSEEGYGMDTPARSIPLRPGATAAPELAVATDDPNTIVFDAPGIADPAQNPDTMTPLAGFLSHASLEAGDNQAQAGQEAVQLMTVHAAKGLEFTAVFITGLEEGLFPHENSAMESDGLEEERRLMYVAITRAKERLYLSFAQSRMLHGQTRYNIRSRFFDELPQETLKWLTPKIEPGARWGGRSDNAGYGRDWFARPGYTGAASSTPAPLPAFANEQRAAETGFRVGQQVFHTKFGEGTITALEGGGTDAKAQVKFKRHGEKWLALAVAKLQAVE

SEQ ID NO: 44055 - DNA, 2364 bp, Ralstonia metallidurans CH34
  CDS (1)..(2364): transl_table=11
atgtccagtctgctcgccaatctcaacgctgaacaactcgccgccgtcacattacctgacgagccggccctgatcctggccggtgcgggcagtggcaagacccgtgtgctgaccacgcggatcgcgtggctgatccagaacggccgtgtgtccccggccggcatcctggcggtgaccttcacgaacaaggccgccaaggagatgcagacccggctgtcgtcgatgttgccgatcaacacccggggcatgtggatcggcacgttccatggcctctgcaaccggatgctgcgtgcgcatttccgtgacgccggcttgccccagacatttgccatcctggactcccaggaccagctttcggcgatcaagcggctgctcaaggggctgaatgtcgacgacgaaaagtacccacccaagaatctccagtacttcatcaacaacgccaaggagcagggcctgcgcccggccgacgtcgaagccaatgacgatttcaatcgtcgcttcgtcgacctgtacgcggcctacgacgagcagtgccagcgcgagggcgtggtcgacttcgccgaactgttgctgcgctgctacgaactgctgcgttacaacgacgcgatccgccagcactaccagcaccgtttccgccatgtgctcgtcgacgagttccaggacaccaacgtgctgcagtaccagtggctcaagctgcttgccggctacggctcgggcaatgccgcggcagtgttcgccgtgggcgacgatgaccagagcatctacgcgttccgtggcgccaacgtcggcaatatgcgcgacttcgagcaggaattccgcgttcgccacctgatcaagctcgagcagaactaccgctcgcacgggcatattctcgattcggccaaccacctgatctcgcacaatgcgcgccgactgggcaagaacctgcgcaccgacgccgggcacggcgagccggtgcgcgtgttccaggcaggttcggacggccaggaagcctcgtggatcgtcgaggaaatccgcgaccagatcgcgcagggcatgtcgcgctcggagatcgcgatcctctatcgcagcaatgcgcagtcgcgggtcatcgaacacgcgctgttctcgtcgggtatcccgtaccgggtgtacggcggcctgcgcttcttcgagcgcgccgaagtgaagcacgcgctggcctacctgcagttgatcgagaaccctcgcaatgacgccgcattcgggcgggtggtcaatttccccacgcgcggcatcggcgcgaagtcgctcgaagtgctgcaggacgcagcgcggcagtacaactgttcactggccgaagccgtggcctacgtgcctggcaaggccggcagctcgttgggcgcctttatccggctgatcgagcagatgcgtgccgagaccagccggatgacgctggcgcaaacggtcgagtacgtgaccaacaccagcggcctgatgacgcattaccagaccgagaaggaaggccaggaccgcatcgagaacttgcaggaactggtgacggccgcgcaggcattcgtggtcgaggaaggctacgggctcgaggcgctgggccgcatgctgccggcgaaccgcgatgccatgccggcgctggcgcagggcgaacaggaccagcaggtgctggaccccgaacagttgccggtggtgatgacgccgctggtggcgttcctgacccatgcatcactggaggcgggggacaaccaggcgcaggccggccaggatgcggtgcaaatgatgaccgtgcacgcggccaaggggctcgagttcaatgtggtgtttatcaccgggctcgaggaaggcctgttcccgcacgagaacagcgcgatggaagccgacggtctggaggaagaacgccgcctgatgtatgtggccatcacgcgcgcgcgggcacggctctatctgtcgttcgcccaaagccgcgtgctgcacggccagatgcgctatcacgtgcggtcgcgcttcttcgaggagcttcccgaggcttcgctgaagtggatcactccgcagggccaggcctatggtgcctatggctcaggtagcggacgccagtcatctgagcgcgaaagcgcttggggccgtgactggttcaagcgtgccgaggacgtgccctataccggcgtcaagccgaccggcggcatggacaccggcaagaactacgccgaagagaagcgcgccgcggccactggattccgcgtgggccagagcgtgttccacaacaagttcggggaaggcaagatcaaggcgctggaaggcgagggcgccgatgcgcgcgcgaacatcgacttcaagcgtcacggcaccaagtggctggcgctgtcggtggcgaagctggacgcgattgattga

SEQ ID NO: 44056 - protein, 787 aa, Ralstonia metallidurans CH34
MSSLLANLNAEQLAAVTLPDEPALILAGAGSGKTRVLTTRIAWLIQNGRVSPAGILAVTFTNKAAKEMQTRLSSMLPINTRGMWIGTFHGLCNRMLRAHFRDAGLPQTFAILDSQDQLSAIKRLLKGLNVDDEKYPPKNLQYFINNAKEQGLRPADVEANDDFNRRFVDLYAAYDEQCQREGVVDFAELLLRCYELLRYNDAIRQHYQHRFRHVLVDEFQDTNVLQYQWLKLLAGYGSGNAAAVFAVGDDDQSIYAFRGANVGNMRDFEQEFRVRHLIKLEQNYRSHGHILDSANHLISHNARRLGKNLRTDAGHGEPVRVFQAGSDGQEASWIVEEIRDQIAQGMSRSEIAILYRSNAQSRVIEHALFSSGIPYRVYGGLRFFERAEVKHALAYLQLIENPRNDAAFGRVVNFPTRGIGAKSLEVLQDAARQYNCSLAEAVAYVPGKAGSSLGAFIRLIEQMRAETSRMTLAQTVEYVTNTSGLMTHYQTEKEGQDRIENLQELVTAAQAFVVEEGYGLEALGRMLPANRDAMPALAQGEQDQQVLDPEQLPVVMTPLVAFLTHASLEAGDNQAQAGQDAVQMMTVHAAKGLEFNVVFITGLEEGLFPHENSAMEADGLEEERRLMYVAITRARARLYLSFAQSRVLHGQMRYHVRSRFFEELPEASLKWITPQGQAYGAYGSGSGRQSSERESAWGRDWFKRAEDVPYTGVKPTGGMDTGKNYAEEKRAAATGFRVGQSVFHNKFGEGKIKALEGEGADARANIDFKRHGTKWLALSVAKLDAID

SEQ ID NO: 44057 - DNA, 2550 bp, Acidobacteria bacterium Ellin345
  CDS (1)..(2550): transl_table=11
ttgcagttcctcgaaaaactgaatccccagcagcgcgaggcggtggaaaccgtccatggaccggtgttgattctcgcaggcgcggggagcggcaagacgcgggttatcacctaccggattgcctacctgatcgagaaggttggggtgtcgccggactccatcctggcgatgacgtttaccaacaaggctgccgccgagatgcaggagcgcgtggaacacctggtaggtgggcggacgctggccaagccggtgatttcgacgttccactcgttttgcgtgcgggtgctgcggcgcgatatcgaggcactgcagatcaacggaaagggctaccggaaagatttcgcgatttacgacgagagcgaccagcagtcgctggtgaagtcggcgatgaagcggctggggatcgacgataagcagctcacggtgcgcaacgtgctctcgcggatttcgcatgcgaagaaccatctgctggatccgcaggaggtgtacctgcaatccggcgatccgaaggtggagcggatcgcgcagatctacaaggtgtacgaatcggagctggcgaaagcgaatgcgctcgacttcgacgacctgctgctgatgaccaacaagctgctgaagacctcgaccgaggtgcgcgagcgctacaaccggcggttccagtacgtgctgattgatgagtaccaggacaccaaccgtccgcagtacgagatcatgcgggcgctggcgggaacgctgcacaacgtgtgcgcggtgggcgatgaggaccagtcgatctactcgtggcgcggggcggacatccgcaacattctcgagttcgagcaggatttccccgaggccaagatcgtaaggcttgagcagaactaccgttcgacgcagaacattctggaagcggcgtcggcagtggtgaagaacaacctgaagcggaagggcaagaacctgtggaccgagcgcatgggtggcgcgaaggtcgggtattacgaggcgccggacggcgagaacgagtcgctgtttgtggccgactacatcaacaagtacctgatgatcgcgcacgatgaagacgatgagccgaagcgcgcggcggtgctctatcgcaccaactcgcagtcgcgattatttgaagaagcgatgcggcgctatggcatcaagtacaacgtggtcgggggcttcagcttctacgagcgcgccgaaatcaaggacatgatcagctatctgaagctgatccagaacccgagcgactcggtggcgctgctgcggacgattaatacgccgacgcgtgggatcgggaagacgaccgtcgagcagattgagcggattgcgctggagaccaaccttccgttgtgggatgcgttggggcacatcgtggaacagcgactaatgcagccacgggcgtgcgcggcgctgaagggcttccgcgaacttattcaggatgcgcgcgccatgctctacgggaagttcgaagagcgactggtggagacggcacaggtatcaaagcccgaagaaagtgacgcggccgaaccggagattgcagacgaagatctgcaagacaacatggcgttcgacttcggagaactggagccggacgcggaggagttttcgccggaggccctgggcacggcggaagaagcggctccggagaaggtcgagggcttccgctcgcccggtgagaacgcgaacgtttccgaggtgctgaagttcttgatcgatcgcacgggatacatcaagcagttggaggcggaagacactccggagtcgctggcgcggattgagaaccttcgcgaattggtgaatgcggcgatggactcgcgggatcgcggagaaacgattgcggatttcctcgaccacgccgcgctggtggcggacaccgacgacattgaagccggtgcgcaggtcacgctaatgacgatgcacgcggcgaaggggctggaatttccgctggtgttcatcgtcggcatggaagaagggctgtttccgagctcgcggacgctgatgaacccggatgaagttgaggaagagcggcggctttgttatgtcggaatgacgcgggcgatgcgcatccttgtgttgagccgggcgcggtatcggcgacggtatgggaccgacatgccggatgcgagtacggcttcgcggttcctgagcgaagtgccaccgcagttgtttgaagacatcgggtcgccgcagaagaaaacgccggtgttcggcgatgactcgtacagcacgcattacgactacgagaacgaagatcagcgtccgcaatatggacggacgaagcagaagacgagctatggcggcggctcgacatacaactcgatcgacaacattgcggagtttttcgcgtcgcgcgggaagaaattcaatcgtccgagcgtgccgatggaagagccgcatgggaagcgcgggttccgtccgggacagaaggtgaaacaccccaagtatggggaggggacggtgtatcagcgcgagggcgaaggggaagaagccaagattacggtacaatttccaaggttcggcttgaaaaaactggtggagaagttcgcgcagttggaaaaggcgtga

SEQ ID NO: 44058 - protein, 849 aa, Acidobacteria bacterium Ellin345
MQFLEKLNPQQREAVETVHGPVLILAGAGSGKTRVITYRIAYLIEKVGVSPDSILAMTFTNKAAAEMQERVEHLVGGRTLAKPVISTFHSFCVRVLRRDIEALQINGKGYRKDFAIYDESDQQSLVKSAMKRLGIDDKQLTVRNVLSRISHAKNHLLDPQEVYLQSGDPKVERIAQIYKVYESELAKANALDFDDLLLMTNKLLKTSTEVRERYNRRFQYVLIDEYQDTNRPQYEIMRALAGTLHNVCAVGDEDQSIYSWRGADIRNILEFEQDFPEAKIVRLEQNYRSTQNILEAASAVVKNNLKRKGKNLWTERMGGAKVGYYEAPDGENESLFVADYINKYLMIAHDEDDEPKRAAVLYRTNSQSRLFEEAMRRYGIKYNVVGGFSFYERAEIKDMISYLKLIQNPSDSVALLRTINTPTRGIGKTTVEQIERIALETNLPLWDALGHIVEQRLMQPRACAALKGFRELIQDARAMLYGKFEERLVETAQVSKPEESDAAEPEIADEDLQDNMAFDFGELEPDAEEFSPEALGTAEEAAPEKVEGFRSPGENANVSEVLKFLIDRTGYIKQLEAEDTPESLARIENLRELVNAAMDSRDRGETIADFLDHAALVADTDDIEAGAQVTLMTMHAAKGLEFPLVFIVGMEEGLFPSSRTLMNPDEVEEERRLCYVGMTRAMRILVLSRARYRRRYGTDMPDASTASRFLSEVPPQLFEDIGSPQKKTPVFGDDSYSTHYDYENEDQRPQYGRTKQKTSYGGGSTYNSIDNIAEFFASRGKKFNRPSVPMEEPHGKRGFRPGQKVKHPKYGEGTVYQREGEGEEAKITVQFPRFGLKKLVEKFAQLEKA

SEQ ID NO: 44059 - DNA, 2445 bp, Silicibacter sp. TM1040
  CDS (1)..(2445): transl_table=11
atgagcacatttgacgaaatggacgcctttgagggcgcatcattgtccgcccgcgccatggccgcgcgtcccatgccctatctggatggtctcaatccggcccaacgcgacgcggtggagacgctggatgggccggtgttgatgctggcgggcgcgggcaccggcaagacaaaggcgctgaccacccggatcgtgcatctgttgaacacgaacaaggcgcgcaccaacgagatcctcgccgtgacctttaccaacaaggccgcgcgcgaaatgaaagaccgcgtgggccggatgctcggtcagcctgccgagggcatgccgtggctcggcacctttcactcgatctgcgtgaagctcctgcgccgacatgcggaactggtggggttgaagtccaacttcaccattctggacaccgacgatcagatccgcctgctgaaacagctcatccaggcggcgggcatcgacgacaagcgctggcccgcgcggatgctggcaaacatcatcgacgactggaaaaaccgcgctctgacgcctgccaaggtgcctgcgggggatgcggcggcctataaccatcgcggcaccgagttctacgaccagtatcagacccgcctcaaggagctgaacgcggttgattttggcgatctgctgctgcactgcgtcgagatttttcagaacaacccggacctcctggcgcaatatcaccgctggttccgctacatcctcgtggacgagtatcaggataccaacgtcgcccaatatctctggttgcggctcttggcgtcggggcacaagaacatctgctgcgtgggcgacgatgaccagtcgatctatggctggcgcggcgccgaggtgggcaacatcctgcggtttgaaaaggatttttccggcgccaaggtgatccggctggagcagaattaccgctccaccaaacacattctttcggcagcctccggtgtcatccggggcaacgaagggcggttgggcaaggagctctggaccgaggccgagggtggcgaaaaagtccgcctcattggccattgggacggtgaggaagaggcccgctggatcggcgaggaaatcgaggcgatgcagcgtggcacccgggggatgcgccagtatggcctcaatgaaatggcgattctcgtgcgtgcctcgcaccagatgcgcgcctttgaggaccggttcctgaccatcggtctgccgtatcgtgtcatcggcggtccgcgcttttacgagcggttggaaatccgcgatgccatggcctatttccgcgtggtgatctcgcccgaagatgatctggcctttgagcgcatcgtcaacacgcccaaacgcggccttggcgacaaggcccagcagaccattcaaacggtggcgcgcgccaatggcgtctctctccttgagggcgcgcggcttgcggtcgaggatggcctcatcaagggcaagggcggggccgccttgcgccgtctcgttgaaaacatcgcccgttggggccagatgacccgcaccgtgctggccgacccggacgatccggacgcggtggtcgagggcgtgcagagctttgaggcgtttcaggcccgtacagaggtctcgcatgtggagcttgcggagatcatcctggatgagagcggctatacctccatgtggcaggcggacaagaaccccgacagccccggccggctcgagaacctcaaggaactggtgaaggcgctggaaaacttcgataatctccaggggtttctcgaacacgtcagccttgtgatggacaatgacaagcaagacgccgagcaaaaagtatcgatcatgacgctgcatgccgccaaagggctggagttcccggcggtgttcctgccggggtgggaggatgggctctttccctcgcagcgctcgatggatgaaagcggccttaagggcctcgaggaagaacgccgtctggcctatgtgggcatcacccgcgccgagaaggtctgcacgatttcctttgcgggcaaccggcgggtctttggccagtggcagtcgcaactgccttcgcgctttattgacgagctgcccgaagagcatgtggatgtgctgacccctcccggcctctatggtggcgggtttggggccgctgcgccttcggcctctgcggttgccgagccagcggtgcgttccaccatcgaggagcggatgagcaacgccgatggctataactcgcccggctggaaacggatgcaggcccgcacggcggaacgtggctacagcaaaccgcgcaagagcgaggcgcagaccatcgacctggcggcgacctccagctttacggttggggagcgggtgtttcaccagaaattcggctatggtgccgtggtcgggatcgagggcgacaagctcgaggtggattttgaaaaagccggccccaagaaggtggtggcgcgctttgtttccgccagcgatgacatcccgttctaa

SEQ ID NO: 44060 - protein, 814 aa, Silicibacter sp. TM1040
MSTFDEMDAFEGASLSARAMAARPMPYLDGLNPAQRDAVETLDGPVLMLAGAGTGKTKALTTRIVHLLNTNKARTNEILAVTFTNKAAREMKDRVGRMLGQPAEGMPWLGTFHSICVKLLRRHAELVGLKSNFTILDTDDQIRLLKQLIQAAGIDDKRWPARMLANIIDDWKNRALTPAKVPAGDAAAYNHRGTEFYDQYQTRLKELNAVDFGDLLLHCVEIFQNNPDLLAQYHRWFRYILVDEYQDTNVAQYLWLRLLASGHKNICCVGDDDQSIYGWRGAEVGNILRFEKDFSGAKVIRLEQNYRSTKHILSAASGVIRGNEGRLGKELWTEAEGGEKVRLIGHWDGEEEARWIGEEIEAMQRGTRGMRQYGLNEMAILVRASHQMRAFEDRFLTIGLPYRVIGGPRFYERLEIRDAMAYFRVVISPEDDLAFERIVNTPKRGLGDKAQQTIQTVARANGVSLLEGARLAVEDGLIKGKGGAALRRLVENIARWGQMTRTVLADPDDPDAVVEGVQSFEAFQARTEVSHVELAEIILDESGYTSMWQADKNPDSPGRLENLKELVKALENFDNLQGFLEHVSLVMDNDKQDAEQKVSIMTLHAAKGLEFPAVFLPGWEDGLFPSQRSMDESGLKGLEEERRLAYVGITRAEKVCTISFAGNRRVFGQWQSQLPSRFIDELPEEHVDVLTPPGLYGGGFGAAAPSASAVAEPAVRSTIEERMSNADGYNSPGWKRMQARTAERGYSKPRKSEAQTIDLAATSSFTVGERVFHQKFGYGAVVGIEGDKLEVDFEKAGPKKVVARFVSASDDIPF

SEQ ID NO: 44061 - DNA, 2352 bp, Myxococcus xanthus DK 1622
  CDS (1)..(2352): transl_table=11
atgtctcccgcgaacccacacgaatccgccctcctcgaagacctcaatgcgccgcagcgcgaggccgtgttgcatggtgacggccccctgctcgtcctgtcaggggcgggcagcggcaagacgcgcgtcatcacccggcgcgtggcgtatctggtgaaggtccacaacgtctacccgtggcgcatcctggccgtcaccttcaccaacaaggcggcgcgggagatgcgcgagcgcctggtgcagttgctgggggcccaggcgaacgagctggtggtgagcaccttccactcggcggcggcgcagattctccgccgagaggcggagcacgtggggctcacccgctccttcgtcatctacgacgactcggaccagctcaacgtggtgaagcgcgccatgcgcgaggcgggcatcgagtccatgcagccgcgcgaaatcctccaccgcatcgaccaggagaagaacgcggcccggctcccggagcacatgcaggtcgcgcccggcgacgagcggggccaactggtgcgcaaggtgtacgcggcctaccaggagcggctgcgcgcggccaacgcggtggacttcggagacctgctgctcctgctggtgacgctgttccgcacccggccggacgtgctggagaactatcggcgccgcttccaccacgtgctggtggatgagttccaggacaccaacccggtgcagtacgcgctgctgaagcaactggcgccgcccccttccgccaacctggtggtggtgggcgacgacgaccagtccatctaccggtggcgtggcgcggacgtggacaacatcctcggctttccgcggcagtaccccggcgcgaaggtggtcaagctggagcagaactaccgctccgaccagaacatcctggacgcggcgcatgaggtcatccggaagaacacgcggcgcatggagaagaagctctggtccgagcgccagcggggccagacgctcaacctgatgctcaaccgcgatgagcgggccgaggggcaggaggtggcgcggcagattctggcgctgcagcgggagggcttcatcaagctctccagcatggcggtgttctaccgggccaatgcgcagagccgcgtgttggaagaggcgctgcgtctggcgcgcgtcccgtacaccctggtgagcggacgcagcttctatgaccgggcggaagtgcgggatgcctccgcgtatctgcggctgatggtgaacccgcgctcggacgcggacctgctgcgcatcatcaacatcccggcgcgtggcattggcgacaccacggtggagcgggtgacggacttcgccaacgcgcgcggcgtgagcctctacgaggtcttgtcccagccggagcagattcccgcgctcaatggtgccgcggtgaagcggctcaagggcttccgcaacctgctggagtccctgacggccttcgcccagacgaacgaggaagccgcgggcgcggtggaccagatgcttcgcgagacgaagctggtggagacgcttcaggccgagggcagcgacgagtctcagacgcgcgcggagaacctccgcgagttcctgggcgcggcgcaggagttcgacctgaaccgggcggccgcggcggtggcggccgcggcgaatccccccagcgacgttcctcccgaagtggacgcggccccgctgacggcggacgtgccggcgctgcaggccttcctggagcagatttcgctggtgggcgaggcggacgcggaggtgggcgacggccgggtggcgctgatgacgctgcacgcggccaagggcctggagttcgacgccgtcttcctcaccggcatggaggagaacgtcttcccgcactcgcgcgcggtgaagtccgagtccacgttcctgaacgaggtcgcctcggcggatggggagccctcggaggagatggccgaggagcggcgcctctgctacgtgggtttcacgcgcgcgcgaaagcggctcttcgtgagtctggcccagtgtcgctcgctgttcggtgagctgcgctacaacgcgcccagccgcttcctgcgggatgtgccgccggcgctgttcggcatcagcgagcaggaagtccccgaagcgcctcggcccatggtgccctccacgcagcgcaggcggacctgggacgaggatgacgggccgcgcatcgaccgctcgtactcgcaggcgtcgtcggacatggacggcgtgggcggggacgtgcgcggcatgcgcgtgcgccacgagcagttcggcgtgggccgcgtggtgtccgcggacggcaacggccccaacgcgaaggtgacggtggagttcggtggaggcgtgggcctcaaacgcatcatcgcccgtttcctgataccgggctga

SEQ ID NO: 44062 - protein, 783 aa, Myxococcus xanthus DK 1622
MSPANPHESALLEDLNAPQREAVLHGDGPLLVLSGAGSGKTRVITRRVAYLVKVHNVYPWRILAVTFTNKAAREMRERLVQLLGAQANELVVSTFHSAAAQILRREAEHVGLTRSFVIYDDSDQLNVVKRAMREAGIESMQPREILHRIDQEKNAARLPEHMQVAPGDERGQLVRKVYAAYQERLRAANAVDFGDLLLLLVTLFRTRPDVLENYRRRFHHVLVDEFQDTNPVQYALLKQLAPPPSANLVVVGDDDQSIYRWRGADVDNILGFPRQYPGAKVVKLEQNYRSDQNILDAAHEVIRKNTRRMEKKLWSERQRGQTLNLMLNRDERAEGQEVARQILALQREGFIKLSSMAVFYRANAQSRVLEEALRLARVPYTLVSGRSFYDRAEVRDASAYLRLMVNPRSDADLLRIINIPARGIGDTTVERVTDFANARGVSLYEVLSQPEQIPALNGAAVKRLKGFRNLLESLTAFAQTNEEAAGAVDQMLRETKLVETLQAEGSDESQTRAENLREFLGAAQEFDLNRAAAAVAAAANPPSDVPPEVDAAPLTADVPALQAFLEQISLVGEADAEVGDGRVALMTLHAAKGLEFDAVFLTGMEENVFPHSRAVKSESTFLNEVASADGEPSEEMAEERRLCYVGFTRARKRLFVSLAQCRSLFGELRYNAPSRFLRDVPPALFGISEQEVPEAPRPMVPSTQRRRTWDEDDGPRIDRSYSQASSDMDGVGGDVRGMRVRHEQFGVGRVVSADGNGPNAKVTVEFGGGVGLKRIIARFLIPG

SEQ ID NO: 44063 - DNA, 2487 bp, Rhodococcus sp. RHA1
  CDS (1)..(2487): transl_table=11
atgaacactatctccggcaccgcttctcccctgagcgccacgtcgactccgcacgccgccgcaccggcgcgcgcagggtccgatgcgctcctccagggcctcaacccacagcaacgggaagcggtcgtgcacgccggttctccgctgttgatcgtcgcgggtgcgggctcgggcaagacggctgtgctcacccgccgcatcgcatatctgctggccgagcggggggtgatgcccggtcagatcctggccatcacgttcaccaacaaggctgccgcggagatgcgggaacgcgtcgcccacctcgtcggccccagggccaacagcatgtgggtgtccacgttccactcgagctgcgtgcggatcctgcgggcccaggcggcgctgctccccggcctcaactcgaacttctccatctacgacgcggacgattcgcggcgactgctgacgatgatcgccaaggatctgaacatcgacaccaagcgctactcggctcggctgctcgccacccacatctcgaatctcaagaacgagctcgtcgatcccgatcaggcgagtgccgacgccgacaaggatccggcggaactgcctcggctgatcgccaaggtgtacgggcactaccagcagcggttgcgttcggcgaacgcgctggacttcgacgacctgatcggcgagacggtcgcgatgctgcaggcgttcccccaggtggcggagtactaccgccggcggttccgccacgtgctggtcgacgagtaccaggacacgaaccacgcccagtacatgctggtacgcgagctggtcggcggaaccgcggacggcgaggacgcggaccaccgggtcgccccggccgagctgtgcgtggtgggcgacgcggatcagtcgatctacgcgttccgcggcgccacgatccgcaacatcgaggagttcgagcgcgactacccggacgcccgcaccatcctgctggagcagaactaccgctccacccagaacatcctgtcggcggccaactcggtgatctcgaagaacaccggccggcgtgagaagcggctgtggaccgattcgggcgtgggtgaactcatcaccggctatgtcgcggacaacgagcacgacgaggcgtcgttcgtggcgtccgagatcgacaagctcgtcgattccggcgacgccaagttcggcgacgtcgccgtgttctaccgcaccaacaattcgtcccgtgccctcgaggagatcttcatccggctcggcgttccgtacaaggtcgtcggcggagtgcggttctacgagcgcaaggaggtgcgcgacatcgtcgcgtatctccgtgtcctcgcgaacgagaacgacaccgtcagcctgcgccggatcctcaacacaccccgccgcggcatcggcgaccgcgccgaggcgtgcgtggccgtccattccgagcagcggggcatcagcttcgccgaggcactgcgggacggcggtgagggccgcgtaccgctgctgaacacccgttcccagaaggccatcgcgtcgttcctcgagctcatggacggactgcgggtgctgctcccaccggagaccactgcggacgacgtcgtccccgaccagctcggcgacatcggcgacgtcgtcgaggcggtcctggaacggacgggataccgcgccgaactcgcggcgagcagtgacccccaggacggggcgcgcctcgacaacctcaacgagctcgtcagcgtggcgcgtgagttcagctccgacgcgcggaacgcggccggcctcgtggaaccgccggaggacggcgacgtcgacgcccgcgacggcgaaccggaccccggttccctcgccgccttcctcgagcgagtgtccctggtcgcggactccgatcagctgcccgacaacgacgagggcgtcgtcacgctgatgaccctgcacaccgcgaaggggctcgagttccccgtcgtcttcgtcaccgggtgggaagacggtcagttcccgcacatgcgagcgctcggcgaccccacggaactgtcggaggagcgccggctcgcgtacgtcggcatcacccgtgcccggcagcggctgtatctgacgcgggccgtcatgcggtcggcgtggggccagcccatccagaacccggagtcgcggttcctgcaggagatcccgtctgatctcgtgcactggcgtcgtgaggaccccggcaccggtatcggttccggtggtgcgatcggcggtggccgtgcgcgtggatcgggatacggcggtcagggcttcggcggcggttccggttacggcggcgggtcggcaggcacgccgagctttggtgccgcccgcacccgcaacaacaacctggtgctcacggtcggcgaccgcgtcagtcacgacaagtacggcctcggcacggtcctcgagaccaagggcgccgggccgaccgcgacggtcaccatcgacttcggcagcgcgggcaaggtccggctgatgctgatcggtggcgtcccgatggtcaagctgtag

SEQ ID NO: 44064 - protein, 828 aa, Rhodococcus sp. RHA1
MNTISGTASPLSATSTPHAAAPARAGSDALLQGLNPQQREAVVHAGSPLLIVAGAGSGKTAVLTRRIAYLLAERGVMPGQILAITFTNKAAAEMRERVAHLVGPRANSMWVSTFHSSCVRILRAQAALLPGLNSNFSIYDADDSRRLLTMIAKDLNIDTKRYSARLLATHISNLKNELVDPDQASADADKDPAELPRLIAKVYGHYQQRLRSANALDFDDLIGETVAMLQAFPQVAEYYRRRFRHVLVDEYQDTNHAQYMLVRELVGGTADGEDADHRVAPAELCVVGDADQSIYAFRGATIRNIEEFERDYPDARTILLEQNYRSTQNILSAANSVISKNTGRREKRLWTDSGVGELITGYVADNEHDEASFVASEIDKLVDSGDAKFGDVAVFYRTNNSSRALEEIFIRLGVPYKVVGGVRFYERKEVRDIVAYLRVLANENDTVSLRRILNTPRRGIGDRAEACVAVHSEQRGISFAEALRDGGEGRVPLLNTRSQKAIASFLELMDGLRVLLPPETTADDVVPDQLGDIGDVVEAVLERTGYRAELAASSDPQDGARLDNLNELVSVAREFSSDARNAAGLVEPPEDGDVDARDGEPDPGSLAAFLERVSLVADSDQLPDNDEGVVTLMTLHTAKGLEFPVVFVTGWEDGQFPHMRALGDPTELSEERRLAYVGITRARQRLYLTRAVMRSAWGQPIQNPESRFLQEIPSDLVHWRREDPGTGIGSGGAIGGGRARGSGYGGQGFGGGSGYGGGSAGTPSFGAARTRNNNLVLTVGDRVSHDKYGLGTVLETKGAGPTATVTIDFGSAGKVRLMLIGGVPMVKL

SEQ ID NO: 44065 - DNA, 2181 bp, Haemophilus somnus 129PT
  CDS (1)..(2181): transl_table=11
atggatatttcagaattacttaatgatcttaatgaaaaacaacgcaatgctgttgttgcacctttgggtaattatctcgtacttgctggtgctggaagcggaaaaactcgagtattaacgtatcgtattgcttggttaagtgcggtagaaaaaatacctgaatcaagtattatggcggtaacttttaccaataaagcagcgatggaaatgcgtcatcgtattgaggcaactttagctcgttattcccatcaacgtgtattcggtatgtggattggcacttttcacagtattgccaatcgcttattgcgatcccattacgcagatgccggattgccacaggattttcaaattttagacagtgaagatcaacttcgcttagttaagcgtttgatgaaattgcatcaatatgatgaaaaaacctttccctataaacaagcttgttggtatatcaataataaaaaagaagaaggattacgccctaatcagattgaagataataatgatcgtcaagagcgagagtggatcaagatctataaaatttatcaagatgcttgtgatcgtgcaggattagtggattttgctgaattattattgagagcttatgaattgtggctaaaaaatccacatattttgcaatattatcaacagcgttttcagcacgttttgatcgatgaatttcaggatactaataaaattcaatatgcttggattaaattattagccggttcgcagggcaatgtaatgattgtcggagatgatgaccaatctatctatggttggcgtggtgctcaaattgagaatattcatcgttttcttaaagattttgcaaaagcgaaaattattcgtttagagcaaaattatcgttcaaccggcaacattttagaaagtgcaaaccgtttaatttccaataatagtaatcggttaggtaaggatctttggactgcgggtgaaaaaggagaacctgtggggatttatgcggcttttaacgagttggatgaggctttgtttgtctccggtcaggtacaaaattggctggataacggcggtaaggttgatgattgtgcagttttatatcgtagcaatagccaatctcgtgtgatagaagaggcatttctcagagctaaaattccttatcgcatttatggcggtatgcgattttttgaacgacaagagattaaagatgctttagcgtatttgcgtttaattgccaatcgacaagatgatgcggcttttgaacgtgttgtaaatacgccaccacgaggtattggtgagcgtactttagatattttgcgtaatttaactcgtgaaagacaagtgactttatggcaagcaactcagcttgccattcaagaaaatttaattcctatccgttcggtaactgttttgttacgttttattgaattaatcaattccttacaacaagaaaccgcagaaatgcccctatttgtacaaactgattttgtgattaaacattccggtttatatgacatgtataaacaggaaaagggggacaaaggggaagtgcgaattgaaaatttggaggaattggttaccgcaacgagagaatttataaaaccggatgaggctgaagatatgtctgatttagtggcgtttttaacacatgcctctttggaatctggagaagaacaagcagcctctcatcagccttgtgtgcaaatgatgacattgcattcagcgaaaggcttagaatttccaagagtatttattgttggtatggaagaggggcttttcccaagttttcgttcgggtgaagacttggcacgtttggaggaggaacgccgtttagcttatgtagggattactcgagcaaaacagaaattgacattgtgttatgcggaagttcgccgcttgtatggtaaagacgaaaaacatattccttctcgttttattgctgaattaccgcaagaatgtattcaagaagttcgtttacgtggcacagtgactcgagcttataaccgaagtgcagtgggttctatcgtcaaaactgatttatcggataatagttggaaagttggacaaaaggtgaaacatgaaaaatttggtcagggaacagtgattaatgttgagggggctgataataatacccgattacaaatcgcttttcagggacaaggtattaaatggctaatcgcgcatttagccaaattggaaaaaatttag

SEQ ID NO: 44066 - protein, 726 aa, Haemophilus somnus 129PT
MDISELLNDLNEKQRNAVVAPLGNYLVLAGAGSGKTRVLTYRIAWLSAVEKIPESSIMAVTFTNKAAMEMRHRIEATLARYSHQRVFGMWIGTFHSIANRLLRSHYADAGLPQDFQILDSEDQLRLVKRLMKLHQYDEKTFPYKQACWYINNKKEEGLRPNQIEDNNDRQEREWIKIYKIYQDACDRAGLVDFAELLLRAYELWLKNPHILQYYQQRFQHVLIDEFQDTNKIQYAWIKLLAGSQGNVMIVGDDDQSIYGWRGAQIENIHRFLKDFAKAKIIRLEQNYRSTGNILESANRLISNNSNRLGKDLWTAGEKGEPVGIYAAFNELDEALFVSGQVQNWLDNGGKVDDCAVLYRSNSQSRVIEEAFLRAKIPYRIYGGMRFFERQEIKDALAYLRLIANRQDDAAFERVVNTPPRGIGERTLDILRNLTRERQVTLWQATQLAIQENLIPIRSVTVLLRFIELINSLQQETAEMPLFVQTDFVIKHSGLYDMYKQEKGDKGEVRIENLEELVTATREFIKPDEAEDMSDLVAFLTHASLESGEEQAASHQPCVQMMTLHSAKGLEFPRVFIVGMEEGLFPSFRSGEDLARLEEERRLAYVGITRAKQKLTLCYAEVRRLYGKDEKHIPSRFIAELPQECIQEVRLRGTVTRAYNRSAVGSIVKTDLSDNSWKVGQKVKHEKFGQGTVINVEGADNNTRLQIAFQGQGIKWLIAHLAKLEKI

SEQ ID NO: 44067 - DNA, 2346 bp, Trichodesmium erythraeum IMS101
  CDS (1)..(2346): transl_table=11
atgccaagcactgactttctgactcagctaaatttatcccaacgccaagcagtagaacatttctgcggacctatgttggtcgtggcgggtgctgggtctggcaaaactagggcgttgacttatcgtgtagtccatctaatacgtcatcatcgggtacatccagaaaatattctggcggttacctttacaaataaagctgcacaggaaatgaaggaccgcattgaaaaagtatttgctcaagaacaagcggaagctaaatataacaaaccattttcagcattgacatcagaagaacaaatcaggttgcgatcgcaagtctacaaaaatatcactaaacatttatgggtgggaacttttcataatctttgcgctcgtattctgaggtttgatattaacaaatatcaggatgaaaaaaaacgtcattgggataaaaatttttctatatttgatgaaagtgatgctcaaagtttaattaagcaaattgtcactaaacagctaaatttggatgataaaaaatttgaaccacgttctgtgagatatgccattagtaatgctaaaaaccaaggaatgtcacctctagaatatcaaagagccgagccagattatcggggacgggtaattgctgaagtttatggaatttatcaagataatttagctgcgaacaatgctcttgattttgacgacctaatcagaataccagtagaattatttcggcaaaatgagcaaatattagcttattggtatcaacgttttaatcatattttagtagatgaatatcaagatactaatcggactcaatataattttattagatttttagctactaatggtgaagaccctaaatatattaaaaactgggaaaatcgttctatttttgtggtaggagatgtagaccaatctatttattctttccgcatggcagattatacaattttgcttgattttcagaatgattttggcgatggtttagctgatgaatatactcagacaatgattaagttggaggaaaattatcgctcacgggaaaatattttggcagtggcaaataagttgattgaaaataatactcaacgtattgacaaaactctcaaaccaaccaggggcataggggaagaaatttattgttatgaggcagaaaatgagttagaagaagcagaatttatttgtagtaaaattgcagaaattacagaccaatatccagacttagatttaggaagcttcgctgtactttatcgaacaaactctcagtcacgctccctcgaagaaaagttgattcattatgatattaaatatgtcataattgggggattgagattttatgatcggaaagaaattaaggatgctttagcttatttacgagtcattgcaaatcctgctgatactgttagtttactcagaattattaacactccgagaaggggtattggcaaggcaactattgatagtttattaaatgctagttcccagatgggaatacctttgtgggaaattattaatgatcaagcttcagtaaatgctttggcaggtcgttcatcaaaagctgtaaataagtttgccgaagtaattcaacatttgcaagatgagttagaaaatttgactgctctggaaattgttgagagaattttagaaaattctggttatattgaaaacttgaaaaaacaggatacggaagatgcagataatcgactggcaaatttaggagaattatgtagtgctgtagctcagtttcaagaagataatgaagatacaactttaggaagttttttagcaaatgcttctttagcttctaatttagataaccttcaagatgggcaggaagctgtgtctttaatgactttacattctgctaaaggtttagaatttcccgtagtatttatagtgggtttggagcaaggtttattacctcattttcggagcataaatgaccctttatctttagaagaagaaaggcgactttgttatgtaggtattactagagccgaagaacaattatttttttcttatgcaactgaaagacgacagctttggggagcaagagatgccacagttccatctcaatttttgggagaattaccaagagatttgattaatactaatgggatgaaaaaagtaatttatccgtcaaagcatcaaaggaaaaacacaaaaaatactgttggaaaaaaatcggtaagtaatcaaataaaaagttggcaagtcggggataaagtgatgcatgaaagttttggtgtggggttagtaacaaacattctgggtgaaggacataagatgagtttaggtatcaaatttggtaagagtaaaaaaattattgatcccaaaacgccatcaatagaaaagttgaattaa

SEQ ID NO: 44068 - protein, 781 aa, Trichodesmium erythraeum IMS101
MPSTDFLTQLNLSQRQAVEHFCGPMLVVAGAGSGKTRALTYRVVHLIRHHRVHPENILAVTFTNKAAQEMKDRIEKVFAQEQAEAKYNKPFSALTSEEQIRLRSQVYKNITKHLWVGTFHNLCARILRFDINKYQDEKKRHWDKNFSIFDESDAQSLIKQIVTKQLNLDDKKFEPRSVRYAISNAKNQGMSPLEYQRAEPDYRGRVIAEVYGIYQDNLAANNALDFDDLIRIPVELFRQNEQILAYWYQRFNHILVDEYQDTNRTQYNFIRFLATNGEDPKYIKNWENRSIFVVGDVDQSIYSFRMADYTILLDFQNDFGDGLADEYTQTMIKLEENYRSRENILAVANKLIENNTQRIDKTLKPTRGIGEEIYCYEAENELEEAEFICSKIAEITDQYPDLDLGSFAVLYRTNSQSRSLEEKLIHYDIKYVIIGGLRFYDRKEIKDALAYLRVIANPADTVSLLRIINTPRRGIGKATIDSLLNASSQMGIPLWEIINDQASVNALAGRSSKAVNKFAEVIQHLQDELENLTALEIVERILENSGYIENLKKQDTEDADNRLANLGELCSAVAQFQEDNEDTTLGSFLANASLASNLDNLQDGQEAVSLMTLHSAKGLEFPVVFIVGLEQGLLPHFRSINDPLSLEEERRLCYVGITRAEEQLFFSYATERRQLWGARDATVPSQFLGELPRDLINTNGMKKVIYPSKHQRKNTKNTVGKKSVSNQIKSWQVGDKVMHESFGVGLVTNILGEGHKMSLGIKFGKSKKIIDPKTPSIEKLN

SEQ ID NO: 44069 - DNA, 2169 bp, Shewanella sp. MR-4
  CDS (1)..(2169): transl_table=11
atggacgtatcttctttactagacggcctgaatgataaacagcgcgaggctgtcgcggcaccgcaatccagcatgttagtgcttgcgggcgcaggcagtggcaaaacgcgagtattaacccaccgtatcgcgtggttaatgcaggtcgaacagcagagcccttactcaattttagccgtgacgtttaccaataaagccgcagccgagatgcgtgagcgggtggagaaggtcgctggcaccaatatggggcggatgtggattggtaccttccacgggttagcgcatcgtctgttacgcactcacttccaagatgcgggactaccgcaaagcttccaaattctcgattcggacgatcaggtgcgtttgctgaaacgcatccttaaaagtttgaatctggatgaaaaacaatatcctccccgtcaggcgcaggcctatatcaatggcaagaaagaccaaggattacggcccaagcatattgatgcgggtggtttcccgattgagcaaaacctgctgaagatttatcaggtttatcaagagtcttgcgaccgcgcaggtttagtcgactttgccgaaatcctgctgcgtgcccacgagctgtggctcaataaaccgcatctgctggcgcattatcaggagcgttttaagcatattctggtggacgagttccaggataccaacgccatccaatatgcgtggatccgtgtgttggccggccaaactgccaacgtgatgatagtgggtgacgatgaccaatccatttacggttggcgcggcgctcaggttgaaaacctgcaccggttcctgcgggattttccgactgcgactacgattcgcctcgagcaaaattatcgctccaagggcaatattttgaaggcgtcgaacgcccttatcgccaataaccctgagcgtttaggtaaagagctgtggaccgacgaagccgatggtgagccgatttccctctactgcgcctttaacgaaatggacgaggcgcgctttattgtcggtcgtatcaatgattggtacgaaaaaggcggcaatttaagtgactgcgcgattttatatcgctcaaacgctcagtcgcgcgtgctcgaagaagccttattacacaaaggcttagcctatcgtatttacggtggcctgcgcttcttcgaacgccaagagattaaagatgctatgggttatatgcgtcttatcagcaataaaaatgacgatgccgccttcgagcgcgtggtcaatacgccgccccgtggcattggcgatcgcaccttagatattctgcgttcgaccgcccgtcagcaagagcttacgttatggcaggcttgtttacgtttgctggatgaaaaggtgctggctggccgcgccgcctctgcggtacgtggctttatggatcttatcgtcaccctgcaggaagaaactcaggacatggcgctgtaccggatgacagacacagtgatccaagcctctgggcttaaggccatgtacgaggcggaaaaaggcgagaaggcccacgcccgtatcgaaaacttagaggaactcgttactgcggcgcgtaccttcgaaatgccagaggagcttgaggatatgggcgagctgaatgccttcttatcccatgcagccctagaggcgggcgaaggtcaggccgatgcctttaccgatgccgtacagttaatgacactgcactcggccaaggggcttgagtttactatggtgtttatggcgggcgtcgaggaggggattttcccgagtaagatggcgctcgaagagggcgacagactcgatgaggaacgccgcctctgttacgtgggcatgacccgcgcgatggaaaaactctatatcacctatgccgaatcccgccgtatttatggtcgcgaggattatgcccgcccatcgcgctttattaaggaaattccgccgcaatatgtggacgaaattcgcttaaaagcgcaggtgtcaacgccgatggcgaataatcgcttcagtacgcaaaagtcggcggtcgccaacgatactggctttagcgtcggccaaagggtgcatcatccaaaatttggtgacggcaaagtgactaacttcgaaggcagtggcgcacaggcgcgggtgcaggtgaattttagtgattttggcagtaagtggctggtggtggcctacgcgcgtttagaggcgcgttga

SEQ ID NO: 44070 - protein, 722 aa, Shewanella sp. MR-4
MDVSSLLDGLNDKQREAVAAPQSSMLVLAGAGSGKTRVLTHRIAWLMQVEQQSPYSILAVTFTNKAAAEMRERVEKVAGTNMGRMWIGTFHGLAHRLLRTHFQDAGLPQSFQILDSDDQVRLLKRILKSLNLDEKQYPPRQAQAYINGKKDQGLRPKHIDAGGFPIEQNLLKIYQVYQESCDRAGLVDFAEILLRAHELWLNKPHLLAHYQERFKHILVDEFQDTNAIQYAWIRVLAGQTANVMIVGDDDQSIYGWRGAQVENLHRFLRDFPTATTIRLEQNYRSKGNILKASNALIANNPERLGKELWTDEADGEPISLYCAFNEMDEARFIVGRINDWYEKGGNLSDCAILYRSNAQSRVLEEALLHKGLAYRIYGGLRFFERQEIKDAMGYMRLISNKNDDAAFERVVNTPPRGIGDRTLDILRSTARQQELTLWQACLRLLDEKVLAGRAASAVRGFMDLIVTLQEETQDMALYRMTDTVIQASGLKAMYEAEKGEKAHARIENLEELVTAARTFEMPEELEDMGELNAFLSHAALEAGEGQADAFTDAVQLMTLHSAKGLEFTMVFMAGVEEGIFPSKMALEEGDRLDEERRLCYVGMTRAMEKLYITYAESRRIYGREDYARPSRFIKEIPPQYVDEIRLKAQVSTPMANNRFSTQKSAVANDTGFSVGQRVHHPKFGDGKVTNFEGSGAQARVQVNFSDFGSKWLVVAYARLEAR

SEQ ID NO: 44071 - DNA, 2169 bp, Shewanella sp. MR-7
  CDS (1)..(2169): transl_table=11
atggacgtatcttctttacttgacggcctaaatgataaacagcgtgaggctgttgcggcaccgcaatctagcatgttagtgcttgcgggcgcaggcagtggcaaaacgcgagtattaacccaccgtatcgcgtggttaatgcaggttgaacagcagagtccttactcgattttagccgtgacgtttaccaataaagccgcggccgagatgcgcgagcgggttgaaaaagtcgctggtaccaatatggggcggatgtggattggtactttccacgggctggcgcatcgtttattacgcactcacttccaagatgcggatttaccgcaaagcttccaaattctcgattcggacgatcaggtgcgcttgctgaaacgcatccttaaaagtttgaatctggatgaaaaacaatatcctccccgtcaggcgcaggcctatatcaatggcaagaaagaccaaggtttgcggcccaagcatatcgatgcgggtggttttccgattgagcaaaacctgctgaagatttatcaggtttatcaagagtcttgcgaccgcgcgggtttagtcgactttgccgaaatcctgctgcgtgcccacgagctgtggctcaataaaccgcatctgctggcgcattatcaggagcgttttaagcatattctggtggacgagttccaggatactaacgccatccaatatgcgtggatccgcgtgctggcaggccaaaccgctaacgtgatgatagtgggtgacgacgaccaatccatttacggttggcgcggcgctcaggttgaaaacctgcaccgcttcctgcgggatttccccacggcgactacgattcgcctcgagcaaaattatcgctccaagggcaatattttgaaggcgtcgaacgcccttatcgccaataaccccgagcgtttaggtaaagagttgtggaccgacgaagccgatggtgagccgatttccctctactgcgcctttaacgaaatggacgaggcgcgctttattgtcggtcgtatcaatgattggtacgaaaaaggcggcaatttaagtgactgcgcgattttatatcgctcaaacgctcagtcgcgcgtgctcgaagaagccttattacacaaaggcttagcctatcgtatttacggtggcctgcgcttcttcgaacgccaagagattaaagatgctatgggttatatgcgtcttatcagcaataaaaatgacgatgccgccttcgagcgcgtggtcaatacgccgccccgtggcattggcgatcgcactctagatattttacgcactaccgcgcgtcagcaggaactcaccctgtggcaggcttgtttacgtttgctggatgaaaaggtgctcgcaggccgagccgcctcggcggtacgtggctttatggatcttatagttaccctgcaggaagaaactcaggatatggcgctgtaccggatgacggacacagtgatccaagcctctgggcttaaggccatgtacgaggcggagaaaggcgaaaaggcccacgcccgtatcgaaaacttagaggaactcgttactgcggcgcgcaccttcgaaatgccagaggagcttgaggatatgggcgagcttaacgccttcctatcccatgcggccctagaggcgggcgaaggtcaggccgatgcctttaccgatgccgtacagttgatgacactgcactcggccaaggggctggagtttaccatggtgtttatggcgggcgtcgaggaggggattttcccgagtaagatggcgctcgaagagggcgacagactcgatgaggaacgccgcctctgttacgtgggcatgacccgcgcgatggaaaaactctatatcacctatgccgaatcccgccgtatttatggccgtgaagattatgcccgtccatcgcgttttattaaggaaattccgccgcaatatgtggacgaaattcgcttaaaagcgcaggtgtcaacgccgatggccaataatcgcttcagcgcgcaaaagtcggcggtcgccaacgatactggctttagcgtcggccaaagggtgcatcatccaaagtttggtgacggtaaagtgactaacttcgaaggcagtggcgcgcaggcgcgggtacaggtgaattttagtgattttggcagtaagtggctggtggtcgcctacgcgcgtttagaggcgcgttga

SEQ ID NO: 44072 - protein, 722 aa, Shewanella sp. MR-7
MDVSSLLDGLNDKQREAVAAPQSSMLVLAGAGSGKTRVLTHRIAWLMQVEQQSPYSILAVTFTNKAAAEMRERVEKVAGTNMGRMWIGTFHGLAHRLLRTHFQDADLPQSFQILDSDDQVRLLKRILKSLNLDEKQYPPRQAQAYINGKKDQGLRPKHIDAGGFPIEQNLLKIYQVYQESCDRAGLVDFAEILLRAHELWLNKPHLLAHYQERFKHILVDEFQDTNAIQYAWIRVLAGQTANVMIVGDDDQSIYGWRGAQVENLHRFLRDFPTATTIRLEQNYRSKGNILKASNALIANNPERLGKELWTDEADGEPISLYCAFNEMDEARFIVGRINDWYEKGGNLSDCAILYRSNAQSRVLEEALLHKGLAYRIYGGLRFFERQEIKDAMGYMRLISNKNDDAAFERVVNTPPRGIGDRTLDILRTTARQQELTLWQACLRLLDEKVLAGRAASAVRGFMDLIVTLQEETQDMALYRMTDTVIQASGLKAMYEAEKGEKAHARIENLEELVTAARTFEMPEELEDMGELNAFLSHAALEAGEGQADAFTDAVQLMTLHSAKGLEFTMVFMAGVEEGIFPSKMALEEGDRLDEERRLCYVGMTRAMEKLYITYAESRRIYGREDYARPSRFIKEIPPQYVDEIRLKAQVSTPMANNRFSAQKSAVANDTGFSVGQRVHHPKFGDGKVTNFEGSGAQARVQVNFSDFGSKWLVVAYARLEAR

SEQ ID NO: 44073 - DNA, 2178 bp, Alkalilimnicola ehrlichei MLHE-1
  CDS (1)..(2178): transl_table=11
atggaagccgaagccgacgtctccgacctgatagccgatctcaacgacgcccagcgcgaggcggtctgcgccgcgctcggccgttccctggtgctggccggtgcgggcagcggcaagacccgggtgctcacccgccgggcggcgtggctggtgcgggtggagggcgcctcccccttcggcatcatggcggtgaccttcaccaacaaggccgccgccgagatgcgccaccgcatcggtgagctgctcggcatccgcaccgccggcatgtgggtgggcaccttccacggcctgtcgcaccggctgctgcgcatgcacgcagcggatgccgggctaccggagaccttccagatcctcgacagcgacgaccagctccggctgatcaagcgggtgatgcgcggcatggagctcgacgagaagcgctatccgccccggcaggtgcgcggcgtgctcaatggctggaaggaggaggggctgcggcccgccgacatccaggcggacgccggggaaccgttccgctttgccgtctggcaggtctaccagacctacgagcagacctgccgtcgctccggcctggtggacttcgcggagctgctgttgcgcagcttcgagctgctccgcgaccggcccgacctgctggcccactaccgcgcccgcttccgccatctgctggtggacgagttccaggacaccaaccagttgcagtaccgttggctgcagcagttggccggggaggacagcgatgtcttcgtggtcggcgatgacgatcagtccatctacggttggcgcggggcccgggtggaaaacatccaccgctacgcccgcgagttcggcgaggtgagcatcacccggctggagcagaactaccgctccacggagaccatcctcaacgccgccaacgcgctgatcagccataacggcgggcgcatgggcaagaacctatggaccgagggcagccggggtgacccgatccagctttacgccgccttcaacgagaccgacgaggcccgttacgtggtcgaccgcatcgccgccctgctcgatgagggctatgcccgtgacgatttcgccatcctctaccgctccaacgcccagtcccgcgccttcgaggagagcctcctggcccgcggcctgccctaccgggtgtacggcggccagcgcttcttcgaccgggccgagattcgcgatgccctggcctatctgcgcctgctgatgaaccgccacgatgacgccgccttcgagcgggtgatcaataccccccggcggggcattggcaaccgcacgctggatcagatccgcgagggggcccgggcggccgacgcgagcctgtgggaatcggccgtccggatcatccgggccggtggcatcagtgcccgcgccggcaatgcggtgcagggcttcctgcagctgctggaccggctggaggaggagacggcgactctgccgttgcacgagcagatggatcgggtgattgttgccagcgggctgcgcagggacgccgaggcggacggcagtgaccgcggcgaggcccggcgggagaacctggacgaactggtgaccgcggcgcgcaacttcgagcaacaatacgagcgcgacgaggggctgacccccctcaccgcctttctcacccacgcggcgctggaggcgggcgaggcccagggggaggaggggcagccctgcgtgcagttgatgaccctgcactcggccaagggcctggagttcccggtggtctttctggtcgggctggaagaggggctgttcccgcaccggatgtccaccgaggagcccgggcgcatggaggaggagcgacggctcgcctacgtggggatcacccgtgcccgcgagcgcctgtacctggcctacgccgaaaagcggcggctgcacgggatggacaactacggcatgccgtcccgctttatccaggagatcccggccgattatatcgaggaggtgcgggcgcggatgaaggtgacccgtcccggcgccaccgccgcggccatgcagtcggagccggtggatgggatcaccctcggcagccgggtccgccacgaccgtttcggcgagggggtggtgttgcggctcgaggggcaggggccctcggcgcggatccaggtgcagttcgcgcgggcgggggccaagtggctggtggctgcctacgccaacctcaggctggtgggctga

SEQ ID NO: 44074 - protein, 725 aa, Alkalilimnicola ehrlichei MLHE-1
MEAEADVSDLIADLNDAQREAVCAALGRSLVLAGAGSGKTRVLTRRAAWLVRVEGASPFGIMAVTFTNKAAAEMRHRIGELLGIRTAGMWVGTFHGLSHRLLRMHAADAGLPETFQILDSDDQLRLIKRVMRGMELDEKRYPPRQVRGVLNGWKEEGLRPADIQADAGEPFRFAVWQVYQTYEQTCRRSGLVDFAELLLRSFELLRDRPDLLAHYRARFRHLLVDEFQDTNQLQYRWLQQLAGEDSDVFVVGDDDQSIYGWRGARVENIHRYAREFGEVSITRLEQNYRSTETILNAANALISHNGGRMGKNLWTEGSRGDPIQLYAAFNETDEARYVVDRIAALLDEGYARDDFAILYRSNAQSRAFEESLLARGLPYRVYGGQRFFDRAEIRDALAYLRLLMNRHDDAAFERVINTPRRGIGNRTLDQIREGARAADASLWESAVRIIRAGGISARAGNAVQGFLQLLDRLEEETATLPLHEQMDRVIVASGLRRDAEADGSDRGEARRENLDELVTAARNFEQQYERDEGLTPLTAFLTHAALEAGEAQGEEGQPCVQLMTLHSAKGLEFPVVFLVGLEEGLFPHRMSTEEPGRMEEERRLAYVGITRARERLYLAYAEKRRLHGMDNYGMPSRFIQEIPADYIEEVRARMKVTRPGATAAAMQSEPVDGITLGSRVRHDRFGEGVVLRLEGQGPSARIQVQFARAGAKWLVAAYANLRLVG

SEQ ID NO: 44075 - DNA, 2346 bp, Hyphomonas neptunium ATCC 15444
  CDS (1)..(2346): transl_table=11
atgttcctgatgagttctaacccgaatcgtctctccatcagccagatggcatctgcccgcccgcccgtgcccacgggcgatggcgcggcctatctcaatggcctgaacccggagcagcgcgacgccgtgctgcacaccgaaggcccgctgctggtgctggccggtgccggtacgggcaagacgcgcgtgcttacctcgcggctcgcccatatcgttgccacgcgccttgcctatccctcgcagacgctgacggtgaccttcaccaacaaggccgcccgcgaaatgcgcgagcgggcccaggcattgctgggggacgcgggcgaggggctgagatggctcggcacgttccactccatctcggcgcagatcctgcgtaagcatgccgagctcgtcggcctgaaatccagcttcaccatcctcgataccgacgaccagatccgcctctgcaagcagatcgtccaggccgaaaaccttgatcccaagcgctggaccccgcgttatctcgccggtctcatcgatggctggaagaaccgcgcgctgacgccctcaaaggtgccgcccgaagaggccgaactgttcggcaatggaaaggcgatcaaatgctacgagatctatcaggcgcggttgagggtgctcaacgcctgcgactttggcgatctgctgatccacaacatcacgatctttcaggaaagccctgatattcttcgcgaatatcatgaccgcttccgctacattctggtcgatgagtatcaggataccaacgtcgctcagtatctctggctgcgcctcctcgcgcagggctcgaagaacctctgctgcgtgggcgatgacgaccagtcgatctatggctggcgcggcgccgaggtcgacaacatcctgcgcttcgagaaggactttcccggcgccaaggtcgttcgcctggagcgtaactaccgctccacccgccacatcctggcggccgcttccagcgtcatcgcgcacaataagggccgtctcggcaagacgctgtatgtcggcaatgacagcgccgtaaacgaggataccgacgcaccgaaggtaaaggtgcgcggcctctgggacggggaggcggaaagccgcctgatcgccgacgacatcgaaagctgggtgcgcggcggcgggcgccatgatggctgcgccgtgctcgtgcgcgcctcctggcagatgcgggcgtttgaagaacgcttcatccttctgggcattccctaccgcgtcatcggcggcccgcgcttcttcgagcgcgccgaaatccgcgatgcaatggcctatctgcgcctcatccgctcgcctgatgatgacctggcatttgagcgcgtggtgaacgagcccaagcgcggggtgggggataccagcctcgccaaactgcaatcctatgcccgccaggacgggcgcagcctgttcacgctcacccctatggtgctgcaaaccgatgagatcaaaggcggcgccaagcgcggcctgacgacgttcatcgaccagatcaacctctggcgcggcaagctcgccggtgggatgccgcacacagaactcgccgagatgatcctcgaagagtccggctataccgacatgctgcagaaggaccgcagccctcaggcgcagacccggctcgacaacctcaaggaactcgtccgcgccatgggcgagttcgacacgctggccggcttcctggaacatgtggagctggtgatggacgcctcggcgggcggaaacggcgaggatcaggtgcagattctcaccctccacgccgccaagggccttgaatggccagtggttttcctgcccggctgggaagaggaagtgttcccctcccgccgcagcctcgatgaaagcggcctcaagggcctcgaggaagagcgccgcctcgcctatgtcggcatcacgcgcgcgcgggagcggtgttacatctccttcgtcgccaaccggcaaatttacggccgctggcaggcggtgatgcccagccgcttcattgacgagctgccgcccgaacatgtcgatgctgtctcggagacaggctattccggcctgcccgccagcgccgacgccttttccggtacgatcgaggatctgggcgagcgctctgattatcagagccccggctggaagcgcctcaaggaaaatgcaggccggcccacaggcgccccgccacgtgatgctgccgggctgaccgccaccgcctcgggcacttccggctttaccaccggcgcccgcgtcttccatgacaagtttggctatggccgcgtcgccttctccgagggcaacaagctgaccgtcgatttcgacaagaccggccgcaagaaagtcatcgccaccttcgtgacgaaagcctga

SEQ ID NO: 44076 - protein, 781 aa, Hyphomonas neptunium ATCC 15444
MFLMSSNPNRLSISQMASARPPVPTGDGAAYLNGLNPEQRDAVLHTEGPLLVLAGAGTGKTRVLTSRLAHIVATRLAYPSQTLTVTFTNKAAREMRERAQALLGDAGEGLRWLGTFHSISAQILRKHAELVGLKSSFTILDTDDQIRLCKQIVQAENLDPKRWTPRYLAGLIDGWKNRALTPSKVPPEEAELFGNGKAIKCYEIYQARLRVLNACDFGDLLIHNITIFQESPDILREYHDRFRYILVDEYQDTNVAQYLWLRLLAQGSKNLCCVGDDDQSIYGWRGAEVDNILRFEKDFPGAKVVRLERNYRSTRHILAAASSVIAHNKGRLGKTLYVGNDSAVNEDTDAPKVKVRGLWDGEAESRLIADDIESWVRGGGRHDGCAVLVRASWQMRAFEERFILLGIPYRVIGGPRFFERAEIRDAMAYLRLIRSPDDDLAFERVVNEPKRGVGDTSLAKLQSYARQDGRSLFTLTPMVLQTDEIKGGAKRGLTTFIDQINLWRGKLAGGMPHTELAEMILEESGYTDMLQKDRSPQAQTRLDNLKELVRAMGEFDTLAGFLEHVELVMDASAGGNGEDQVQILTLHAAKGLEWPVVFLPGWEEEVFPSRRSLDESGLKGLEEERRLAYVGITRARERCYISFVANRQIYGRWQAVMPSRFIDELPPEHVDAVSETGYSGLPASADAFSGTIEDLGERSDYQSPGWKRLKENAGRPTGAPPRDAAGLTATASGTSGFTTGARVFHDKFGYGRVAFSEGNKLTVDFDKTGRKKVIATFVTKA

SEQ ID NO: 44077 - DNA, 2187 bp, Pseudomonas aeruginosa UCBPP-PA14
  CDS (1)..(2187): transl_table=11
atgaacgacgacctctccctcctgctgaactccctcaacgacccgcagcgccaggccgtggccgcgccgctgggccgccaactggtcctcgccggcgccggctcgggcaagacccgcgtgctggtgcaccggatcgcctggctgatccaggtcgagcacgcctcgccctacagcatcctgtcggtgaccttcaccaacaaggcggcggcggagatgcgccaccgcatcgagcagttgctcgggatcaatccggcgggcatgtgggtcggcaccttccacggcctcgcccatcgcctgctgcgcgcgcactggcgcgaggccgggctgagcgagaacttccagatcctcgacagcgacgaccagcaacgcctggtcaagcgggtgatccgcgaactcggcctcgacgagcagcgctggccggcgcgccaggcccagtggttcatcaacgggcagaaggacgagggcctgcggccgcaacacatccagcccggcggcgacctgttcctcgccaccatgctgaagatctacgaagcctacgaggcggcctgcgcccgcgccggggtgatcgacttctccgagctgctgctgcgcgccctggacctctggcgcgaccatcccggcgtgctcgagcactaccagcggcgcttccgccatatcctggtggacgagttccaggacaccaacgccgtgcagtacgcctggctgcggattctcgccaagggcggcgacagcctgatggtggtcggcgacgacgaccagtcgatctacggctggcgtggcgcacggatcgagaacatccaacagttcagcgacgacttcgccgacgccgaggtgatccgcctggagcagaactaccgttccaccgcgtcgatcctcaaggccgccaacgccctgatcgccaacaaccagggacgcctgggcaaggagttgtggaccgacggcgaggacggcgagtcgctgagcctgtacgccgcgttcaacgagcacgacgaggcgcgctacgtggtcgagtcgatcgagagcgcgctcagaggcggcctggcgcgcagcgagatcgccatcctctaccgctccaacgcccagtcgcgggtgctggaggaagccctgctgcgggagaagattccctaccgcatctacggcggccagcgcttcttcgagcgtgccgagatcaagaacgccatggcctacctgcgcctgctcgacggccgcggcaacgacgcggcgctggaacgggtggtcaacgtgccggcacgcggcatcggcgagaagaccgtggagagcatccgcgaattcgcccgcggcaacgatgtgtcgatgtgggaggcgattcgcctgatgatcgccaacaaggtcctgcccggccgcgccgccagcgccctgaccggcttcgtcgagctgatcgagaatctttcggcgaaggtcatggacatgccgctgcacctgatgacccagacggtgatcgagcagtccggactgatcagctaccacaaggaagaaaaaggcgagaaaggccaggcccgggtggagaacctcgaggaactggtcagcgccgcccgcgccttcgagaacagcgaggaagaggaagacctcaccccgctgcaggccttcctcagccacgcctccctggaggccggggaaacccaggccgacgcccacgaggacagtatccaactgatgaccctgcacagcgccaagggcctggagttcccgctggtgttcctggtcggcatggaggaagggctgttcccgcataagatgagcctggaggaatccggccgcctggaagaggaacgccgcctggcctacgtcggcgtcacccgcgccatgcagcgactggtcctgacctacgcggagacccgccggctctacggtagcgagacctacaacaaggtttcgcgcttcatccgcgagatcccgccgtcgctgatccaggaagtgcgcctgtccaataccgtcagccgcccctacggcggcacttcgcgcaacgccggcggcagcctgttcagcggcgccggggtgccggagacgcccttctccctcggccagcgggtgcgccacgcgctgttcggcgaagggactatcctcaacttcgaaggcgccggcgcccaggcccgggtgcaggtgaacttcgagagcgaaggcagcaagtggctgatgctcggctacgccaagctggaagccctgtag

SEQ ID NO: 44078 - protein, 728 aa, Pseudomonas aeruginosa UCBPP-PA14
MNDDLSLLLNSLNDPQRQAVAAPLGRQLVLAGAGSGKTRVLVHRIAWLIQVEHASPYSILSVTFTNKAAAEMRHRIEQLLGINPAGMWVGTFHGLAHRLLRAHWREAGLSENFQILDSDDQQRLVKRVIRELGLDEQRWPARQAQWFINGQKDEGLRPQHIQPGGDLFLATMLKIYEAYEAACARAGVIDFSELLLRALDLWRDHPGVLEHYQRRFRHILVDEFQDTNAVQYAWLRILAKGGDSLMVVGDDDQSIYGWRGARIENIQQFSDDFADAEVIRLEQNYRSTASILKAANALIANNQGRLGKELWTDGEDGESLSLYAAFNEHDEARYVVESIESALRGGLARSEIAILYRSNAQSRVLEEALLREKIPYRIYGGQRFFERAEIKNAMAYLRLLDGRGNDAALERVVNVPARGIGEKTVESIREFARGNDVSMWEAIRLMIANKVLPGRAASALTGFVELIENLSAKVMDMPLHLMTQTVIEQSGLISYHKEEKGEKGQARVENLEELVSAARAFENSEEEEDLTPLQAFLSHASLEAGETQADAHEDSIQLMTLHSAKGLEFPLVFLVGMEEGLFPHKMSLEESGRLEEERRLAYVGVTRAMQRLVLTYAETRRLYGSETYNKVSRFIREIPPSLIQEVRLSNTVSRPYGGTSRNAGGSLFSGAGVPETPFSLGQRVRHALFGEGTILNFEGAGAQARVQVNFESEGSKWLMLGYAKLEAL

SEQ ID NO: 44079 - DNA, 2274 bp, Pediococcus pentosaceus ATCC 25745
  CDS (1)..(2274): transl_table=11
ttgccagaaattaatttaataaaaggccttaatgatatgcaaaaagaagcggttcagacaactgaaggaccgttattgattatggccggcgccggtagtggtaagacccgagttttgacgcaccgcgttgcatatctaatagaagaaaaaggtgttaatccgtggaatgttttggcaattaccttcactaataaggctgctagagagatgcgtgagcgagttactagtttgctgggtgatgaagctgctgaaatttgggtatcaacgttccatgctctttgcgtaagaattttaagaagaaatattgatcaacttggatataatcgagcattttcgattgccgatcctagcgaacaaagaaccctagttaaacatattttagccgatttaaattatgatcctaaaaagtttgatccacgttcagttttaggaacgatttccaatgctaaaaatgatttaaaaacgccactcacttatcgtgagaatgcaagtactccatatgaacaggtagtcgcagatatctatgaagaatatcagcgtcgcttagagaacaatcaggctttagattttgatgatttgattatgaaaaccatcgaacttttccaaaagaatcctgaaaccttatcattttatcaaaataaatttcattatattcatgtggatgaatatcaggatactaatcaggctcaatatcaattagtaacgatgctagctaaacattttagaaatatctgtgtagttggtgattctgatcaaagtatttatggttggcggggcgccgatatgcaaaacatcatgaactttgaatcagattatccagattcaaagactgtaatgttggaacaaaactatcgttcaacccaaaatattttaaatgctgctaatgatgtgattgaaaataatgtagaacgtaaacctaaacaactttggactgataatgatgaaggtgaaaaaatttcatattatcgtggccagacggggattgatgaagcccatttcatcgttcaaaaaattcgtgagcaaattaaagagcataatttaaattacggagattttgccattctttaccggacgaatgcacagtcacgagtaattgaagatacgtttgttaaatccaacatcccttacttaatggtcgggggacataaattctacgatcgtaaggaaattagagatgtactgagttaccttactttgattgctaacgaagacgattcgatgagttttgaacgagtgatcaatgaacctaaacgtgggattggttcgacttctattgctaaattacaagctttcgcggatgaaaataattggtccttattgaaagcggctcgtagtgttcagattgcaaatggaatttctagtcgagctcgcaatgcaattgaagatttcgctaagatgattgacgctctacgtaaatcaggtgaatttttaaatatcacagaattaacagaagcagtcttggaacaaactggttatcgagctgctttagaaaaatctagaacgatggaatcagaagcacgccttgaaaatattgacgaatttttaacagttactaagcaatttgacgataagaatgaagctgagggaaatgaaattgctgacgaaaatggtgataacattcaattagtagatttcctagcggatttggccttagtttctgatcaagataatgtggaagaagaaccatcaggagtaaccctcatgaccctgcatgcggctaagggtcttgaatttccaatcgtatttttagttgggatggaagatggaattttcccactttctagagcaatgatggaccaagaacaattggaagaagaacgacgattagcctatgttggaatcacccgagcacgtcaaaagttgtatattacgaatgcttattctagaatgctttatggtaggacacaaactaatccagcttcacggttcatttcagaaattggatcacaatatttgaagagtgaaaatgaagaaaagagtttttcaagaaatactaaagaaaaatcatatccgtttgacaataaccgaaatgcacgcgcaacagctagtgtttatggtaatacccatgctacggcggttaaatctaatggtagcggagctggtaaagttagctggaatgctggggataaagtcgaacataaagcttggggtattggtaccgtagtgaaggtgtctggcgctggagaagatgccgaattggatatcgcctttaaagatcaaggaattaagcggttattggccgcttttgcaccaattaaacgggttgttgaataa

SEQ ID NO: 44080 - protein, 757 aa, Pediococcus pentosaceus ATCC 25745
MPEINLIKGLNDMQKEAVQTTEGPLLIMAGAGSGKTRVLTHRVAYLIEEKGVNPWNVLAITFTNKAAREMRERVTSLLGDEAAEIWVSTFHALCVRILRRNIDQLGYNRAFSIADPSEQRTLVKHILADLNYDPKKFDPRSVLGTISNAKNDLKTPLTYRENASTPYEQVVADIYEEYQRRLENNQALDFDDLIMKTIELFQKNPETLSFYQNKFHYIHVDEYQDTNQAQYQLVTMLAKHFRNICVVGDSDQSIYGWRGADMQNIMNFESDYPDSKTVMLEQNYRSTQNILNAANDVIENNVERKPKQLWTDNDEGEKISYYRGQTGIDEAHFIVQKIREQIKEHNLNYGDFAILYRTNAQSRVIEDTFVKSNIPYLMVGGHKFYDRKEIRDVLSYLTLIANEDDSMSFERVINEPKRGIGSTSIAKLQAFADENNWSLLKAARSVQIANGISSRARNAIEDFAKMIDALRKSGEFLNITELTEAVLEQTGYRAALEKSRTMESEARLENIDEFLTVTKQFDDKNEAEGNEIADENGDNIQLVDFLADLALVSDQDNVEEEPSGVTLMTLHAAKGLEFPIVFLVGMEDGIFPLSRAMMDQEQLEEERRLAYVGITRARQKLYITNAYSRMLYGRTQTNPASRFISEIGSQYLKSENEEKSFSRNTKEKSYPFDNNRNARATASVYGNTHATAVKSNGSGAGKVSWNAGDKVEHKAWGIGTVVKVSGAGEDAELDIAFKDQGIKRLLAAFAPIKRVVE

SEQ ID NO: 44081 - DNA, 2301 bp, Leuconostoc mesenteroides subsp. mesenteroides ATCC 8293
  CDS (1)..(2301): transl_table=11
atgaaaaatggtaaaataaaggaagttatttttacaagtaaggacataaaaatgccaattgaaaccctaattcaaggaatgaatgataaacagtcagaggctgttcaaaccactgaaggaccattattgattatggctggcgctggttctggtaagactcgcgttttgacacatcgtattgcccatttggtgcaagataaaaatgtatacccatggcgtattttggcaattacatttaccaacaaggctgctcgtgaaatgcgtgaacgtattgcacaactagttgatccagaaattgcaagagaaatttgggtctcaacatttcacgctatggccgtgcgaattttacgtcgagatggtgagagaattggcctagcacgtaattttacaattatcgatacaagcgcccaacgcacgttaatgaagcgggttattaacgatctgaacttagatactaatcaatatgacccacgcacaattttaggcacagtttccaatgctaagaatgatatgttgacagctaaggcttatgctaagcaggctggtaatgtatatgaggaaactgtcgctgaagtgtatgccgcatatcaagcagagctacgtcgcgctcagagcgttgattttgatgacctaattatgtctacgattgatctattcaaacaagcgccagacgttctggaacgataccaaaatcagtttgaatacctgcatgttgacgaatatcaagataccaatgatgcgcaatatacgattgttaacttactagcgaaacgttcacgtaatttagctgttgtaggtgatgcagatcagtctatttatggttggcgtggtgctaacatgaataatattttaaacttcgaaaaagactatccagacgctcacacagttttgcttgaacaaaactatcgttcaacccaaaatattttagatgcagcgaatgcagttatcaataataataatgagcgcatcgacaaaagcctttggactgaaaatggcaaaggcgataagattacttattatcgcgcgcaaacagaacgtgacgaagctaactttgtcttggccaacattcaaaaatcacgccaagagaagaatgcagcatacagtgattttgcagtattatatcgtacgaacgcgcagtcacgtggtattgaagaagcacttgtgaaagctaatatgccatacaccatggttggtggacataagttctatgagcgtaaagaaattcttgatatcatgtcatacatgaatctgatgacaaatcctgctgataatgcggcgtttgaacgagtagttaatgaacctaaacgtggtattggtgcaacatcgattaatcggttacgggattttgccaatcgaatgaatttgtcttatatgggcgcaattgaaaatattgaattagcaccagaaattacagctaaggcagcttcaaaattaattcagtttgctgaaatgatgcacaatttgcgtcaacagactgagtttttaactgtgaccgaacttgctgaattagcgatgacaaaatctggctatcgtcaaaagctagccgaaaaaaatgatcctgaaagtcaaggtcgtctagaaaacttggaagaatttttgtcagttacaaaggaattcgactcaaaatacaatccagacgatcccgaatccgttgatccgatgactgattttttgagttcaactgcactaatgagtgatttggatgattttgaagaaggtgacggggcagttaccttaatgactttacacgcagctaaaggattggagtttcctgttgtctttttagttggtatggaggaaggtatttttcctttgtcacgggctatgatggatgatgaccaactggaagaagaacgtcgtttggcctatgttggtattacacgagcgatgaaaaaattatatctaactaatgctttttcacgcttattgtatggtcgtacgcaagcaaatgaaccttcaagatttattgatgaaatttcaagcgatttattggatacacaatatggtggtacctcttcttcgtcaagtgatcgagcttttccatttgataagaaaatgcaacgagcaacagccacaacttataaggcggccagcccagtaaccaaaatgacttcaggaacaaccggtgctgatagtacggtttggcagcctggtgataaggtgtctcataaaaaatggggaattggtacgattgtttctgtgtcgggatctgcacaagatcaagaattaaaagttgctttcccatcagaaggggtaaagcagctattagccgcttttgcaccaattaaacgagcagaatga

SEQ ID NO: 44082 - protein, 766 aa, Leuconostoc mesenteroides subsp. mesenteroides ATCC 8293
MKNGKIKEVIFTSKDIKMPIETLIQGMNDKQSEAVQTTEGPLLIMAGAGSGKTRVLTHRIAHLVQDKNVYPWRILAITFTNKAAREMRERIAQLVDPEIAREIWVSTFHAMAVRILRRDGERIGLARNFTIIDTSAQRTLMKRVINDLNLDTNQYDPRTILGTVSNAKNDMLTAKAYAKQAGNVYEETVAEVYAAYQAELRRAQSVDFDDLIMSTIDLFKQAPDVLERYQNQFEYLHVDEYQDTNDAQYTIVNLLAKRSRNLAVVGDADQSIYGWRGANMNNILNFEKDYPDAHTVLLEQNYRSTQNILDAANAVINNNNERIDKSLWTENGKGDKITYYRAQTERDEANFVLANIQKSRQEKNAAYSDFAVLYRTNAQSRGIEEALVKANMPYTMVGGHKFYERKEILDIMSYMNLMTNPADNAAFERVVNEPKRGIGATSINRLRDFANRMNLSYMGAIENIELAPEITAKAASKLIQFAEMMHNLRQQTEFLTVTELAELAMTKSGYRQKLAEKNDPESQGRLENLEEFLSVTKEFDSKYNPDDPESVDPMTDFLSSTALMSDLDDFEEGDGAVTLMTLHAAKGLEFPVVFLVGMEEGIFPLSRAMMDDDQLEEERRLAYVGITRAMKKLYLTNAFSRLLYGRTQANEPSRFIDEISSDLLDTQYGGTSSSSSDRAFPFDKKMQRATATTYKAASPVTKMTSGTTGADSTVWQPGDKVSHKKWGIGTIVSVSGSAQDQELKVAFPSEGVKQLLAAFAPIKRAE

SEQ ID NO: 44083 - DNA, 2022 bp, Magnetococcus sp. MC-1
  CDS (1)..(2022): transl_table=11
atggatcatcccacactgcatcatctcaacgccccccagcggcaagccgttaccaccctggacggccccctcatggtcttggccggggcaggatcgggcaaaacacgggtattgacccgacgtctggcctggattatccaacagcaacaggcctcccctgaagaggtgctggcggtgacctttaccaataaggccgccaaagagatgcggaaccgggttcaggcgttactgggtttggatgcccccgcccaggcccaccgcttctggattggtaccttccacggcatgagcgcccgcatgctgcgccaatacgccgaccgccttggctttgagcgggactttaccattcttgacagcagcgaccaggagcgcctatttaaacggctctgtgaagagttgggctttgccgatgcctactggacccccaagcgcctaacccacaccattggacgctggaaagatgatggcattcgcccccaggatttaaccgatcgggagatccgtaaagcgtgggaacgggcgcgtattcaacagatgtacgaacgctaccagcaagcactgctgcaaagcaatgccatggattttggcgatctgctgctgcactgtctgcaattgtggcaacaggaaccggccatcttggcggcctttcagcagcgctttcgctatctgttggtggatgagtatcaagataccaaccatgttcaataccgctggatctgcgctctatcagggttgcaccaaaacctctgtgtggtgggggatgatgaccaatccatctacagttggcggggggcacgtattgaaaacattctcaagtttgaagaggatttccctcaaaccaagattattcgtttggaacaaaactatcgctccagtggcaatatccttaaagccgccagcggcctgatcaaccacaacaagggccgcatggaaaaacagctctggaccgaagatgcccaaggcgatgccattcacttctaccaagcggagaatgatgaggatgaggcacgctttgtggcctcggaaattctcaccctctgccccgctggggattatcaacaggcggctattctggtgcgaaccgctcgccagacccgctccctggaagagggtttgatgcgggcgggtattccttatcaggtggtgggggggctgcgctttttggatcgcgccgaggtgcgcgatgccttggcctatctgcgggtggtggcctctaaccgggatgatgtggcctttgagcgggttatcaatctccccaagcgtggcattggcccaggtgccctgcaatccctgcgggagattgccagccaggagcgctgctctttgctgcatgcggcccgctttgcggtcgagagcaacaccatgaagggggctgcggccaagggtttggcagcttttattcagctcattgagcacgctcgcagcatgctcgccgacgatataacccccgctgagatgctcaccaaactgttggccctaagtggctaccgggattatgtacgggatctggaaaagggcaacgaccgtatcgacaacctggacgaactgcgtaatgccctggcccgcactgagagtttgcaactatttttggaagaggttgcccttgccaccgacctccaggatggcggaccagttgccaatcgggtggtgatctccaccctgcatgccgccaaggggttggagtttccctgggtgtttctggtgggggtcgaagaggatgttatgccccataaactggccctcaccgaacagccggagatcggcttagaggaggagcggcgcttggcctacgttggcatgacccgcgccaaacagcggctttatctcaccatggcgcgtcgtcgatggctctttaataaaccggttatgccaattaagtcccgttttttaaaggagcttcctcaagaaattttagaggatcgtggttttcgtgtgagcagccgacgcggtgccacaggcagcttggcgggcctgcccggtggatcattgcaccaccagaaggtgcgctttccgttacgttaa

SEQ ID NO: 44084 - protein, 673 aa, Magnetococcus sp. MC-1
MDHPTLHHLNAPQRQAVTTLDGPLMVLAGAGSGKTRVLTRRLAWIIQQQQASPEEVLAVTFTNKAAKEMRNRVQALLGLDAPAQAHRFWIGTFHGMSARMLRQYADRLGFERDFTILDSSDQERLFKRLCEELGFADAYWTPKRLTHTIGRWKDDGIRPQDLTDREIRKAWERARIQQMYERYQQALLQSNAMDFGDLLLHCLQLWQQEPAILAAFQQRFRYLLVDEYQDTNHVQYRWICALSGLHQNLCVVGDDDQSIYSWRGARIENILKFEEDFPQTKIIRLEQNYRSSGNILKAASGLINHNKGRMEKQLWTEDAQGDAIHFYQAENDEDEARFVASEILTLCPAGDYQQAAILVRTARQTRSLEEGLMRAGIPYQVVGGLRFLDRAEVRDALAYLRVVASNRDDVAFERVINLPKRGIGPGALQSLREIASQERCSLLHAARFAVESNTMKGAAAKGLAAFIQLIEHARSMLADDITPAEMLTKLLALSGYRDYVRDLEKGNDRIDNLDELRNALARTESLQLFLEEVALATDLQDGGPVANRVVISTLHAAKGLEFPWVFLVGVEEDVMPHKLALTEQPEIGLEEERRLAYVGMTRAKQRLYLTMARRRWLFNKPVMPIKSRFLKELPQEILEDRGFRVSSRRGATGSLAGLPGGSLHHQKVRFPLR

SEQ ID NO: 44085 - DNA, 2169 bp, Shewanella sp. ANA-3
  CDS (1)..(2169): transl_table=11
atggacgtatcttctttactagacggcctgaatgataaacagcgcgaggctgtcgcggcaccgcaatccagcatgttagtgcttgcgggcgcaggcagtggcaaaacgcgagtattaacccaccgtatcgcgtggttaatgcaggtcgaacagcagagcccttactcaattttagccgtgacgtttaccaataaagccgcagccgagatgcgtgagcgggtggagaaggtcgctggcaccaatatggggcggatgtggattggtaccttccacgggttagcgcatcgtctgttacgcactcacttccaagatgcgggattgccgcagagcttccaaattctcgattcggacgatcaggtgcgcttgctgaaacgcatccttaaaagtttgaatctggatgaaaaacaatatcccccccgtcaggcgcaggcctatatcaatggcaagaaagaccaaggattacggcccaagcatatcgatgcgggtggttttccgattgagcaaaacctgctgaagatttatcaggtttatcaagagtcttgcgaccgcgcaggcttagtcgactttgccgaaatcctgctgcgtgcccacgagctgtggctcaataaaccgcatctgctggcgcattatcaggagcgttttaagcatattctggtggacgagttccaagataccaacgccattcaatatgcttggatccgcgtgttggctggccaaaccgctaacgtgatgatagtgggcgatgacgaccaatctatttacggttggcgcggcgctcaggttgaaaacctgcaccgcttcctgcgggatttcccgacggctactacgattcgcctcgagcaaaattatcgctccaagggcaatattttgaaggcgtcgaacgcccttatcgccaataaccccgagcgtttaggtaaagagttgtggaccgacgaagccgatggtgagccgatttcgctctactgcgcctttaacgaaatggacgaggcgcgctttattgtcggccgtatcaatgattggtacgaaaaaggcggcaatttaagtgactgcgcgattttatatcgctcaaacgctcagtcgcgtgtgctcgaagaagccttattacacaaaggtttagcctatcgtatttacggtggcctgcgcttcttcgaacgccaagagattaaagacgctatgggttatatgcgtcttatcagcaataaaaatgacgatgccgccttcgagcgcgtggttaatacaccgccccgcggcattggcgatcgcaccttagatattctgcgttcgaccgcccgtcagcaggaactcaccctgtggcaggcttgtttacgtttgctggatgaaaaggtgctcgcaggccgcgccgcctctgcggtgcgtggctttatggatcttatcgtcaccctgcaggaagaaactcaggacatggcgctgtaccggatgacggacacagtgatccaagcctctgggcttaaggccatgtacgaggcggagaaaggcgaaaaggcccacgcccgtatcgaaaacttagaggaactcgttaccgcggcgcgcaccttcgaaatgccagaggagcttgaggatatgggcgagcttaacgccttcctatcccatgcggccctagaggcgggcgaaggtcaggccgatgcctttaccgatgccgtacagttaatgacactgcactcggccaaggggctggagtttactatggtgtttatggcgggtgtcgaggagggcattttcccgagtaagatggcgctcgaagagggcgatagactcgatgaggaacgccgcctctgttacgtgggcatgacccgcgcgatggaaaaactctatatcacctatgccgaatcccgtcgtatttatggccgcgaagattatgcccgcccatcgcgctttattaaggaaattccgccgcaatatgtggacgaaattcgcttaaaggcgcaggtgtcgacgccgatggcgaataatcgcttcagtgcgcaaaagtcggcggtcgccaatgataccggctttagcgtcggccaaagagtacatcatcccaagtttggtgacggcaaagtgactaactttgaaggcagtggtgcgcaggcgcgggtgcaggtgaattttagtgattttggcagtaagtggttggtggtggcctacgcgcgtttagaggcgcgttga

SEQ ID NO: 44086 - protein, 722 aa, Shewanella sp. ANA-3
MDVSSLLDGLNDKQREAVAAPQSSMLVLAGAGSGKTRVLTHRIAWLMQVEQQSPYSILAVTFTNKAAAEMRERVEKVAGTNMGRMWIGTFHGLAHRLLRTHFQDAGLPQSFQILDSDDQVRLLKRILKSLNLDEKQYPPRQAQAYINGKKDQGLRPKHIDAGGFPIEQNLLKIYQVYQESCDRAGLVDFAEILLRAHELWLNKPHLLAHYQERFKHILVDEFQDTNAIQYAWIRVLAGQTANVMIVGDDDQSIYGWRGAQVENLHRFLRDFPTATTIRLEQNYRSKGNILKASNALIANNPERLGKELWTDEADGEPISLYCAFNEMDEARFIVGRINDWYEKGGNLSDCAILYRSNAQSRVLEEALLHKGLAYRIYGGLRFFERQEIKDAMGYMRLISNKNDDAAFERVVNTPPRGIGDRTLDILRSTARQQELTLWQACLRLLDEKVLAGRAASAVRGFMDLIVTLQEETQDMALYRMTDTVIQASGLKAMYEAEKGEKAHARIENLEELVTAARTFEMPEELEDMGELNAFLSHAALEAGEGQADAFTDAVQLMTLHSAKGLEFTMVFMAGVEEGIFPSKMALEEGDRLDEERRLCYVGMTRAMEKLYITYAESRRIYGREDYARPSRFIKEIPPQYVDEIRLKAQVSTPMANNRFSAQKSAVANDTGFSVGQRVHHPKFGDGKVTNFEGSGAQARVQVNFSDFGSKWLVVAYARLEAR

SEQ ID NO: 44087 - DNA, 2352 bp, Mycobacterium smegmatis str. MC2 155
  CDS (1)..(2352): transl_table=11
atgacttccccctctgccacccccttcgccgccgaaaccgaccagctcctggacggcctgaacccgcagcagcgtcaggcggtgctccacgagggttcgcccctgctgatcgtcgcgggcgcgggttcgggaaagactgccgtgctgacccggcgcatcgcgtacctgctcgctgagcgcgaggtcggggtggggcaggtactggccatcacgttcaccaacaaggccgccgccgagatgcgcgagcgcgtggtgcaactggtggggccgcgggccaaggccatgtgggtgtcgacgttccactcgacgtgcgtgcggatcctgcgcaaccaggcgtcgctgctgcccgggctgaactcgaacttctcgatctacgactccgacgattcccggcgcctgctgatgatgatcggcaaggatctgggcctggacaccaagcggtactcgccgcggctgctggccaacgggatctccaacctcaagaacgagctgatcggccccgaacaggccgccgccgaggcgtccgaggcctccgacgagatggccaccgtcatcgcgcaggtgtacggcgaataccagcgccggctgcgcgcggccaatgcgctggacttcgacgacctcatcggggagacggtcgcggtgctgcaggcgttcccgcagatcgcgcagtactaccggcgccggttccggcacatcctggtcgacgagtaccaggacaccaaccatgcgcagtacgtgctggtgcgtgagctcgtcgggcaccacctcgaggaccacgacggcgtgccgccgtcggagctgtgcgtggtgggtgacgccgaccagtcgatctacgcgttccgcggcgcgacgatccgcaacatcgaggacttcgagcgcgacttccccgacgcgacgacgatcctgctggaacagaactaccggtcgacgcagacgatcctcaacgccgcgaacgcggtgatcgcccgcaacaccgggcgtcgcgagaagcgcctgtggaccgacgcaggccagggtgagctgatcgtcggctacgtcgccgacaacgagcacgacgaggcccggttcgtcgccgacgagatcgacgcgctcaccgaccggcacggctacaactacaacgacatcgcggtgttctaccgcaccaacaactcctcgcgtgcgctggaagaggtgttcatccgcgcgggcatcccgtacaaggtcgtcggcggcgtgcggttctacgagcgccgcgagatccgcgacatcgtcgcctacctgcgcgtgctcgacaatcccggcgactcggtgagcatgcggcgcatcctcaacacgccgcgccgcggcatcggcgaccgtgccgaggcgtgcgtcgcggtgtacgccgagaacaccggcgtgagcttcaacgaggcgctgcaggccgccgccgagggccgcgtgccgatgctcaacacacgctcggagaagtgcatcgcgagcttcgtacagatgctcgacgacctgcggggcaagctcgacgaagaactcggcgacctcgtggaggccgtgctggaacgcaccggctaccgccgtgagctcgaggcgtcgagcgatccgcaggatctggcccgtctcgacaacctcaacgaattggtcagcgtcgcacacgagttcagcatcgacctggccaacgcacaggccctggccgaggagagcgacgagcccgtcgacgaggacatccccgacacgggcgtgctggcgcagttcctcgagcgggtgtcgctggtcgccgacgccgacgacatccccgaagagggctccggtgtggtgacgatgatgacgctgcacaccgccaagggcctggagttccccgcggtgttcgtcaccggttgggaggacggcatgttcccgcacatgcgggcactcggtgaccctaacgaactgtccgaggaacgccgcctggcctacgtcggcatcacgcgcgcccgccagcggctctacctcagccgggccaaggtgcgctcgtcgtgggggcagcccatgctcaacccggaatcgcgcttcctgcgcgagatcccgcaggaactcatcgactggcgccgcatcgaggcgcccacgccggcgtacgccgcaccgggccgcatgtcctcctccggcggcggcggtatcggcttcggttcaccgcggccctcgccgaaccgccccggcggtggccgcaacaagccgttgatggtgctacagcctggtgaccgcgtgacccacgacaagtacggtctcggccgcgtcgaggaggtcgcgggcaccggcgaatccgcgatgtcgctcatcgacttcggcagcgccggccgcgtcaagctcatgcacaaccacgcgccgctgcagaagctctga

SEQ ID NO: 44088 - protein, 783 aa, Mycobacterium smegmatis str. MC2 155
MTSPSATPFAAETDQLLDGLNPQQRQAVLHEGSPLLIVAGAGSGKTAVLTRRIAYLLAEREVGVGQVLAITFTNKAAAEMRERVVQLVGPRAKAMWVSTFHSTCVRILRNQASLLPGLNSNFSIYDSDDSRRLLMMIGKDLGLDTKRYSPRLLANGISNLKNELIGPEQAAAEASEASDEMATVIAQVYGEYQRRLRAANALDFDDLIGETVAVLQAFPQIAQYYRRRFRHILVDEYQDTNHAQYVLVRELVGHHLEDHDGVPPSELCVVGDADQSIYAFRGATIRNIEDFERDFPDATTILLEQNYRSTQTILNAANAVIARNTGRREKRLWTDAGQGELIVGYVADNEHDEARFVADEIDALTDRHGYNYNDIAVFYRTNNSSRALEEVFIRAGIPYKVVGGVRFYERREIRDIVAYLRVLDNPGDSVSMRRILNTPRRGIGDRAEACVAVYAENTGVSFNEALQAAAEGRVPMLNTRSEKCIASFVQMLDDLRGKLDEELGDLVEAVLERTGYRRELEASSDPQDLARLDNLNELVSVAHEFSIDLANAQALAEESDEPVDEDIPDTGVLAQFLERVSLVADADDIPEEGSGVVTMMTLHTAKGLEFPAVFVTGWEDGMFPHMRALGDPNELSEERRLAYVGITRARQRLYLSRAKVRSSWGQPMLNPESRFLREIPQELIDWRRIEAPTPAYAAPGRMSSSGGGGIGFGSPRPSPNRPGGGRNKPLMVLQPGDRVTHDKYGLGRVEEVAGTGESAMSLIDFGSAGRVKLMHNHAPLQKL

SEQ ID NO: 44089 - DNA, 2394 bp, Nocardioides sp. JS614
  CDS (1)..(2394): transl_table=11
atgcccgccacccccacgtccgacgggccggagccgacccgccgcggacccactcgcgaggagctgctcgaggggctcaacgagccccagcgggcggccgtcgtccacgagggcgcgccgctcctggtcgtcgcgggagcgggctcgggcaagacccgggtgctgacccgccggatcgcctggctgatctccgagcggaaggcccaccccgggtcgatcctggcgatcacgttcaccaacaaggccgcggccgagatgaaggagcgggtcgaggacctggtcggccggcgggcccggatcatgtgggtctcgacgttccactccgcctgcgtgcggatcctccgcaaggaagtcgacaagctggggttcaagtcgaacttctcgatctacgacgcggccgaccagaagcggctgatgacgctggtctgcaacgacctggatctcgacccgaagcgctaccagccgggcgcgctgctgcactgggtgtccaaccagaagaacgagctgcgcgaccccgacgaggcgaccaaggacgcgcgcaaccacctggaggagacctacgccgcggcgtacaccacctaccagcggcggctgcgccaggccaacgcgctcgacttcgacgacctgatcatgttcacggtccacctgttccagcagttccccgaggtgcgcgagacctaccggcgccggttccggcacgtgctcgtcgacgagtaccaggacaccaaccacgcgcagtacgccttcatccaccagctctgcgccgaccggatggaggagctggacccgtccgcggagcgcatcgagccggccgagctgatggtcgtcggtgacgccgaccagtcgatctacgcgttccggggcgccaacatccgcaacatcctcgacttcgagcaggacttcccgaacgccacctcgatcctgctcgagcagaactaccgctccacgcagacgatcctgaccgccgcgaactcggtgatcggccacaaccaggcgcgcaagcccaagcggctgtggtccgacgccggcgacggcgagcggatcgtcgggtacgtcgccgacgacgagcacgacgaggcgcggttcgtctccgaggagatcgaccggctcaccgacgcgaaggcctaccggcccggggacgtcgccgtgttctaccgcacgaacgcccagtcgcgagtgttcgaggagatcttcatccgcctcggcatgccctacaaggtggtcgggggcgtccgcttctacgagcgccgtgaggtccgggacgcgctcgcctaccttcggctgctggtcaaccctgccgaccaggtctcgctgcgccggatcctgaacacccccaagcggggcatcggcgaccgggccgtcgcgtgcgtcaacgccctcgcggagcgggaccggaccacgttctgggaggcgctgcgccgcgcggaggacgcgccggggctcgccacccggtcgctgacccagatccaagggttcgtcgcgatgatcgaggagctccagtcgatggtcgacgggggcgagcgccccgacgtgatcctggagaccacgctggcgcgctcgggctacctcaccgcgctggaggagagcgacgacccccaggacgagacccggctggagaacctcgccgagctggtcgccgtcgcgcgcgagttcgccgacgaccccgtcgcaggtccgtccgccgacccggccgacgtcgacgccggcaccgtcgcgccgggcctggcggacttcctggagcgggtcgcgctggtcgccgacgccgaccagatccccgacgacgaccccgaggacgccggtgtcgtcaccctgatgaccctgcacaccgcgaagggcctggagttccccgtcgtcttcctcaccggtctcgaggacggcgtgttcccgcacgcgcgctcgctcggtgagcagcaggagctcgaggaggagcgccggctggcgtacgtcggcgtcacgcgggcccgcgagcgcctctacgtctcccgggccgtggtccgctcggcgtggggcgcgccctcgcacaaccccgggtcgaggttcctcgacgagctgcccgtcgacctggtcgactggcgccgcaccgaggccgcccagacccgctgggggcgccccgacctggcgagcggctcggccgcccggctcggctcgcccaccgcggccggccgccggaacttctccgccgccgccgtccgcgccgacgcggcggcccgggccaagccggcccgcgagatcccgagcctcgagcccggcgaccgggtgctgcacgactccttcggcatgggcacggtcgtcgcgctcgagggggtcgcggagaaggcggtcgcctcgatcgacttcggctccgagggcgtcaagcggctgctgttgcgctacgcgcccgtggagaagctgtag

SEQ ID NO: 44090 - protein, 797 aa, Nocardioides sp. JS614
MPATPTSDGPEPTRRGPTREELLEGLNEPQRAAVVHEGAPLLVVAGAGSGKTRVLTRRIAWLISERKAHPGSILAITFTNKAAAEMKERVEDLVGRRARIMWVSTFHSACVRILRKEVDKLGFKSNFSIYDAADQKRLMTLVCNDLDLDPKRYQPGALLHWVSNQKNELRDPDEATKDARNHLEETYAAAYTTYQRRLRQANALDFDDLIMFTVHLFQQFPEVRETYRRRFRHVLVDEYQDTNHAQYAFIHQLCADRMEELDPSAERIEPAELMVVGDADQSIYAFRGANIRNILDFEQDFPNATSILLEQNYRSTQTILTAANSVIGHNQARKPKRLWSDAGDGERIVGYVADDEHDEARFVSEEIDRLTDAKAYRPGDVAVFYRTNAQSRVFEEIFIRLGMPYKVVGGVRFYERREVRDALAYLRLLVNPADQVSLRRILNTPKRGIGDRAVACVNALAERDRTTFWEALRRAEDAPGLATRSLTQIQGFVAMIEELQSMVDGGERPDVILETTLARSGYLTALEESDDPQDETRLENLAELVAVAREFADDPVAGPSADPADVDAGTVAPGLADFLERVALVADADQIPDDDPEDAGVVTLMTLHTAKGLEFPVVFLTGLEDGVFPHARSLGEQQELEEERRLAYVGVTRARERLYVSRAVVRSAWGAPSHNPGSRFLDELPVDLVDWRRTEAAQTRWGRPDLASGSAARLGSPTAAGRRNFSAAAVRADAAARAKPAREIPSLEPGDRVLHDSFGMGTVVALEGVAEKAVASIDFGSEGVKRLLLRYAPVEKL

SEQ ID NO: 44091 - DNA, 2220 bp, Azoarcus sp. BH72
  CDS (1)..(2220): transl_table=11
atgtccaacctgcttgccaaccttaacgaacagcaacatcaggcagtcaccctgccatcccagcacgccctgatcctcgccggtgccggctctggcaagacccgcgtgttgaccacccgcatcgcctggctggtgcagtcgggccaggccagcccggcggaaatcctcgccgtcaccttcactaacaaggcggccaaggaaatgcatgcccgcctcgccgcgatgctgccgatcaacacccgcagcatgtggatcggcaccttccacggcctctgcaaccggctgttgcgggcccaccatcgcgatgccggcttgccgcagctgttccagatcctcgattccggcgatcagctcgctgcgatcaagcggctgctgaagacgctcaacgtcgacgacgagaaattcccgccgcgcgagttgcagcacttcatcaatggccagaaggaagccggcttccgcccccacgcggtggaggcctgggacgaattcacgcgccagcgtgtacagctttaccaagagtatgaagcgcagtgccagcgcgagtcagttgtggattttgcggagttgctgctgcgcacctatgagctgctggagcgcaacgagccgatccggcggcactaccagcggcgcttccgccacatcctcgtcgatgagttccaggacaccaacgtgttgcagtaccgctggctgaagttgctcgcggacgaaggtcgggaggggggcgcgtcgctgttctgcgtcggcgacgacgaccagtcgatctaccgcttccgcggcgcagaggtcggcaacatgcgtgacttcgagcgagagttccgggtgcagaacgtgatccggctggagcagaactaccgttcccgcggcaacattctcgacgccgccaacgcgatcatccggaacaactccgaccgcctcggcaagaacctgtggaccgaccagggcgcgggcgagccgatccgtgtgttcgaggccttttccgatgccgacgaggcgcgctggctcgtcgacgaggtccgcgggctggtgcgcgacggcgcgctgcgcagcgagatcgcactgctgtaccgatccaatgcccagtcgcgggtgctggagcatcaactgtttaccgccggggtgccctaccgggtgtatggcggcctgcgcttcttcgaacggcaggagatcaagcacgcgctcgcctacctgcgcctgatcgccaatcccgacgacgacacggcgttcgcgcgcgtggtcaacttccccacgcgcggcatcggcgcgcggtcgctggaagcgctgcaggatgccgcgcgcacctacaacaccagcctgtacgccacggtgccgcacctgtcgggcaaggccggcacggtgctcgcgcagttcgtccgcctggtggaagacctgcgccgggacaccgcccgtctgccgttgcccgagctgatcgaccacgtgctcgacgcgagcgggctgcgggcgcactacaaatccgaaaaggaagggcaggagcggctggagaacctggacgaactgctgggcgcaggcagcaatttcgtcgccgaggcgcaagcggatgcagaggtgctggccggcgaccacgccctgctcgcggacttccttgcccacgcctcgctcgaagcgggcgaccatcaggcagaccagggggccgacgcggtgcagttgatgaccgtgcattcggccaaggggctggagttcaacgtggttttcgtctcggggctggaggaaggcctgtttccgcacgagaacagcattctcgaagccgaagggctggaagaggagcgccgcctgatgtacgtggcggtgacgcgggcacgcgagcgtctttacctctccttcgcgcagagccgcatgctgcacggccagacgcgctacaacctgcgctcgcgtttcctggaggaaatcccggccgggctcgtcaagtggctgacaccgccgaatccgcgttcgatggcgggcggcgcgctcgccggcatgggcggcggctacttcaagccgggcgccagcgtggctccggtggcggcgcggcaagcgcggggcacgtcggcgcatctgcccaacgggctgcgcatcggccagtcggtggcgcacgcgaagttcgggcagggggtcatcgtcgctgccgagggcagcgggtcggacgcgaaggtgcagatcaacttcggccccgcgggcgtcaaatggctgctgctggcggtggcgaagctggagccggtgtaa

SEQ ID NO: 44092 - protein, 739 aa, Azoarcus sp. BH72
MSNLLANLNEQQHQAVTLPSQHALILAGAGSGKTRVLTTRIAWLVQSGQASPAEILAVTFTNKAAKEMHARLAAMLPINTRSMWIGTFHGLCNRLLRAHHRDAGLPQLFQILDSGDQLAAIKRLLKTLNVDDEKFPPRELQHFINGQKEAGFRPHAVEAWDEFTRQRVQLYQEYEAQCQRESVVDFAELLLRTYELLERNEPIRRHYQRRFRHILVDEFQDTNVLQYRWLKLLADEGREGGASLFCVGDDDQSIYRFRGAEVGNMRDFEREFRVQNVIRLEQNYRSRGNILDAANAIIRNNSDRLGKNLWTDQGAGEPIRVFEAFSDADEARWLVDEVRGLVRDGALRSEIALLYRSNAQSRVLEHQLFTAGVPYRVYGGLRFFERQEIKHALAYLRLIANPDDDTAFARVVNFPTRGIGARSLEALQDAARTYNTSLYATVPHLSGKAGTVLAQFVRLVEDLRRDTARLPLPELIDHVLDASGLRAHYKSEKEGQERLENLDELLGAGSNFVAEAQADAEVLAGDHALLADFLAHASLEAGDHQADQGADAVQLMTVHSAKGLEFNVVFVSGLEEGLFPHENSILEAEGLEEERRLMYVAVTRARERLYLSFAQSRMLHGQTRYNLRSRFLEEIPAGLVKWLTPPNPRSMAGGALAGMGGGYFKPGASVAPVAARQARGTSAHLPNGLRIGQSVAHAKFGQGVIVAAEGSGSDAKVQINFGPAGVKWLLLAVAKLEPV

SEQ ID NO: 44093 - DNA, 2208 bp, Neisseria meningitidis FAM18
  CDS (1)..(2208): transl_table=11
atgtttcccgaccaatccgcccccaacctgctgcaaggcttgaaccctgaacaactttccgccgtaacctggccgccgcaatccgcccttgtgctggcaggcgcgggcagcggcaaaacgcgcgtgctgaccacgcgtatcgcatggcttttgcaaaccggtcaggcaagcgtgcacagcattatggcggtaacgtttaccaacaaagccgccaaagaaatgcaaacccgactcggcgcgatgattcccgtcgacgtccgcgctatgtggctcggcacgttccacggcctctgccaccgctttctacggctgcaccaccgcgatgccggtttgccgtcttcctttcaaatcctcgacggcggcgaccagctttccctcatcaaacgcctgctcaaaagcctcaacatcgccgaagaaatcatcgcgccgcgttcgctgcaaggctttatcaacgcgcaaaaagaatccggtttgcgcgcttccgtcttgagtgcgcccgatccgcacacaagccgcatgattgaatgctacgccgaatacgacaaaatctgccaacgcgaaggcgtggtcgattttgccgaactcatgctccgcagctacgaaatgctgcaaagcaacgaaatcctgcgccagcattaccaaaaccgcttcaaccacattctcgtcgacgagttccaagacaccaacaaactgcaatacgcctggctcaaactcatggcgggcggaaacgcagcggtatttgccgtcggcgacgacgaccaaagcatttaccgtttccgtggcgcaaacgtcggcaacatgaccgcgctgatggaagaattccacatcgacgcgcccgtcaaactcgaacaaaactaccgctccgtcggcaacatccttgccgccgccaatgccgtgattgaaaacaacgacgaacgactcggcaaaaacctgcgcaccgacgccgaagcaggcgacaaaatccgctactactccgcctttaccgacctcgaagaagcccggttcatcttggacgaaaccaaagccctcgaacgcgaaggctgggatttggacgaaatcgccgtcctctaccgtagcaacgcccaatcccgcgttatcgaacaaagcctgttccgcagcggcatcccctacaaaatctacggcggcttgcgcttttacgaacgccaagaaatcaaacacgcgctcgcctacctacgcctcgccgtcaatcccgacgacgacaacgcccttttgcgcgtcatcaacttcccaccgcgcggcatcggcgcacgcaccgtcgagaaccttcagacggcctcaaacgaacaaggcatcaccctttggcaggcagcctgcaacgccggcgcgaaagccgccaaaatcgccgccttcgtccgcctgattgaagcactgcgcaaccaagtcggacaactgcccctgtccgaaatcatcgtcggcatcctcaaagacagcggcctgaccgaacactaccgcacccaaaaaggcgacaaccaagaccgtctcgacaaccttgacgaactcgtcaatgccgccatcgagttcaaacccgaagacagcaacttcgaaatcctgcctgaaaacatttcagacgacccagccttccccatcctcgccttcctaagcaatgccgccctcgaatccggcgaaaaccaagcaggcgcgggcgaaaaagccgtccaactcatgaccgtccacgccgccaaaggcttggaatttaacgccgtcttcctcaccggcatggaagaaggccgtttccccagcgaaatgagccttgccgagcgcggcggcctcgaagaagaacgccgcctcatgtacgtcgccatcacccgcgcccgcaaacgcctctacatcaccatggcgcaacaaagaatgctgcacgggcaaacccaattcggcatcgtctcccgcttcgtcgaagaaatcccgcccgaagtattgcactacctgtccatcaaaaaaaccgcctacgacagctatggcaacacgcgtcaaactgccacgttcaaagacaaaatcatcgacgactacaaacagccgcaaacctacgcaggcttccgcatcggacaaaacgtccgccacgccaaatttggcaccggcgtgattatcgatgccgcagataaaggcgaatccgcccgactgaccatcaatttcggcaaacagggcgtgaaagagttggacaccaagtttgcgaaattggaagagatgtag

SEQ ID NO: 44094 - protein, 735 aa, Neisseria meningitidis FAM18
MFPDQSAPNLLQGLNPEQLSAVTWPPQSALVLAGAGSGKTRVLTTRIAWLLQTGQASVHSIMAVTFTNKAAKEMQTRLGAMIPVDVRAMWLGTFHGLCHRFLRLHHRDAGLPSSFQILDGGDQLSLIKRLLKSLNIAEEIIAPRSLQGFINAQKESGLRASVLSAPDPHTSRMIECYAEYDKICQREGVVDFAELMLRSYEMLQSNEILRQHYQNRFNHILVDEFQDTNKLQYAWLKLMAGGNAAVFAVGDDDQSIYRFRGANVGNMTALMEEFHIDAPVKLEQNYRSVGNILAAANAVIENNDERLGKNLRTDAEAGDKIRYYSAFTDLEEARFILDETKALEREGWDLDEIAVLYRSNAQSRVIEQSLFRSGIPYKIYGGLRFYERQEIKHALAYLRLAVNPDDDNALLRVINFPPRGIGARTVENLQTASNEQGITLWQAACNAGAKAAKIAAFVRLIEALRNQVGQLPLSEIIVGILKDSGLTEHYRTQKGDNQDRLDNLDELVNAAIEFKPEDSNFEILPENISDDPAFPILAFLSNAALESGENQAGAGEKAVQLMTVHAAKGLEFNAVFLTGMEEGRFPSEMSLAERGGLEEERRLMYVAITRARKRLYITMAQQRMLHGQTQFGIVSRFVEEIPPEVLHYLSIKKTAYDSYGNTRQTATFKDKIIDDYKQPQTYAGFRIGQNVRHAKFGTGVIIDAADKGESARLTINFGKQGVKELDTKFAKLEEM

SEQ ID NO: 44095 - DNA, 2451 bp, Acidovorax sp. JS42
  CDS (1)..(2451): transl_table=11
atgctcccacacgacctgttttccggcgcgccagcgccttttggcactggcaatggtgccggcgctaccggggtttcgtcccaggcggtgcagccgctgctgcaaaacctcaaccccgagcaactggccgccgtgacgctgcctgccggccatgcgctcatcctggcgggcgccggctccggcaagacccgggtgctcaccacgcgcattgcctggctgctgcagaacggtctggccactccgggcggcatcctggccgtgaccttcaccaacaaggcggccaaggagatgctgacgcgcctctcagccatgctgcccatcaacgtgcggggcatgtggatcggcacattccacggcctgtgcaaccgcctgctgcgcgcgcaccacaagctggcaggcctgccgcaagccttccagatcctggacacgcaggaccagctctcggccatcaagcggctgtgcaagcagttcaacgtggacgaggagcgcttcccacccaagcagctggcctacttcatcgctggctgcaaggaagagggcatgcgcccgcgcgacgtgccggcgcacgatgccgacacgcgcaagaaggtggagctgtaccagttgtacgaggagcagtgccagcgcgagggcgtggtggactttggcgagctgatgctgcgcagctttgagctgctgcgcgacaacgaccccgtgcgggcgcattaccagcggcgctttgcgcacattttggtggacgagttccaggacaccaacaagctgcaatacgcctggctcaagcagatggcgggcgacgtggtggacggacgcctgcacacgcagggcagcgtgctggccgtgggtgacgacgaccagagcatctacgcctttcgcggggcacgcgtgggcaacatgcaggacttcgtgcgcgagttcgacgtgcagcaccagatcaagctggagcagaactaccgcagctacagcaacatcctggactcggccaacgcgctgatcagccacaacagccggcgcttgggaaaaaacctgcgcaccacgcagggcccgggcgagcccgtgcgcatctacgaggccaacagcgacctggccgaggcgcagtggatggtcgatgagatcaagcagctcgtgcgggacggcgagatgccgcgcaaggagatcgctgtgctctaccgcagcaatgcgcagagccgggtgatcgaatcggccctgttcaacgccagcgtgccctaccgcgtgtacggcgggctgcgctttttcgagcgcgccgagatcaagcacgcgctggcctacctgcgcctgctggagaacccgcacgacgacaccagctttctgcgcgtggtgaacttcccgccgcgcggcattggtgcgcgcacgctggaggtgctgcaggatgcggcgcgcagcagtggctgctcgctgcacgacgcggtgagtgcggtgcctggcaaggccggcaccaacctgggtgccttcgtggccctggttcaagtgctgcgcgagcagacgcagggccagaacctgcgcggcatcatcggccaggtgctcgaatccagcggcctgctggagcattaccgccacgaaaaggaaggcgcggaccggctggagaacctggacgagctcatcaacgcggccgagagcttcgtcacccaggagggctttggccgcgatgcggtcgcgctgccgctggacgagcacggcaacgccctcacgcaaagcccggccagccaggggctggaccccgacgcgccgatgctgaatgcccctggcaacgtggatgccgacaccggcgaaacgctgtcgccgctggcggccttcctgacccacgccgcattggaggcgggggacaaccaggcccaggcggggcaggatgcggtgcagctcatgaccgtgcatgccagcaaggggttggagttcgactgcgtgttcatcggcggcatggaggaagggctgttcccgcatgagaactccatgagcgaccgcgacggcctggaggaagaacgccgcctgatgtacgtggccatcacccgcgcgcgcaagcgtctgtacctgagccattcgcagacgcgcatgctgcacgggcagacgcgctacaacgtcaagagccgcttctttgatgagctacccgaggaggcgctcaaatggatcatgccgcgccaggcagggtttggatctttcgctcctgatttaggagctgctcgcgcttaccagtcgggcgctagaggccaatttggcttcaagaccgaagtattcgccagtccccccgtacccccggtcaaggcggcgccgggccatggcctgcgcgtggggctggcggtgttccacaccaagttcggcgagggcaaggtgctggccatcgagggcgcggacgccgacgcgcgggcgcaggtgcactttccgcgccacggcaccaagtggctggcgctgtcggtggccaagctcaccatcgtcgaataa

SEQ ID NO: 44096 - protein, 816 aa, Acidovorax sp. JS42
MLPHDLFSGAPAPFGTGNGAGATGVSSQAVQPLLQNLNPEQLAAVTLPAGHALILAGAGSGKTRVLTTRIAWLLQNGLATPGGILAVTFTNKAAKEMLTRLSAMLPINVRGMWIGTFHGLCNRLLRAHHKLAGLPQAFQILDTQDQLSAIKRLCKQFNVDEERFPPKQLAYFIAGCKEEGMRPRDVPAHDADTRKKVELYQLYEEQCQREGVVDFGELMLRSFELLRDNDPVRAHYQRRFAHILVDEFQDTNKLQYAWLKQMAGDVVDGRLHTQGSVLAVGDDDQSIYAFRGARVGNMQDFVREFDVQHQIKLEQNYRSYSNILDSANALISHNSRRLGKNLRTTQGPGEPVRIYEANSDLAEAQWMVDEIKQLVRDGEMPRKEIAVLYRSNAQSRVIESALFNASVPYRVYGGLRFFERAEIKHALAYLRLLENPHDDTSFLRVVNFPPRGIGARTLEVLQDAARSSGCSLHDAVSAVPGKAGTNLGAFVALVQVLREQTQGQNLRGIIGQVLESSGLLEHYRHEKEGADRLENLDELINAAESFVTQEGFGRDAVALPLDEHGNALTQSPASQGLDPDAPMLNAPGNVDADTGETLSPLAAFLTHAALEAGDNQAQAGQDAVQLMTVHASKGLEFDCVFIGGMEEGLFPHENSMSDRDGLEEERRLMYVAITRARKRLYLSHSQTRMLHGQTRYNVKSRFFDELPEEALKWIMPRQAGFGSFAPDLGAARAYQSGARGQFGFKTEVFASPPVPPVKAAPGHGLRVGLAVFHTKFGEGKVLAIEGADADARAQVHFPRHGTKWLALSVAKLTIVE

SEQ ID NO: 44097 - DNA, 2283 bp, Magnetospirillum magnetotacticum MS-1
  CDS (1)..(2283): transl_table=11
atgtccgatcccttcgccctcgacgatgaggcccccgcctccccgcccccgccccgcgcctctgggccccggcccgtcccgccggacgccccttggctgaaaggcctcaatcccgaacagtttcaggcggtgaccaccaccgagggtccggttctggtgctgtcgggcgcgggcaccggcaagaccaaggtgctgacctcgcgccttgcccatatcctggcctccaatctggcccagccctggcaatgcctggcggtgaccttcaccaaccgcgcggcgcgcgagatgaaggagcgggtggcgcaactggtcggcccggtctcggacggtatctggctgggcaccttccattccttgtgccttcgcatcctgcgctcccatgccgaggcggtgggtctgtcgggcgatttcaccgtgcttgatgccgacgaccagatgcgggtcctaaagcaggtaatgtccgaggcccatgtggaccccaaggccaccccgccccaagggctgatggccaccatccagcgctggaaggaccgcgccgtgacgcccgagaaggcggcggccgatggcggcgccgagggtcaggccaaggcgctgtaccgcgcctatcaggagcggctgaagtcgctcaacgcctgcgatttcggcgatcttctgctgcatgtgctgaccgtgttcctgagtgatgcagaggctctggcccgctggcaggggcgctttcgctatcttctggtggacgagtaccaggacaccaatgtggcccagtatctgtggctgcgcctgctagcccagacgcatcgcaacatctgctgcgtcggcgatgacgaccagtccatctattcctggcgcggggccgaagtgggcaacatcctgcgcttcgagaaggacttccccggcgcccgcgtggtgcgcctggaaagcaattaccgctcgacgccccatatcctggcggcggcctcggcgctgatcgccaacaacgagggaagactgggcaaaacgctgcgccccggcatcccccacgagcccgagtccatcgagaagatccgcaccaaggcggtgtgggacggcgtggccgaggcccgcatggtggtggaagagatcgagacgctgcagcggcggggcgagaaactttcctccatggccatcttggtgcgcgccggattccagacccgcgaattcgaagaacgcctgatcaccaccggcattgcctaccgcgtcatcggcggcccgcgcttctacgagcgcctggagatcagggacgccatggcttatttgcgccttgtggtgtcggccgccgatgggctggccttcgagcgcatcgtcaatacgcccaagcgcggcctgggcgaggctgccattcagaccatccacatggcggcccgcgccgagcaggtgccgctactggaggccgcccgccgcctgaccggcacagacgaacttaagccgaagccgcgtcaggccctggccaagttcatcgaggatctggaccgctggcgatcgctgctcgattccatgccccacgcggaactggccgccaccattcttgacgaatccggctatgtggagatgtggaaggcggacaaatcacccgatgcccctggccgggtggaaaacctgaaggaactggtggcggcgctggaggaatacgattccctggcctccttcctggaacatgtggccctggtcatggaaaacgattcccgcgccgaagccgacagcgtggtgatcatgacgctgcacggcgccaaggggttggaattcgactcggtgtttctccccggctgggaagaggaggtcttcccccattcccgcgccctggccgaatccggcaccaaggggctggaggaggaacggcggctggcctatgtgggcctgacgcgggcgcgaaagcgggtcctggtctccttcgccgccaatcgccgcatctataaccagtggaagtcgcaactgccgtcccgcttcgtggacgaactgcccgattcccatgtggagcgttcgggcgagcgcggcctgcacgggtcgggcctggaggaatcgcgggccgcctggaatgatcccgcctggagccgcgcccgcttcggccaaccccggcaggccgccgcccccaccagttggggccaggccaagccacgcgaaagttcaagcaccttcaagaccggccagcgggtcttccacgacaagttcggaaacggcaccgtgatcgccctggacggcaacaagctggaaatcgccttcgacaaggcgggcatcaagaaggtgctcgacagtttcgtttcggcggtctaa

SEQ ID NO: 44098 - protein, 760 aa, Magnetospirillum magnetotacticum MS-1
MSDPFALDDEAPASPPPPRASGPRPVPPDAPWLKGLNPEQFQAVTTTEGPVLVLSGAGTGKTKVLTSRLAHILASNLAQPWQCLAVTFTNRAAREMKERVAQLVGPVSDGIWLGTFHSLCLRILRSHAEAVGLSGDFTVLDADDQMRVLKQVMSEAHVDPKATPPQGLMATIQRWKDRAVTPEKAAADGGAEGQAKALYRAYQERLKSLNACDFGDLLLHVLTVFLSDAEALARWQGRFRYLLVDEYQDTNVAQYLWLRLLAQTHRNICCVGDDDQSIYSWRGAEVGNILRFEKDFPGARVVRLESNYRSTPHILAAASALIANNEGRLGKTLRPGIPHEPESIEKIRTKAVWDGVAEARMVVEEIETLQRRGEKLSSMAILVRAGFQTREFEERLITTGIAYRVIGGPRFYERLEIRDAMAYLRLVVSAADGLAFERIVNTPKRGLGEAAIQTIHMAARAEQVPLLEAARRLTGTDELKPKPRQALAKFIEDLDRWRSLLDSMPHAELAATILDESGYVEMWKADKSPDAPGRVENLKELVAALEEYDSLASFLEHVALVMENDSRAEADSVVIMTLHGAKGLEFDSVFLPGWEEEVFPHSRALAESGTKGLEEERRLAYVGLTRARKRVLVSFAANRRIYNQWKSQLPSRFVDELPDSHVERSGERGLHGSGLEESRAAWNDPAWSRARFGQPRQAAAPTSWGQAKPRESSSTFKTGQRVFHDKFGNGTVIALDGNKLEIAFDKAGIKKVLDSFVSAV

SEQ ID NO: 44099 - DNA, 2181 bp, Haemophilus somnus 2336
  CDS (1)..(2181): transl_table=11
atggatatttcagaattacttaatgatcttaatgaaaaacaacgcaatgctgttgttgcacctttggggaattatctcgtacttgctggtgctggaagcggaaaaactcgagtattaacgtatcgtattgcttggttaagtgcggtagaaaaaatacctgaatcaagtattatggcggtaacttttaccaataaagcagcgacggaaatgcgtcatcgtattgaggcaacgttagctcgttattcccatcaacgtttattcggtatgtggattggcacttttcacagtattgccaatcgcttattgcgatcccattacgcagatgccggattgccacaggattttcaaattttagacagtgaagatcaacttcgcttagttaagcgtttgatgaaattgcatcaatatgatgaaaaagcctttccctataaacaagcttgttggtatatcaataataaaaaagaagaaggattacgccctcatcagattgaagataataatgatcgtcaagagcgagagtggatcaagatctataaaatttatcaagatgcttgtgatcgatcaggtctagtagattttgctgaattattattgagagcttatgaattgtggctaaaaaatccacatattttgcaatattatcaacagcgttttcagcacgttttgatcgatgaatttcaggatactaataaaattcaatatgcttggattaaattattagccggttcgcagggcaatgtaatgattgtcggagatgatgaccaatctatctatggttggcgtggtgctcaaattgagaatattcatcgctttcttaaagattttgcaaaagtgaaaattattcgtttagaacaaaattatcgttcaaccggcaacattttagaaagtgcaaaccgtttaatttccaataatagtaatcggttaggtaaggatctttggactgcgggtgaaaaaggagatcctgtggggatttatgcggcttttaacgagttggatgaggctttgtttgtctccggtcaggtacaaaattggctggataacggcggtaaggttgatgattgtgcagttttatatcgtagcaatagccaatctcgtgtgatagaagaggcatttctcagggctaaaattccttatcgcatttatggcggtatgcgattttttgaacgacaagagattaaagatgctttagcgtatttgcgtttaattgccaatcgacaagatgatgcggcttttgaacgtgttgtaaatacgccaccacgaggtattggtgagcgtactttagatattttgcgtaatttaactcgtgaaagacaagtgactttatggcaagcaactcagcttgctattcaagaaaatttaattcctatccgttcggtaactgttttgttacgttttattgaattaatcaattccttacaacaagaaaccgcagaaatgcccctatttgtacaaactgattttgtgattaaacattccggtttatatgacatgtataaacaggaaaagggggacaaaggggaagtgcgaattgaaaatttggaggagttggttaccgcaacgagagaatttataaaaccggatgaggctgaagatatgtctgatttagtggcgtttttaacacatacctctttggaagcaggagaagaacaagcagcctctcaccagccttgtgtgcaaatgatgacattgcattcagcgaaaggcttagaatttccaagagtatttattgttggtatggaagaggggcttttcccaagttttcgttcgggtgaagacttggcacgtttggaggaggaacgccgtttagcttatgtagggattactcgagcaaaacagaaattgacattgtgttatgcggaagttcgccgcttgtatggtaaagacgaaaaacatattccttctcgttttattgctgaattaccgcaagaatgtattcaagaagttcgtttacgtggcacagtgactcgagcttataaccgaagtgcagtgggttctatcgtcaaaactgatttatcggataatagttggaaagttggacaaaaggtgaaacatgaaaaatttggtcagggaacagtgattaatgttgagggggctgataataatacccgattacaaatcgcttttcagggacaaggtattaaatggctaatcgcgcatttagccaaattggaaaaaatttag

SEQ ID NO: 44100 - protein, 726 aa, Haemophilus somnus 2336
MDISELLNDLNEKQRNAVVAPLGNYLVLAGAGSGKTRVLTYRIAWLSAVEKIPESSIMAVTFTNKAATEMRHRIEATLARYSHQRLFGMWIGTFHSIANRLLRSHYADAGLPQDFQILDSEDQLRLVKRLMKLHQYDEKAFPYKQACWYINNKKEEGLRPHQIEDNNDRQEREWIKIYKIYQDACDRSGLVDFAELLLRAYELWLKNPHILQYYQQRFQHVLIDEFQDTNKIQYAWIKLLAGSQGNVMIVGDDDQSIYGWRGAQIENIHRFLKDFAKVKIIRLEQNYRSTGNILESANRLISNNSNRLGKDLWTAGEKGDPVGIYAAFNELDEALFVSGQVQNWLDNGGKVDDCAVLYRSNSQSRVIEEAFLRAKIPYRIYGGMRFFERQEIKDALAYLRLIANRQDDAAFERVVNTPPRGIGERTLDILRNLTRERQVTLWQATQLAIQENLIPIRSVTVLLRFIELINSLQQETAEMPLFVQTDFVIKHSGLYDMYKQEKGDKGEVRIENLEELVTATREFIKPDEAEDMSDLVAFLTHTSLEAGEEQAASHQPCVQMMTLHSAKGLEFPRVFIVGMEEGLFPSFRSGEDLARLEEERRLAYVGITRAKQKLTLCYAEVRRLYGKDEKHIPSRFIAELPQECIQEVRLRGTVTRAYNRSAVGSIVKTDLSDNSWKVGQKVKHEKFGQGTVINVEGADNNTRLQIAFQGQGIKWLIAHLAKLEKI

SEQ ID NO: 44101 - DNA, 2184 bp, Haemophilus influenzae R2846
  CDS (1)..(2184): transl_table=11
atgatggatatttctgaattacttgacggactcaacgataaacaacgcgaagccgtagctgctcctcttggtaatcacttagtgctagctggtgcaggctcgggcaaaacgcgtgtattgacgcaccgtattgcttggttaattgcggtcgaaaatatttctgaaggcagcattatggcggtgacctttaccaataaagccgcagcagaaatgcgtcatcgtattcaatctacccttgccaaacacgcacaacatcaattatttggtatgtggattggcaccttccatagcattgctcatcgtttgttgcgagctcatcatttagatgtgggattgccacaagatttccaaattttagattcagaagatcaacttcgtttaattaaacgattattaaaattacataattttgatgaaaaagcttttccgcctaaacaggcttgttggtacatcaataacaaaaaagatgaaggcttgcgaccaaatgatattgaagattttaatgatcgccaagaacgtgaatggattaaaatttatcagatctatcaagacacttgcgatcgcgcagggttggtcgattttgctgaattattaattcgggtctatgaattatttgagaaaaaaccattaattttgcaacgttatcaacaacgttttcagcatattttggtggatgagtttcaagacaccaataaaattcaatataagtggattaaaattcttgctggaaaaacaggcaaagtcatgatcgtaggcgatgatgatcaatctatatacggttggcgtggtgcacaaattgaaaatatccaaaaattcttgaaagatttcaaagccgaaacaattcgccttgaacaaaactatcgttctaccgccaatatcctaaacagcgcaaatgaattaattgcaaacaatagtgatcgtcttggtaaaaatttatggacagagggtgagaaaggcgatcctgtgggcatctattctgcctttaatgaattggatgaagcaaaatttgtcgcttcacaaattcaggattgggtagaacatggcggaaaacttgatgattgtgctgtactttatcgtagtaatagccaatcacgggttattgaagaagctttaattcgttgtcaaattccataccgtatttatggcggtatgcgtttcttcgaacgtcaagaaattaaagatgcgttagcctatcttcgtttgattaataatcgtcaagatgatgcggcttttgagcgtgtaattaatacgccaacccgtggcattggcgaccgcactttagatatattgcgtaacttaacacgcgaacgccaaattaccttatggcaagcagtacaagtcgcaacacaagaaaatatgttagcagggcgagcctcaacagccttattacgtttccaagaattaattaattcactacaacttgataccgcagaaatgccacttttcgcacaaactgattttgtgattaaacattcgggcttatatgaaatgtatcaacaagaaaaaggcgaaaaaggcgaagtgcgtattgaaaacttggaagaattagttaccgcaacccgtgaatttatcaaacctaatgatgcggaagaaatgaccgaactcactgcctttttaacgcacgcttccttagaagctggcgaagaacaagcctcgccacatcaatcttgtgtagaaatgatgacgttgcactctgcgaaaggcttagaatttcctcgtgtatttatggtgggcgtagaagaaggattattcccaagttttcgttcttttgaagaacccggacgtttagaagaagagcgtcgtttagcttatgtcggtattactcgcgcacagaaaaaactgaccatctcttatgcggaaagccgtcgattatatgccaaagaagaacgccatttgccatcacggtttatcgcagaattaccgagagaatgtatccaagaaattcgtttacgagggacagtcacgcgtgcgatgaacctagcaaaagtcggttcattgtcgaataccagtgcggtcgaaaatgaatggaaaatgggtcaaaaagttaaacacgaaaaatttggtttcggcacagtgattaatgtggaaggatctgaaaataacacacgtttacaaatagcgttccaagctcaaggcattaaatggttgattgcgcatttggaaacattggaaaaagtgcggtag

SEQ ID NO: 44102 - protein, 727 aa, Haemophilus influenzae R2846
MMDISELLDGLNDKQREAVAAPLGNHLVLAGAGSGKTRVLTHRIAWLIAVENISEGSIMAVTFTNKAAAEMRHRIQSTLAKHAQHQLFGMWIGTFHSIAHRLLRAHHLDVGLPQDFQILDSEDQLRLIKRLLKLHNFDEKAFPPKQACWYINNKKDEGLRPNDIEDFNDRQEREWIKIYQIYQDTCDRAGLVDFAELLIRVYELFEKKPLILQRYQQRFQHILVDEFQDTNKIQYKWIKILAGKTGKVMIVGDDDQSIYGWRGAQIENIQKFLKDFKAETIRLEQNYRSTANILNSANELIANNSDRLGKNLWTEGEKGDPVGIYSAFNELDEAKFVASQIQDWVEHGGKLDDCAVLYRSNSQSRVIEEALIRCQIPYRIYGGMRFFERQEIKDALAYLRLINNRQDDAAFERVINTPTRGIGDRTLDILRNLTRERQITLWQAVQVATQENMLAGRASTALLRFQELINSLQLDTAEMPLFAQTDFVIKHSGLYEMYQQEKGEKGEVRIENLEELVTATREFIKPNDAEEMTELTAFLTHASLEAGEEQASPHQSCVEMMTLHSAKGLEFPRVFMVGVEEGLFPSFRSFEEPGRLEEERRLAYVGITRAQKKLTISYAESRRLYAKEERHLPSRFIAELPRECIQEIRLRGTVTRAMNLAKVGSLSNTSAVENEWKMGQKVKHEKFGFGTVINVEGSENNTRLQIAFQAQGIKWLIAHLETLEKVR

SEQ ID NO: 44103 - DNA, 2184 bp, Haemophilus influenzae R2866
  CDS (1)..(2184): transl_table=11
atgatggatatttctgaattacttgacggactcaacgataaacaacgcgaagccgtagcagctcctcttggtaatcacttagtgctagctggtgcaggctcgggcaaaacgcgtgtattgacgcaccgtattgcttggttaattgcggtcgaaaatatttctgaaggcagcattatggcggtgacctttaccaataaagccgcagcagaaatgcgtcatcgtattcaatctacccttgccaaacacgcacaacatcaattatttggtatgtggattggaaccttccacagcattgcccatcgtttattgcgagcccatcatttagatataggattgccacaagatttccaaattttagattcagaagatcaacttcgtttaattaaacgattattaaaattacataattttgatgaaaaagcttttccgcctaaacaggcttgttggtacatcaataacaaaaaagatgaaggcttgcgaccaaatgacattgaagattttaatgatcgccaagaacgtgaatggattaaaatttataagatctatcaagatacttgcgatcgcgcaggattggtcgattttgctgaattattaattcgagcctatgaattatttgagaaaaaaccattaattttgcaacgttatcaacaacgttttcagcatattttggtggatgaatttcaagacaccaataaaattcaatataagtggattaaaattcttgctggaaaaacaggcaaagtcatgatcgtaggcgatgatgatcaatctatatacggttggcgtggcgcacaaattgaaaatatccaaaaattcttgaaagatttcaaagccgagacaattctccttgaacaaaactatcgttctaccgccaatatcctaaacagcgcaaatgaattaattgcaaacaatagtgatcgtcttggtaaaaatttatggacagagggtgagaaaggcgatcctgtgggcatctattctgcctttaatgaattagatgaagcaaaatttgttgcttcacaaattcaggattgggtagaacatggcggaaaacttgatgattgcgctgtactttatcgtagtaatagccaatcacgggttattgaagaagctttaattcgttgtcaaattccatatcgtatttatggcggtatgcgtttcttcgaacgtcaagaaattaaagatgcgttagcctatcttcgtttgattaataatcgtcaagatgatgcggcttttgagcgtgtaattaatacgccaacccgtggcattggcgaccgcactttagatatattgcgtaacttaacacgtgaacgccaaattaccttatggcaagcagtacaagtcgcaacacaagaaaatatgttggcagggcgagcctcaacagccttattacgtttccaagaattaattaattcactacaacttgataccgcagaaatgccgcttttcgcacaaactgattttgtgattaaacattcgggcttatatgaaatgtatcaacaagaaaaaggcgaaaaaggcgaagtgcgtattgaaaatttggaagaattagttaccgcaacccgtgaatttatcaaacctgataatgcggaagaaatgaccgaactcactgcctttttaacgcacgcttccttagaagctggcgaagaacaagcctcgccgcatcaatcttgtgtagaaatgatgacgttgcactctgcgaaaggcttagaatttcctcgtgtatttatggtgggcgtagaagaaggattattcccaagttttcgttcttttgaagaacccggacgtttagaagaagagcgtcgtttagcttatgtcggtattactcgtgcgcagaaaaaactgaccatctcttatgcggaaagccgtcgattatatgccaaagaagaacgccatttaccatcacggtttatcgcagaattaccgagagaatgtatccaagaaattcgtttacgagggacagtcactcgtgcgatgaacctagcaaaagtcggttcattgtcgaataccagtgcggtcgaaaatgaatggaaaatgggtcaaaaagttaaacacgaaaaatttggtttcggcacagtgattaatgtggaaggatctgaaaataacacacgtttacaaatagcattccaagcgcaaggcattaaatggttgattgcgcatttggcaaaattggaaaaagtgcggtag

SEQ ID NO: 44104 - protein, 727 aa, Haemophilus influenzae R2866
MMDISELLDGLNDKQREAVAAPLGNHLVLAGAGSGKTRVLTHRIAWLIAVENISEGSIMAVTFTNKAAAEMRHRIQSTLAKHAQHQLFGMWIGTFHSIAHRLLRAHHLDIGLPQDFQILDSEDQLRLIKRLLKLHNFDEKAFPPKQACWYINNKKDEGLRPNDIEDFNDRQEREWIKIYKIYQDTCDRAGLVDFAELLIRAYELFEKKPLILQRYQQRFQHILVDEFQDTNKIQYKWIKILAGKTGKVMIVGDDDQSIYGWRGAQIENIQKFLKDFKAETILLEQNYRSTANILNSANELIANNSDRLGKNLWTEGEKGDPVGIYSAFNELDEAKFVASQIQDWVEHGGKLDDCAVLYRSNSQSRVIEEALIRCQIPYRIYGGMRFFERQEIKDALAYLRLINNRQDDAAFERVINTPTRGIGDRTLDILRNLTRERQITLWQAVQVATQENMLAGRASTALLRFQELINSLQLDTAEMPLFAQTDFVIKHSGLYEMYQQEKGEKGEVRIENLEELVTATREFIKPDNAEEMTELTAFLTHASLEAGEEQASPHQSCVEMMTLHSAKGLEFPRVFMVGVEEGLFPSFRSFEEPGRLEEERRLAYVGITRAQKKLTISYAESRRLYAKEERHLPSRFIAELPRECIQEIRLRGTVTRAMNLAKVGSLSNTSAVENEWKMGQKVKHEKFGFGTVINVEGSENNTRLQIAFQAQGIKWLIAHLAKLEKVR

SEQ ID NO: 44105 - DNA, 2319 bp, Crocosphaera watsonii WH 8501
  CDS (1)..(2319): transl_table=11
atgactgcttccgtcaattttctctctcaacttaacccctcacaacgtattgctgttgaacacttctgtggaccccttttggtggtagcaggggcaggttcgggcaaaactcgcgctctcacctatagaattgcccatctgatcacccattatcaagttgatcctgagtcaatcttggctgtcacttttaccaataaggcagcacgggagatgaaagatagactggagaggttatttgctcaagaaatggctttaaagcagcagggacaaccgtttaattctttgccagaatacgatcaaaaacgtttactttctcaagtttataagaaaacaacgaaaaagttatggatcgggacttttcatagtttatgtgctaggattctccgctacgatgttaacaagtatcaagacgaaaagaagcgacaatgggagcgtaatttttctatttttgatgagtctgatgtccaaagtttggttaaaaatattgttctcaaacagtttaatttagacgataaaaagtttaatcctcgtactgttcgttatgccattagtaatgctaaaaatttgggtttatctcccgaagcttatttaaaagaaaattcctatgccaagggtcgtgtcattgcggaagtttataacgaatatcaaactcaattagctgctaataatgccctagattttgatgacttaattttggttcctgtgcgcttatttcaacaaaatgaatctattttgggttattggcattcccaatttaaacatattttagtggacgaatatcaagatactaaccgtattcaatacgagttgattcaattgttaacaaccaatgcagaacctcgtaaaagcgaatggaactgggaaaatcggtctatttttgtggtaggagatgcggatcaatctatttatagttttcgtatggcagactttactattttattgaattttcaatctgactttggtgatggtttgccggatgaagatacaagaacaatggttaaactagaggaaaattatcgctctacagaaactattttacaagcagctaatcaactgattgaaaataatagtcaacgtatcgataaaattttgcgtcccaccagaggagaaggggaagaaatttactgttataaagcagaggatgaacgcatagaagcggattttgttatgggtaaaatacaagaaatggttgaaacaaacccagaattaaattggggagactttgccctattgtatcgggttaatgctcaatctcgaccatttgaagataacttcattcgtaataatataccctataatattgtggggggctttaagttttatgaccgtcaagaaattaaagattctatcgcatatttaaggttaattgtcaatccttttgatacggttagtttactgagggtgattaattctccccgtcgaggtatcggcaaaacttccattgattctttactgaaagcgtcccaagaattagaaataccgttatgggaaattgttagggatgaaacgtcggtgaaaaccttagcaggaagggcagctaaatcagtcaataaatttgctagtatgattaaagaattacagggtaaattgaaagaactttcaggaacagagatatttgatcagatcatggaattatcaggatatgtggatgatttgaagacaaaaggaaccgaagaagcagacaatagattagaaaatatctatgaattgtacagtgcaatcgctcaatatcaagaagaaaatgaagacacaagtttacaaggttatttaactaatgcttctcttgcctcggatttagataacctggatgaaggacaagaaaaggtatcgttaatgaccttacactctgcaaaagggttggaattccccattgtctttttagtgggattagaacaaggaactttcccccatgttcggagtttaaatgatcctttgtccttagaagaagaacgaagattatgttatgtgggaattacccgcgcccaagaacaattatttattagtcatgccagagagagatatgtttggggttcaaaagaaatgaaaatggtgtcacaatttatccaagaaataccagaagaattaatcaatagtaatctgcgaccaaccgctagaaaagtgcatcgcaaaaaaacagtttctagttctgcaaatgataaatggtcagtaggcgatcgcgtcattcatcatagttttggggaaggagaaattacccatattttagggtcaggaaaaaaaactaacttggccatccaatttgctggacttggtaggaaaattgtcgatccgagaaccaactccattactaaaattgaataa

SEQ ID NO: 44106 - protein, 772 aa, Crocosphaera watsonii WH 8501
MTASVNFLSQLNPSQRIAVEHFCGPLLVVAGAGSGKTRALTYRIAHLITHYQVDPESILAVTFTNKAAREMKDRLERLFAQEMALKQQGQPFNSLPEYDQKRLLSQVYKKTTKKLWIGTFHSLCARILRYDVNKYQDEKKRQWERNFSIFDESDVQSLVKNIVLKQFNLDDKKFNPRTVRYAISNAKNLGLSPEAYLKENSYAKGRVIAEVYNEYQTQLAANNALDFDDLILVPVRLFQQNESILGYWHSQFKHILVDEYQDTNRIQYELIQLLTTNAEPRKSEWNWENRSIFVVGDADQSIYSFRMADFTILLNFQSDFGDGLPDEDTRTMVKLEENYRSTETILQAANQLIENNSQRIDKILRPTRGEGEEIYCYKAEDERIEADFVMGKIQEMVETNPELNWGDFALLYRVNAQSRPFEDNFIRNNIPYNIVGGFKFYDRQEIKDSIAYLRLIVNPFDTVSLLRVINSPRRGIGKTSIDSLLKASQELEIPLWEIVRDETSVKTLAGRAAKSVNKFASMIKELQGKLKELSGTEIFDQIMELSGYVDDLKTKGTEEADNRLENIYELYSAIAQYQEENEDTSLQGYLTNASLASDLDNLDEGQEKVSLMTLHSAKGLEFPIVFLVGLEQGTFPHVRSLNDPLSLEEERRLCYVGITRAQEQLFISHARERYVWGSKEMKMVSQFIQEIPEELINSNLRPTARKVHRKKTVSSSANDKWSVGDRVIHHSFGEGEITHILGSGKKTNLAIQFAGLGRKIVDPRTNSITKIE

SEQ ID NO: 44107 - DNA, 2226 bp, Exiguobacterium sibiricum 255-15
  CDS (1)..(2226): transl_table=11
atgtttaatttaagtgaacagcttgtcagcggattgaacccggaacaagcaaaggcagtcaaacacaccgatggaccgctcttgatcatggcgggagcaggctccgggaaaacccgtgtcctgacacaccgcgttgcctatttgatggcagcaaaacaagttgcgccgtggaatatcctcgcgattacgtttacgaataaagcggcacgcgagatgcgtgaccggatttcacggctcgtcggcggtgtcgcgaatgacatctgggtctcgaccttccactcgatgtgtgtccggatgttacggcgtgacatcgaaaaaatcggctataaccggaacttcacgattcttgattcgagcgatcaacagtcagcactgaagctcgtcttaaaagaacagaacctcgatccgaagaagtgggatccccggtcgatgctgtcgatcatctcgagtcaaaaaaatgaactgcgcagtgccgagttctacgcgtccatcgtcacgaatccgtatgaaaaaacggttgctgagatttataaaggatacgaagcggtcctgcgtcgcaacaacgcccttgattttgatgacttgatcgggaagacgacagaactgtttaaacaaaatccggacgtcctgtcgttttatcaacgaaagttccaatacatccatgtcgatgagtatcaagatacgaacaaagcccagtatgatctcgtcaatctcctggcagcagcccaccagaacttatgtgtcgtcggggactcggatcagtcgatttaccgctggcgcggagccgatatcgcaaacatcctgtcgtttgaggaagattatccgacagcgaaagtcatcctgctcgaacaaaactaccgttcgtcgaaacgaattttggatgcagcgaaccatgtcattcaaaacaacagtacccggaaagataagaaactgtggacggaaaacgcagaaggcgaaaaactgattgtccatacagcggaaaatgagcgggaagaagcgttttatatcgtccaggaaatccggaatgcattgcgttacggcatgaaactaaacgatgtcgcaattctgtaccggacgaatgcccaatcgcgggcgattgaggaaacgttgctgaaatccaatgtcccgtacaagatgatcggcggcacgaagttctatgaccgtaaagaaatcaaggatgtcctggcgtacctgcgcctgatttcaaatccgaacgaagacttatcgtttgcccggattgtcaatgaaccgaaacgcggtatcggagcgacgacgattgataaactgcgtgattttgccgacctgcaaggcgtgtccttgatggaagcgatccgcgacatcgaattgtcgagcattgccccgaaaacggcagcgaaactgacggatttccggacaatgattcttggcttacagcaaatgcaggaattcatcagcctgtccgaactggtggaagaagtccttgagaaaaccggataccgccaagtcttaaaagaagacaaaacactcgaagcacaaagtcgtctcgagaacatcaacgagttcatcacagtcgcacaaaactttgaaaaagagaccgaaaaagccgatccggaagaccaaacgatcatcgcgttcttaacggatttgacgctggtcgccgatgtcgattcactggatgagagtgatctgggggaacaggtcaccttgatgacgttacactccgcaaaaggactcgagttcccgatcgtcttcctgatcgggatggaagaaggattgttcccgcacagccgctccctgcaggatgaagacgaaatggaagaagaacgtcgtctcgcctatgtcggaattacgcgggctgaaaaacgattgtacttgtcccacgcgcggatgcgttcactgtatggccggacgaatgccaatctcgaatcccgtttccttgccgaattaccggaggaagtattggaacggaccggtaaaaaaccgaagccattgccatgggaagatcgaccggtaccgcaaggaaaagccgtcatcggccgatcggtcacgaaaccgacagcgatgaagacatcaggcgcagaatcactcggctggaacgtcggtgacaaagcggaacatggaaaatggggacgcggaaccgtcgttcagacacgcggagcaggggacagcttagaaatcgatatcgccttcccggaagtcggtgtcaaacggttgcttgcgaaattcgcaccaatcaaaaaggtatga

SEQ ID NO: 44108 - protein, 741 aa, Exiguobacterium sibiricum 255-15
MFNLSEQLVSGLNPEQAKAVKHTDGPLLIMAGAGSGKTRVLTHRVAYLMAAKQVAPWNILAITFTNKAAREMRDRISRLVGGVANDIWVSTFHSMCVRMLRRDIEKIGYNRNFTILDSSDQQSALKLVLKEQNLDPKKWDPRSMLSIISSQKNELRSAEFYASIVTNPYEKTVAEIYKGYEAVLRRNNALDFDDLIGKTTELFKQNPDVLSFYQRKFQYIHVDEYQDTNKAQYDLVNLLAAAHQNLCVVGDSDQSIYRWRGADIANILSFEEDYPTAKVILLEQNYRSSKRILDAANHVIQNNSTRKDKKLWTENAEGEKLIVHTAENEREEAFYIVQEIRNALRYGMKLNDVAILYRTNAQSRAIEETLLKSNVPYKMIGGTKFYDRKEIKDVLAYLRLISNPNEDLSFARIVNEPKRGIGATTIDKLRDFADLQGVSLMEAIRDIELSSIAPKTAAKLTDFRTMILGLQQMQEFISLSELVEEVLEKTGYRQVLKEDKTLEAQSRLENINEFITVAQNFEKETEKADPEDQTIIAFLTDLTLVADVDSLDESDLGEQVTLMTLHSAKGLEFPIVFLIGMEEGLFPHSRSLQDEDEMEEERRLAYVGITRAEKRLYLSHARMRSLYGRTNANLESRFLAELPEEVLERTGKKPKPLPWEDRPVPQGKAVIGRSVTKPTAMKTSGAESLGWNVGDKAEHGKWGRGTVVQTRGAGDSLEIDIAFPEVGVKRLLAKFAPIKKV

SEQ ID NO: 44109 - DNA, 2172 bp, Xylella fastidiosa Dixon
  CDS (1)..(2172): transl_table=11
gtgcttgatcacttaaatcagaaccagcgcgaggccgttgctgcagctcccggccactacctgatcctcgccggtgccggatcaggaaaaacccgcgttctcactcatcgcatcgtttggctcaacgaggtaaatggggtacccacccacagcatgatggccgtcaccttcacgaacaaggccgccggcgaaatacaacaacggattgatctacaactgcgccacggcaaacgcggcatgtggatcgggaccttccatagcctggcgcatcgcttactgcgcctgcattggaacgacgcaacattacccgaaaacttccaggtcatagacagcgacgatcaattgcgcctcgtcaaacgagtgatccagtccttgggattgaatgacaccctcttccctcccaaacaggcgatgtggtggattaatacacagaaagatgaaggacgccgcccagagcacatccaacccgagtcacacgacgactggatcgagacgcaacgccgcatctataccgagtatcaggagcgctgcaaccgcgctggtttggtcgatttttcggaactgctgctgcgggcacatgaactactacgcgatacacctgcactactgacacactaccgttcgcgcttccgtgagattctgatcgacgaattccaagataccaacgccatccagtacgcgtttgtgcgtgtccttgccaatgacactggccacatcttcgccgtcggcgatgacgatcaagccatctacggctggcgtggtgccaaagttgagcatgtacaacacttcctgaaagattttccaaacgtgcagaccatccgcttggagcaaaattaccgctccagcgccaatatccttgacgctgccaacgcaatcattgcccataacccagaccgaattggcaaacgcctctggactgaatccggtgttggtgaatccatcgacctatacgccgcctacaacgagattgatgaagcccgctacatcgtcgaacgcgcccgccagtgggtacgcgacggcggcagctacggcgagatcgcagtgctttaccgtagtaacgcacagtcccgcgcgtttgaagaagtgctgcaatccgaacatatcccctaccgtgtttacggcggcatgcgcttcttcgagcgtgccgaaatcaaggatgccctagcctatctgcgcctgcttgccaatcgtagcgatgatgctgcgttcgaacgcgttgtaaatacccccgtacgcggcatcggtgagcgcaccttagatgaagtaagacacctagcacgtacccaaggcttagcactatgggatgcggcaatggcatgtacccaatcaaccacgctgaccgcgcgcgcgcgtaacgccttggcgagtttcctcaatttactgcaacaacttgcggtggaaaccaaccagatgggtttagccgaacgaattgaccatatgctgcagcgttcggagttacgccagcactggaagaaagaagcgcgtggttctctggatgccgaatcacgtcaagaaaacttagacgaacttgtttccgtcgcttcacgctttgtccttccgcaaaacgacgaagacacacccatcatgaccgaattagacgcgttcctatcctacgcgtgcctggaaagtggtgatggtcaagtccaagccggggaagaaggcgtacaactgatgaccctacactcagccaaaggcttggaatttcccctagtcttcttggtgggcttggaaaatggattattccccagcgcgcgttccctggatgaacacgaccgactagaggaagaacgccgcttagcgtatgtcggcatcacccgcgcccgtcacaaactcatcctcagctatgcccaagcacggcgtatccacggtaaagataactacaacgtcccctcacgctttttacgcgagatcccgcagaatctattgcatgaagtacgccccaccatccaggtctcacaccagaccccattaggagcagtgcaacgtccagcccatgatgaacgcgacgcagcacctatcaagctcggcgtgaacgtcatgcaccctacatttgggtgcggcgtggttgtcgactacgaaggcagcggcgcgcacacccgcgtacaaatcaaattcgatgacgccggtacaaaatggttggtcatggcatacgccaaactcagcgtggtatag

SEQ ID NO: 44110 - protein, 723 aa, Xylella fastidiosa Dixon
MLDHLNQNQREAVAAAPGHYLILAGAGSGKTRVLTHRIVWLNEVNGVPTHSMMAVTFTNKAAGEIQQRIDLQLRHGKRGMWIGTFHSLAHRLLRLHWNDATLPENFQVIDSDDQLRLVKRVIQSLGLNDTLFPPKQAMWWINTQKDEGRRPEHIQPESHDDWIETQRRIYTEYQERCNRAGLVDFSELLLRAHELLRDTPALLTHYRSRFREILIDEFQDTNAIQYAFVRVLANDTGHIFAVGDDDQAIYGWRGAKVEHVQHFLKDFPNVQTIRLEQNYRSSANILDAANAIIAHNPDRIGKRLWTESGVGESIDLYAAYNEIDEARYIVERARQWVRDGGSYGEIAVLYRSNAQSRAFEEVLQSEHIPYRVYGGMRFFERAEIKDALAYLRLLANRSDDAAFERVVNTPVRGIGERTLDEVRHLARTQGLALWDAAMACTQSTTLTARARNALASFLNLLQQLAVETNQMGLAERIDHMLQRSELRQHWKKEARGSLDAESRQENLDELVSVASRFVLPQNDEDTPIMTELDAFLSYACLESGDGQVQAGEEGVQLMTLHSAKGLEFPLVFLVGLENGLFPSARSLDEHDRLEEERRLAYVGITRARHKLILSYAQARRIHGKDNYNVPSRFLREIPQNLLHEVRPTIQVSHQTPLGAVQRPAHDERDAAPIKLGVNVMHPTFGCGVVVDYEGSGAHTRVQIKFDDAGTKWLVMAYAKLSVV

SEQ ID NO: 44111 - DNA, 2172 bp, Xylella fastidiosa Ann-1
  CDS (1)..(2172): transl_table=11
gtgcttgatcacttaaatcagaaccaacgcgaggccgttgctgcagctcccggccactacctgatcctcgccggtgccggatcaggaaaaacccgcgttctcactcatcgcatcgtttggctcaacgaggtaaatggagtacccacccacagcatgatggccgtcaccttcacgaacaaggccgccggggaaatacaacaacggattgatctacaactgcgccacggtaaacgcggcatgtggatcgggaccttccatagcctggcgcatcgcttactgcgcctgcattggaacgacgcaacattacccgaaaacttccaggtcatagacagcgacgatcaattgcgcctcgtcaaacgagtgatccagtccttgggattgaatgacaccctcttccctcccaaacaggcgatgtggtggattaatacacagaaagatgaaggacgccgcccagagcacatccaacccgagtcacacgacgactggatcgagacgcagcgccgcatctataccgagtatcaggagcgctgcaaccgcgctggtttggtcgatttttcggaactgctgctgcgggcacatgaactgctacgcgatacccctgcactactgacacactaccgttcgcgcttccgtgagattctgatcgacgaattccaagataccaacgccatccagtacgcgtttgtgcgtgtccttgccaatgacactggccacatcttcgccgtcggcgatgacgaccaagccatctacggctggcgtggtgccaaagttgagcatgtacaacacttcctgaaagattttccaaacgtgcagaccatccgcttggagcaaaattaccgctccagcgccaatatccttgacgctgccaacgcaatcattgcccataacccagaccgaattggcaaacgcctctggactgaatccggtgttggtgaatccattgatctatacgccgcctacaacgagattgatgaagcccgctacatcgtcgaacgcgcccgccagtgggtacgcgacggcggcagctacggcgagatcgcagtgctttaccgtagtaacgcacagtcccgcgcatttgaagaagtgctgcaatccgaacatatgccctaccgtgtttacggcggtatgcgcttcttcgagcgtgccgaaatcaaggatgccctagcctatctgcgcctgcttgccaatcgtagcgatgatgctgcgttcgaacgcgttgtaaatacccccgtacgcggcatcggtgagcgcaccttagatgaagtaagacacctagcacgtacccaaggcttagcactatgggatgcggcaatggcatgtacccaatcaaccacgctgaccgcgcgcgcgcgtaacgccttggcgagtttcctcaatttactgcaacaacttgcgctggaaaccaaccagatggatttagccgaacgaattgaccatatgctgcagcgttcggagttacgccagcactggaagaaagaagcacgtggttctctggatgccgaatcacgtcaagaaaacttagacgaacttgtttccgtcgcttcacgctttgtccttccgcaaaacgacgaagacacacccatcatgaccgaattagacgcgttcctatcctacgcgtgcctggaaagtggtgatggtcaagtccaagctggggaagaaggcgtacaactgatgaccctacactcagccaaaggcttggaattccccctagtcttcttggtgggcttggaaaatggattattccccagcgcgcgttgcctggatgaacacggccgactagaggaagaacgccgcttagcgtatgtcggcatcacccgcgcccgtcacaaactcatcctcagctatgcccaagcacggcgtatccacggtaaagataactacaacgtcccctcacgctttttacgcgagatcccgcaggatctattgcatgaagtacgccccaccatccaggtctcacaccagcccccattaggagcagcgcaacgtccagcccatgatgaacgcgacgcagcacctatcaagctcggcgtgaacgtcatacaccctacatttgggtgcggcgtggttgtcgactacgaaggcagcggcgcccacacccgcgtacaaatcaaattcgatgacgccggtacaaaatggttggtcatggcatacgccaaactcagcgtggtatag

SEQ ID NO: 44112 - protein, 723 aa, Xylella fastidiosa Ann-1
MLDHLNQNQREAVAAAPGHYLILAGAGSGKTRVLTHRIVWLNEVNGVPTHSMMAVTFTNKAAGEIQQRIDLQLRHGKRGMWIGTFHSLAHRLLRLHWNDATLPENFQVIDSDDQLRLVKRVIQSLGLNDTLFPPKQAMWWINTQKDEGRRPEHIQPESHDDWIETQRRIYTEYQERCNRAGLVDFSELLLRAHELLRDTPALLTHYRSRFREILIDEFQDTNAIQYAFVRVLANDTGHIFAVGDDDQAIYGWRGAKVEHVQHFLKDFPNVQTIRLEQNYRSSANILDAANAIIAHNPDRIGKRLWTESGVGESIDLYAAYNEIDEARYIVERARQWVRDGGSYGEIAVLYRSNAQSRAFEEVLQSEHMPYRVYGGMRFFERAEIKDALAYLRLLANRSDDAAFERVVNTPVRGIGERTLDEVRHLARTQGLALWDAAMACTQSTTLTARARNALASFLNLLQQLALETNQMDLAERIDHMLQRSELRQHWKKEARGSLDAESRQENLDELVSVASRFVLPQNDEDTPIMTELDAFLSYACLESGDGQVQAGEEGVQLMTLHSAKGLEFPLVFLVGLENGLFPSARCLDEHGRLEEERRLAYVGITRARHKLILSYAQARRIHGKDNYNVPSRFLREIPQDLLHEVRPTIQVSHQPPLGAAQRPAHDERDAAPIKLGVNVIHPTFGCGVVVDYEGSGAHTRVQIKFDDAGTKWLVMAYAKLSVV

SEQ ID NO: 44113 - DNA, 2280 bp, Streptococcus suis 89/1591
  CDS (1)..(2280): transl_table=11
atgaacccattattaaacggaatgaatgacagacaggcagaagcggtacagacgacggaaggtccgctattgattatggcaggtgctggttcaggtaagacgcgagtcttaacccaccgcatcgcctacttaattgatgagaaaatggtcaatccctggaatattttagctatcacctttacaaacaaagcggcgcgtgagatgaaggagcgggcctacgccctcaatcctgctacgcaagactgtttgattgctaccttccactccatgtgtgtgcggattttgcgtcgtgatgctgaccatattggttataatcgcaattttacgattgtcgatccaggtgagcaacgcagtctcatgaaacggattttgaaaaatcttaatttagatccgaaaaagtggagtgaacgttctatcctgggaaccatttctaatgccaaaaacgacttgattgatgacaaggcgtttgaagcccaggcaggcgacctatacacgcagattgttgctaaatgctacacggcttaccaaaaggaactaagacagtcagaagccgttgactttgatgatttgatcatgttgacgctccgcctttttgaccaaaatccagaggtcctgacctattaccagcagaaattccagtatatccatgtagatgagtatcaggataccaaccatgcccagtaccaattggtcaagctcctggcatcgcgtttcaagaatatctgtgtggtcggggatgcggaccagtcgatctatggttggcgtggtgcggatatgcaaaatatcctggactttgaaaaggactatccagaaagcaaggttgtgcttttggaggaaaactatcgttcgaccaagaacgtcttgcaggctgccaatgaggtcatcgaaaacaaccgcaatcgacgtcccaaaaaactctggacacagaatgcccaaggggatttgattacctactatcgtgccagagatgagaatgacgaggcgatttttgtcgcagggcagattgaccagttgcacagagaaggcaaggcttataaggattttgctgtactctatcggaccaatgcccaatcccgtaccattgaagaagccctgctcaaatctaatatcccttataccatggttggaggcaccaagttctacagccgtaaggaaatccgggatgtgatttcttatttgaatatcatcgcaaatccatcggataatatctcctatgaacgcattgtcaatgagccaaaacgtggcgttggacctggcacggttgacaaactccgtgattttgcgaccagccacagcatgtccttgctagaagcttcacaggatattatgttatcgccgattaaagggaaggcagcgcaggcagtctttgacctagccaatctcctctataatcttcgtaatcaattagacaacttgacggttacccaagtagtcgaggcagtattgaatcaaacaggctacattgatgcccttgcagcacaaaatacgctggaagccaatgctcgcatagaaaacattcaagaattcctgtctgttaccaaaaactttgacgaaaaggatactgaggaagaagagacaggtctggatcgcttgacacgattcctgcttgatttggcactgattgctgacacagatgatggcgatacagaatcttcagaagtgactcttatgaccctccacgcagccaaagggctggaatttcctgttgtcttcttgattggtatggaggaaaatgtcttcccacttagtcgtgcagcagaagaagaggacgaattggaagaagaacgtcgtttggcttacgtaggaatcacccgtgctgagcagactctttacctgaccaatgccaactcccgcctgctctttggtcgcaccaactacaaccaaccaagccgctttatccgagaaatatccagtgacttgcttgattatcaaggtcttgctcgtccagccaatactagctttaaggcctcttatgtcaatggcagagcgacacagtttggacaaggtatgagcttacaacaagccatgcaaagtcgaaaagcatccgtacaaccatcggctaagctcggaggcagtatgcctttcgcatcgagcaaccaatcgtcaagctcaggcaccaactggtcagttggtgacatcgcagtccacaagaaatggggacgcgggacagtccttgaagtatcaggttcaggcagcaaccaagaactcaaaatcaatttcccagagatgggacttaagaaggtcctggcaagtctggcaccgattagtaaggaagagtag

SEQ ID NO: 44114 - protein, 759 aa, Streptococcus suis 89/1591
MNPLLNGMNDRQAEAVQTTEGPLLIMAGAGSGKTRVLTHRIAYLIDEKMVNPWNILAITFTNKAAREMKERAYALNPATQDCLIATFHSMCVRILRRDADHIGYNRNFTIVDPGEQRSLMKRILKNLNLDPKKWSERSILGTISNAKNDLIDDKAFEAQAGDLYTQIVAKCYTAYQKELRQSEAVDFDDLIMLTLRLFDQNPEVLTYYQQKFQYIHVDEYQDTNHAQYQLVKLLASRFKNICVVGDADQSIYGWRGADMQNILDFEKDYPESKVVLLEENYRSTKNVLQAANEVIENNRNRRPKKLWTQNAQGDLITYYRARDENDEAIFVAGQIDQLHREGKAYKDFAVLYRTNAQSRTIEEALLKSNIPYTMVGGTKFYSRKEIRDVISYLNIIANPSDNISYERIVNEPKRGVGPGTVDKLRDFATSHSMSLLEASQDIMLSPIKGKAAQAVFDLANLLYNLRNQLDNLTVTQVVEAVLNQTGYIDALAAQNTLEANARIENIQEFLSVTKNFDEKDTEEEETGLDRLTRFLLDLALIADTDDGDTESSEVTLMTLHAAKGLEFPVVFLIGMEENVFPLSRAAEEEDELEEERRLAYVGITRAEQTLYLTNANSRLLFGRTNYNQPSRFIREISSDLLDYQGLARPANTSFKASYVNGRATQFGQGMSLQQAMQSRKASVQPSAKLGGSMPFASSNQSSSSGTNWSVGDIAVHKKWGRGTVLEVSGSGSNQELKINFPEMGLKKVLASLAPISKEE

SEQ ID NO: 44115 - DNA, 2421 bp, Sulfitobacter sp. EE-36
  CDS (1)..(2421): transl_table=11
atgaatgattttgacgaaatggccgccttcgagggcgcttccctatcatcgcgcgctatggctgcgcgtccgcaaccctatcttgatgggctgaatccggcccagcgtgccgcggtggagcagatggatggccctgtcttgatgctcgcgggggcaggcacgggcaagaccaaggctttgacggcgcggatcgtgcatctgatgaacaccgggcgcgcccgcccgaacgagattctcgcggtaaccttcaccaataaggccgcgcgcgagatgaaaaaccgtgtggggcatatgctggggcagagcattgaagggatgccttggctgggaacgtttcatgcgatttgcgtcaagctgttgcgccgccatgctgaattggtcgggctaaagtcgaacttcaccattctggacacggatgaccagctgcgtctgctcaagcagttgatcaaagcggaagggattgatgacaaacgttggcccgcgcgtttgctgtcaggcgttattgatggctggaaaaaccgcgcattgacgcccgacaaaattccttcggccgatgcgggtgcctataaccaccgcggggcggagctttatgcgcagtatcaagcgcggcttaaagatctgaacgcctgcgacttcggtgatttgctgctgcatatggtcaccatcttccagcagcacgaagacgtgctggggcaatatcagcggtggttcaaatatattctggtggatgagtatcaggataccaacgtggcacagtatttgtggctccgtctgctggcctctggccacaagaatatctgctgtgtcggggatgacgaccagtcgatctacggatggcgaggggccgaggttggcaacatcctgcggttcgaaaaagattttcccggcgctcatgtggtgcggttggaacagaattaccggtcaacaccgcacatcctggcggccgcttcgggcgtaatcgcaggaaacgaggggcgtttgggcaagactttgtggacggaatcccgtgagggagaaaagctgcgtctcatcggccattgggatggcgaggaagaggcgcgttggatcggcgacgaaatcgaagcgttgcagcgcggcacacgcgagcttgatccatacacattggacgatatggcgattcttgtacgggcatcacaccagatgcgcgcgttcgaggatcggttcctgaccattggcctaccgtaccgcgtgatcggtggcccccgtttctatgaacggttagaaattcgcgacgccatggcctatttcagggtggttacctcgcctgatgacgatcttgcttttgagagaatcgtgaacacgcccaagcgtggtttgggcgataaagcgcaacaaaatatacagaaaaccgcgcgtgaaaacggtgtgaacctcgtggagggggcgcggatcctattggcgaatggcgggattggcgggcgtggtgcggcgcagttgcgtctgctcatcgacgggattcagcgctggtccgaactggcccggggcccgcgcctacagactgtggttgatgacgatagcgtcatcgacgaaggtgcgccgctgtttcacgaggaatatggcccgcccgaggtcagccatgtggaattggcgcagattattttggatgaaagcggatatactggtttttggcagaacgacaaaacgccggaagctccggggcggctcgagaacctgaaggagctggttaaagcgttggagcagttcgagaatcttcaaggtcttctggaacacgtcagcttgatcatggataatgaaagcgacgatggtggtgccaaagtgtcgatcatgacgttgcacgcggccaaggggctagagtttccggcggtgtttcttcccggctgggaggatgggctgtttccgtcgcagcgatcgatggacgaatctggcctgaaggggctggaggaagagcggcggcttgcctatgtcggaatcacccgggccgagcagctttgcacgatctcttttgcggccaaccgccgcgtgtttggtcagtggcaaagcgccatgccgtcacggtttatcgacgaacttcccgaagctcatgtggatgtgctgaccccgccggggctgtatggtggcgggtatggcgcagcgatgcccaaatcgaatctgcatgaaaaagccgcggaagcgaatgtatataactctccggggtggcgcagattgcagacgcgcagccaagcgcgcagcgtgagccagccttcggaagcccgaaatgtgacgatcgacatgtccgccgtcagcagttttgcgatgggagaacgggtgttccaccagaaatttggctatggcgaagtcgttggaatcgaaggggataagcttgagatcagctttgacaaggccgggatcaagaaggtcgtgtcgcgctatctgagcgcatcggatgacgttccgttctaa

SEQ ID NO: 44116 - protein, 806 aa, Sulfitobacter sp. EE-36
MNDFDEMAAFEGASLSSRAMAARPQPYLDGLNPAQRAAVEQMDGPVLMLAGAGTGKTKALTARIVHLMNTGRARPNEILAVTFTNKAAREMKNRVGHMLGQSIEGMPWLGTFHAICVKLLRRHAELVGLKSNFTILDTDDQLRLLKQLIKAEGIDDKRWPARLLSGVIDGWKNRALTPDKIPSADAGAYNHRGAELYAQYQARLKDLNACDFGDLLLHMVTIFQQHEDVLGQYQRWFKYILVDEYQDTNVAQYLWLRLLASGHKNICCVGDDDQSIYGWRGAEVGNILRFEKDFPGAHVVRLEQNYRSTPHILAAASGVIAGNEGRLGKTLWTESREGEKLRLIGHWDGEEEARWIGDEIEALQRGTRELDPYTLDDMAILVRASHQMRAFEDRFLTIGLPYRVIGGPRFYERLEIRDAMAYFRVVTSPDDDLAFERIVNTPKRGLGDKAQQNIQKTARENGVNLVEGARILLANGGIGGRGAAQLRLLIDGIQRWSELARGPRLQTVVDDDSVIDEGAPLFHEEYGPPEVSHVELAQIILDESGYTGFWQNDKTPEAPGRLENLKELVKALEQFENLQGLLEHVSLIMDNESDDGGAKVSIMTLHAAKGLEFPAVFLPGWEDGLFPSQRSMDESGLKGLEEERRLAYVGITRAEQLCTISFAANRRVFGQWQSAMPSRFIDELPEAHVDVLTPPGLYGGGYGAAMPKSNLHEKAAEANVYNSPGWRRLQTRSQARSVSQPSEARNVTIDMSAVSSFAMGERVFHQKFGYGEVVGIEGDKLEISFDKAGIKKVVSRYLSASDDVPF

SEQ ID NO: 44117 - DNA, 2349 bp, Roseovarius nubinhibens ISM
  CDS (1)..(2349): transl_table=11
atgagtgatttcagcgaatccgacgcctttgacggcgcatccctctcggcgcgcgccatggcggcgcgtccgcgtccctatctcgatgggttgaaccccgaacagcgcgaagcggtggagcggctcgatgggccggtcctgatgctcgccggggcgggcactggcaagaccaaggcgctcaccagccggatcgcccatctgctgagcaccggcagcgcccggcccgatgaaatcctcgccgtgacctttaccaacaaggcggcgcgcgagatgaaagatcgcgtggccgcccatctcggcgaggcggttgaggggatgcgctggctcggcacgttccattcgatctgcgtcaagctgctgcgccgtcatgccgaactggtcggcctgaaatcgaatttcaccattctcgacactgatgatcagctgcgcttgctcaaacagttggtgcaggcggcggggatcgacgacaaacgctggcccgcgcggcaattggccggggtcatcgaccaatggaaaaaccgcgcctggacgcccgatcgggtgccggccagcgaggccagcgcctatgacggcaagggcgtggcgctttatacgctctatcagacccgtctgcgcgagttgaacgccgtcgatttcggcgatctgctgttgcatatggtggtgatcttccagagccatcaggacattctcgaccgctatcaacgctggttccgctacatcctcgtagacgagtatcaagataccaacgtggcccaatacctgtggctacggctcttggcgtcggggcatcgcaacatctgctgcgtgggcgatgacgatcagtcgatctatggctggcgcggggcagaggtgggcaatatcctgcggtttgaaaaggattttcccggcgcgcatgtggtgcggctcgaacagaattaccgttcgaccgcgcatattctcgcggcggcgagcggcgtcatcgcgggcaacaaggggcggcttggcaaggaactttggaccgaggccgagggcggcgagaaggtgcggctcatcggccattgggatggcgaggaagaggcgcgctggatcggcgaagagatcgactccatgcaacgcggcacgcgcgggatgcggcccatcggcctcgacgatatggcgatcctcgtgcgggccagccaccagatgcgggcctttgaagatcggtttctgaccatcggcatgccctatcgggtgatcggcgggccgcgcttttacgagcgtctcgagatccgcgatgcgatggcctatttccggctggtggtgtcgccgagcgatgatctggcctttgagcgggtggtcaatacgcccaagcgcgggctgggtgacaaggcgcagcagaaaatccagatgacggcccgggaaaacagcgtgccgcttcttgagggcgcgcgcattctgcttgagcaaaaggggctcggcggcaagggcggggcagagcttggccggtttgtcgagaacatcacgcgctggggccgcatggtgggggatgaggcgatcagccatatcgagctggccgagatgatcctcgacgagagcggctataccgagatgtggcaaaacgacaaaacgcccgaagcgccggggcggctcgagaacctcaaagaattggtcaaggccttggaacagttcgaaaatctgcaagggtttctcgaacatgtcagcctgatcatggacaatgaacaggaagaggcgggcgagaaggtcagcatcatgacgctgcacgcggccaaggggctcgagtttccggcggtgttcctgccgggctgggaggatgggctgtttccgtcgcaaaggtcgatggatgaaagcggcctcaagggcgtcgaggaagagcggcggctggcctatgtggggatcacccgggccgaggaaatctgcacgatctcctttgccgggaaccgccgcgtctttggccagtggcagagccaaatgccgtcgcggttcatcgacgagctgcccgaagagcatgtcgaggttctgacgcctccgggcctttatggcggcggttatggcgcggccgggatgggggtcacgggcgatatcgagagccgcgtggcggcggccgatggctataattcaccgggctggagacggctgcaagcgcgggcgagcgaacgcccgataagccagccgcgcgagagcaaatcgagcgtcatcgacatgcaggccaacagctcgcacaccgtgggcgagcgcgtgtttcaccagaaattcggctatggcacgattgccgggatcgagggcgacaagctcgagattgcctttgaaaaggccggcgtgaaaaaggtcgtggcgcggtttgtcaccggcgccgaggatattcccttctaa

SEQ ID NO: 44118 - protein, 782 aa, Roseovarius nubinhibens ISM
MSDFSESDAFDGASLSARAMAARPRPYLDGLNPEQREAVERLDGPVLMLAGAGTGKTKALTSRIAHLLSTGSARPDEILAVTFTNKAAREMKDRVAAHLGEAVEGMRWLGTFHSICVKLLRRHAELVGLKSNFTILDTDDQLRLLKQLVQAAGIDDKRWPARQLAGVIDQWKNRAWTPDRVPASEASAYDGKGVALYTLYQTRLRELNAVDFGDLLLHMVVIFQSHQDILDRYQRWFRYILVDEYQDTNVAQYLWLRLLASGHRNICCVGDDDQSIYGWRGAEVGNILRFEKDFPGAHVVRLEQNYRSTAHILAAASGVIAGNKGRLGKELWTEAEGGEKVRLIGHWDGEEEARWIGEEIDSMQRGTRGMRPIGLDDMAILVRASHQMRAFEDRFLTIGMPYRVIGGPRFYERLEIRDAMAYFRLVVSPSDDLAFERVVNTPKRGLGDKAQQKIQMTARENSVPLLEGARILLEQKGLGGKGGAELGRFVENITRWGRMVGDEAISHIELAEMILDESGYTEMWQNDKTPEAPGRLENLKELVKALEQFENLQGFLEHVSLIMDNEQEEAGEKVSIMTLHAAKGLEFPAVFLPGWEDGLFPSQRSMDESGLKGVEEERRLAYVGITRAEEICTISFAGNRRVFGQWQSQMPSRFIDELPEEHVEVLTPPGLYGGGYGAAGMGVTGDIESRVAAADGYNSPGWRRLQARASERPISQPRESKSSVIDMQANSSHTVGERVFHQKFGYGTIAGIEGDKLEIAFEKAGVKKVVARFVTGAEDIPF

SEQ ID NO: 44119 - DNA, 2430 bp, Prochlorococcus marinus str. MIT 9211
  CDS (1)..(2430): transl_table=11
atgaatcaacagtcaaacagttttcttgatgggcttaataacgagcaatcaaatgctgttaatcatttcgaaggtccattacttgtggttgctggtgcaggaagtggaaagaccagagctttaactcacagaatcgctcatctaattacagagtataaagttgacccatctgagatccttgcagtcacatttactaataaggcagcaagagagatgaaagaaaggttagagctcctattagcaaaaagaattgctaaataccagctagatcagccttggtcttctgtaagtttggtagaacaaaatcaatttagaacgagaatatatagggaagtaacaaaagacctctggattggaacttttcatgcacttttttcaaaattacttaggtttgatatagaaaagttcgttgacaaagaaggtcttaaatggactaaatatttctctatttatgacgagacagatgcccaaagcttaataaaggaaataattatacaagatatgaatctagatccaaaacgttttgagcctaagaaagttcgatgggctataagtaatgctaaaaatcaagggattctaccagatcaatttacacagtctgcagaaggacaaagaggaaagcttattgcacaagtttatagcctttacagaaaagcattagcagcaaataatgctcttgactttgatgaccttcttttacttccagtacagctgttaaaacaaaatgagcaagtaagaagttactggcacaatcgattcaagcacttacttgttgatgaatatcaagacacaaattggactcaatatgagttgattaagcttttagtaactaatggcattaacccatctttcttctcaagttggtctaagcgatcagtcttcgttgttggtgatgctgatcaaagtatttatagctttagagccgctgattttagaatattaatggggtttcaagaagattttaaaaataagaattcactacaaggattatctaatgtagtaaaattagaagaaaattacagatcaacttctactatacttgatgctgctaattccttaatctcgaataataaagaacgactagataaagttctcaaggcgaccagaggtgaaggcgagctaattaaacttactcgctgcgacgacgaaatatctgaagcagaagccgttgttcatcgtctacgtcttctagaagcacataataaagatttaaaatggggtgatattgcaatcttatatagaacaaatgcacagtccagagtgattgaagaatctttagttagatggaatatcccatacatagttgttggtggattacgtttctatgacagaagagaagtaaaagatattttggcatacttaagactattaattaatccttccgacagtgtaagtctactaagaatattaaatgttcccaaaaggggaattgggaaaacaacagtacaaaggtttagcgatgcatcctctcaattaggaatacctctttgggaagtcgtaagtgatcccgaagcaattagatctcttggaggtaggtcagcgaaaggcttattgaaattcaaagagcttattgatgatcttcgattgagtttaaataacaccgagccttcgcaattaattcaattggttatggagaaaagtgggtatataagtgaacttattgctactgctacagatgaagctgaagaacgtagacgcaatctacaggaacttgtcaatgcatcgcttcaataccaggaagagaatgaagccgcggatctagaaggttttttagctactgctgctttagcaagcgatgccgataaaaaagatactgcccatgatcggatcactttaatgacattgcatagcagtaaagggttggaatttccgattgtatgccttgtaggactagaacaagggctattcccaagctatcgatcactggatgatcccgcttctttagaagaagaaagaagactctgctatgtagggcttaccagagcaaaagaaagattgtttctatttcatgcaactgaacgaagaatttggggagggatgcgagaacctgctgtctcatcaatctttctttcagaaattccatcagaacttattgaaggcgatatccaattagctggaggtgctgccttgagacgagagcgccgcatggatcgacttaccagagttgacagacgtgaagatcaactcaattcatcaggcatatcaaaaaatttgccaacaaatgcagtaaggcgtaaatattccggtccagcacctggagtctcatgggaagtgggcaataaagtacttcattcagcctttggggaaggggaagtaactcatatttttgggagtggcgagaaaatttctattgcaataaagtttgttggaatgggcccaaaaattcttgatcctcgactagcaccaattcagcctataaaagataattaa

SEQ ID NO: 44120 - protein, 809 aa, Prochlorococcus marinus str. MIT 9211
MNQQSNSFLDGLNNEQSNAVNHFEGPLLVVAGAGSGKTRALTHRIAHLITEYKVDPSEILAVTFTNKAAREMKERLELLLAKRIAKYQLDQPWSSVSLVEQNQFRTRIYREVTKDLWIGTFHALFSKLLRFDIEKFVDKEGLKWTKYFSIYDETDAQSLIKEIIIQDMNLDPKRFEPKKVRWAISNAKNQGILPDQFTQSAEGQRGKLIAQVYSLYRKALAANNALDFDDLLLLPVQLLKQNEQVRSYWHNRFKHLLVDEYQDTNWTQYELIKLLVTNGINPSFFSSWSKRSVFVVGDADQSIYSFRAADFRILMGFQEDFKNKNSLQGLSNVVKLEENYRSTSTILDAANSLISNNKERLDKVLKATRGEGELIKLTRCDDEISEAEAVVHRLRLLEAHNKDLKWGDIAILYRTNAQSRVIEESLVRWNIPYIVVGGLRFYDRREVKDILAYLRLLINPSDSVSLLRILNVPKRGIGKTTVQRFSDASSQLGIPLWEVVSDPEAIRSLGGRSAKGLLKFKELIDDLRLSLNNTEPSQLIQLVMEKSGYISELIATATDEAEERRRNLQELVNASLQYQEENEAADLEGFLATAALASDADKKDTAHDRITLMTLHSSKGLEFPIVCLVGLEQGLFPSYRSLDDPASLEEERRLCYVGLTRAKERLFLFHATERRIWGGMREPAVSSIFLSEIPSELIEGDIQLAGGAALRRERRMDRLTRVDRREDQLNSSGISKNLPTNAVRRKYSGPAPGVSWEVGNKVLHSAFGEGEVTHIFGSGEKISIAIKFVGMGPKILDPRLAPIQPIKDN

SEQ ID NO: 44121 - DNA, 2385 bp, Synechococcus sp. WH 7805
  CDS (1)..(2385): transl_table=11
atgagctttctcgccggcctcaatgacgcccagcgccgggcggttgatcaccatgaggggcccctgctggtggtggctggtgcgggtagcggcaagacccgggccttgacccatcgcattgcccatctcattggggagcacggtgccgatcccgcccagatcctggctgtgaccttcacgaacaaggcagcccgtgagatgaaggagcgtctggagctcctgcttgcccagcgactggcccagagtcagttcggccaaccctggagcaccctgccgccggtggagcagcgtcagctgcgctcacgcatctaccgggaagtcaccaaggagctgtggatcggcacctttcatgcccttttcgcacggatgctccgctacgacatcgacaagttcaaggacagcgaaggactctcttggaccaagcagttctccatctacgacgaggccgatgcccagagcctggtgaaggagattgtgacccaggagcttcagcttgaccccaagcgcttcgaaccgaaaaaaacccgttgggcgatcagtaacgctaagaatcaggggtggctgcccgatcagctcgaggccaatgccgaggggcagcggggcaaactcaccgccgacgtgtaccggcgctaccgcaaggccctcgcggccaacaatgccctcgatttcgatgacctgctgttgatgccggtgcagctgctgcagcagaacgagcaggtgcgcggctactggcaccgccgtttcgcccatgtgctggtggatgaatatcaagacaccaaccgcacccagtacgacctgatcaagttgctggtcactgacggcaaggatccccagacctacgacaactggacaggtcggtcggtgtttgtggtgggcgatgccgatcagagcatctacagcttccgggcggcggacttcacgatcctgatgggctttcaggacgacttcggagaccaggagcccgatgaggccacccgcaccatggtgaaactggaggagaactaccgctcgacggccacgattctcgaggctgccaatgccttgattgcgaacaacagcgagcgcatcgacaaggtgctgcgtcccacccgcggcgagggggagctgatttctttgacccgctgtgatgacgagatcgccgaggccgaagcggtggtgcatcggctgcggatgatggaagcagccaaccccgagctgacctggggggacatggcctgtctctatcgcaccaatgctcagtcgcgggcgctggaggaatccctggtgcgctggaggattccttatgtcgtggtgggcggcctgcgcttttacgaccggagggaaatcaaggatgtgctcggctacctgcgcctgctgatcaaccctgccgacaccgtgagtttgctgcgggtgatcaatgtgcccaagcggggcatcggcaagaccacgatccagcggctcactgatgcggccaatcagctgggcattcccctctgggatgtggtgagtgatcccgaagcggtgcgctccctcggtggccgttccgcccggggcttgctgcagttctgtgagctgatcaacggcttgcgcgaacgtgtgtccaccacgcccccttctgaactgattcagcaggtaatggagctcagtggctacgtcagcgaactgatcaccgaaggcagcgatgaggccgaggaacgcaggcgcaatctgcaggagctggtgaatgcaggtttgcagtaccaggaggaaaacgaggagggagatctcgagggttttctggcctctgcggctctggccagcgatgccgatagcaaggacaccgccgccgatcgcgtcactctgatgaccctgcacagcagtaaaggtctggaatttccggtggtgtgcctggtgggtctggagcaggggctctttcccagctatcgctcccttgacgatcccgcttcgctggaggaagagcggcggctctgttatgtgggcatcacccgggccaaggagcgcctgttcctctcccatgccagcgaacgacgtctctggggtggcatgcgcgaaccggccgtgccgagtgtgttcctctccgaactgccggaagcgctggtgcaaggagagatcccgcgctcaggaggcgctgcgatccgccgggaacaacgtctagatcgcctcactcgcgtggaccgtgagcaacccagcagcgcccctgctaacgcggtgcgtcggcgtcaggccggtccagcgcccggtcgcagctggagcgtgggtgaccgggtgctgcacagcagcttcggagaaggagaggtcacccacaccttcggtagtggcgagaaggtgtcgattgcggtgaagttcgcagggatgggtcccaagatcctggatccgcgcttggcgccgattgagcccttgccgtga

SEQ ID NO: 44122 - protein, 794 aa, Synechococcus sp. WH 7805
MSFLAGLNDAQRRAVDHHEGPLLVVAGAGSGKTRALTHRIAHLIGEHGADPAQILAVTFTNKAAREMKERLELLLAQRLAQSQFGQPWSTLPPVEQRQLRSRIYREVTKELWIGTFHALFARMLRYDIDKFKDSEGLSWTKQFSIYDEADAQSLVKEIVTQELQLDPKRFEPKKTRWAISNAKNQGWLPDQLEANAEGQRGKLTADVYRRYRKALAANNALDFDDLLLMPVQLLQQNEQVRGYWHRRFAHVLVDEYQDTNRTQYDLIKLLVTDGKDPQTYDNWTGRSVFVVGDADQSIYSFRAADFTILMGFQDDFGDQEPDEATRTMVKLEENYRSTATILEAANALIANNSERIDKVLRPTRGEGELISLTRCDDEIAEAEAVVHRLRMMEAANPELTWGDMACLYRTNAQSRALEESLVRWRIPYVVVGGLRFYDRREIKDVLGYLRLLINPADTVSLLRVINVPKRGIGKTTIQRLTDAANQLGIPLWDVVSDPEAVRSLGGRSARGLLQFCELINGLRERVSTTPPSELIQQVMELSGYVSELITEGSDEAEERRRNLQELVNAGLQYQEENEEGDLEGFLASAALASDADSKDTAADRVTLMTLHSSKGLEFPVVCLVGLEQGLFPSYRSLDDPASLEEERRLCYVGITRAKERLFLSHASERRLWGGMREPAVPSVFLSELPEALVQGEIPRSGGAAIRREQRLDRLTRVDREQPSSAPANAVRRRQAGPAPGRSWSVGDRVLHSSFGEGEVTHTFGSGEKVSIAVKFAGMGPKILDPRLAPIEPLP

SEQ ID NO: 44123 - DNA, 2166 bp, Pseudoalteromonas tunicata D2
  CDS (1)..(2166): transl_table=11
atggacgtctctgaattacttgatggcttaaacgataaacagcgtgatgctgttgccgccccacttcaaaatatgttggttttagcgggcgcgggctcaggtaaaacacgagtattggttcatcgtattgcatggctcatgcaagttgaaaatgcctctccttacagtatttttgccgtaacttttaccaataaagcagctaaagaaatgcgctctcgggttgaagaaacccttaaaacatctgctggcggcatgtggattggtactttccacggcttagctcatcgtattttacgtgcacatcatcgcgaagcacatttgcccgaagcgtttcaaattcttgattcagatgatcagattcgaatgatccgtcgcctacttaaagcaatgaacatcgatgaaaaaaaatggccgccaaaacaaatctcgtggtacatcagcgccaaaaaagatgaagcgctgcgccctaaagacatcaaggcatatgatgttaacgagcaaatgtttttaaatgtttataccgcctatcaagatgcatgtgaccgtgcaggtttagttgattttgctgaaattttactacgttgttatgagttactgaaaaatagtcctacgctgctacgtcattatcaacaacgtttcccacacatgttggttgacgagtttcaagataccaataccatccaatatgcttggttaaaactcattgctggcacaggcgggaatgtgatgatcgttggggatgatgatcaaagtatttatggctggcgtggtgcaaaaatcgaaaatattcgccgcttcttaactgattttgatgcgcaaaccattcgtcttgagcaaaactaccgctcaacaagcaccatattaaccgcagccaatgcattaattgcaaataattcagaacgaatgggcaaaagcctttggaccgaaggcagcgaaggcgaccctatctcaatttatgcggcttataacgaactcgatgaggcccgctttattgttggtaaaatcaagacttggctcaatgcgggtaacgccttgcaagatgccgctattttatatcgtaataatgctcaatcgcgtattttagaagaagcattactgcaagaaggtctcaaatatcgtatttacggaggcatgcgattttttgaacgccaagaaatcaaagatgctctttcgtatttacgtttagtcagtaatcgccaagacgatgcagcgtttgaacgcgtaatcaatactcctacgcgtggtattggtgaacgcaccttaagcttaattcgtgattgtgcgcgtaacgaatctattccgctttggtatgctgcaaaagcacttattgagcataaacatttaactggccgcgctgccaatgcagtcaacagctttattgagcttatagagaaagttgaaaaagttagtattgatttaccccttgaagagcaagctaaacaagcgattcatacctcaggcttaatggcgatgtaccaagctgaaaaaggtgaaaaagggcaagctcgagttgaaaacttagaagagcttattaatgcgtgtagtcagtttgaacttcctaacgaagaagagtttgcatcccctttaaccggctttttatcttataccgcgcttgaatcaggtgagggtcaagccgaagagcacgaagatgcagtgcaaatgatgaccttacactcagcgaaggggcttgaatttccactcgtatttatggcaggcgttgaagaagggatgtttccttctcaacaaagtaacgaagagtctggtcgactcgaagaagaacgccgtctttgttatgttggcatgactcgcgctatggaaaaactctatattagccatgcagagactcgtcgcttatatggccaagaaaaatatcatagcccttctcgttttttacgagaaatcccagaagcctgtgttgaagaaatcagaattagaactcaggtcactcgcccacaagcgaccaatcgtttcagcgctaccatgagccatgcagcattcgaagatactggttttaatttaggccaacgtgttttgcatactaaatttggcgaaggcacggtacttaattacgaaggtactggcgcacaatcacgcatacaagtggcctttgatgatgtaggcaccaaatggctggtaacagcttacgctcgcctacagagcctctaa

SEQ ID NO: 44124 - protein, 721 aa, Pseudoalteromonas tunicata D2
MDVSELLDGLNDKQRDAVAAPLQNMLVLAGAGSGKTRVLVHRIAWLMQVENASPYSIFAVTFTNKAAKEMRSRVEETLKTSAGGMWIGTFHGLAHRILRAHHREAHLPEAFQILDSDDQIRMIRRLLKAMNIDEKKWPPKQISWYISAKKDEALRPKDIKAYDVNEQMFLNVYTAYQDACDRAGLVDFAEILLRCYELLKNSPTLLRHYQQRFPHMLVDEFQDTNTIQYAWLKLIAGTGGNVMIVGDDDQSIYGWRGAKIENIRRFLTDFDAQTIRLEQNYRSTSTILTAANALIANNSERMGKSLWTEGSEGDPISIYAAYNELDEARFIVGKIKTWLNAGNALQDAAILYRNNAQSRILEEALLQEGLKYRIYGGMRFFERQEIKDALSYLRLVSNRQDDAAFERVINTPTRGIGERTLSLIRDCARNESIPLWYAAKALIEHKHLTGRAANAVNSFIELIEKVEKVSIDLPLEEQAKQAIHTSGLMAMYQAEKGEKGQARVENLEELINACSQFELPNEEEFASPLTGFLSYTALESGEGQAEEHEDAVQMMTLHSAKGLEFPLVFMAGVEEGMFPSQQSNEESGRLEEERRLCYVGMTRAMEKLYISHAETRRLYGQEKYHSPSRFLREIPEACVEEIRIRTQVTRPQATNRFSATMSHAAFEDTGFNLGQRVLHTKFGEGTVLNYEGTGAQSRIQVAFDDVGTKWLVTAYARLQSL

SEQ ID NO: 44125 - DNA, 2172 bp, Photobacterium sp. SKA34
  CDS (1)..(2172): transl_table=11
atggacgtttcactcctattagacgggctcaatgataaacaaagagaagcggtggcagcgccgttgggtaaccacctcgtactggcaggcgccggtagtggtaagacacgagtgctggttcatcgcattgcttggttgttatcggtagagcaagcatcaccgtattcgattatgtcggtgacctttaccaacaaagcggccgcagaaatgcgtgggcgtattaatgagttaatgcacggctcaagtgcggggatgtggaatggtactttccacggactatgtcaccgcatgctgcgtgctcactaccttgatgcgcgtttgccggaagattttaatattttagattctgatgatcagatgcgtttattgcgccgcttgatcaaagctcagaatctagatgaaaaacattggcctgctcgtcaggctgcttggtatatcaatgccaagaaagatgaaggtttacgtcctaaacacgttgaaacctatagcgatcccgtagagcaaacttggctgcgtatttacaccgcttaccaagaagcgtgcgatcgcgcgggtatggtcgattttgctgagttattgctgcgatcttacgagttattgcgtgataacaagcatattcgtgaacattaccaagcacgctttaagcacattttggttgatgagtttcaagataccaacagcattcagtttgcgtggttacgcttaatggcagggcctgattgccatgtgatgatcgtgggtgatgacgaccagtctatttatggctggcgtggagcaaaaatcgaaaatattcagcgtttcttaaatgaatttaaaggtgcatcgtcgattttccttgagcaaaactaccgttcgaccggcaatattctaaatgcagccaatgagttgattgcgaataacaacgaacgtatgggcaagaaactttggactgacggcggtgaaggtgagccgatttcgctttattctgcgtttaacgagattgatgaagcacgttttgcggtgggtaaaatcaaagaatggcgcgatcaaggtggtagccttaacgaaacggctttcttataccgtagtaacgcccaatcacgcgtattagaagaagcattaattcaagctgggttgccgtatcgaatttacggcggtatgcgattcttcgagcgccaagagataaaagatgcgttgtcttacatgcgcttaatctccaatcgtaatgatgatgcctcgtttgagcgtgtggtaaacaccccgacgcgtggtttgggcgatcgcacgttagagacgattcgtttagttgctcgcgatcgtggtttaactatgtggcaatcgagtattgccttgcttgaagagcaagttttagctggccgtgcggctaattcattacgccgtttcatcgagctgattaacgcacttgaagacgataccgcagatttaccaatgtatcagcagaccgatgaagtcattcgacattccggtttacgtgcaatgtacgagcaagaaaaaggcgaaaaagcccaagcgcgtattgaaaacttagaagaattggtcacagctactcgccagtttgagatcccagaagaagctgaaagtatgacgccacttgcggccttcttagcccatgcggcactagaagcgggtgatggtcaggcggatgattttgaagatgcggtgcagctgatgacgatgcacagcgccaaaggtctggaattcccagtggtatttatggtgggtgtagaagaggggatgttccctagctcacgtaccacagaggaagtgggacgtttagaagaagagcgtcgtttgtgttacgtggggatgacccgtgcaatgcaaaaactgtatatcacgtatgctgaaatgcgtcgtttatacgggaaagataacttccacaaaccttcacgttttatccgcgaaattcccgaccagttcgtcgaagaagtccgcatgaaagcgcaagtgtcacgtccggcaagcagtggtcgttttagccaaacacaggtgaataacaactttaatgagacaggttttaacctaggtcagcgtgttgagcatccaaaatttggtgaaggcaccatcattaactttgaaggcagtggcgcacaaagccgtgtgcaagtggcgtttaatggtgaaggtattaagtggttggtgactcagtacgccaagcttacaccaatgtaa

SEQ ID NO: 44126 - protein, 723 aa, Photobacterium sp. SKA34
MDVSLLLDGLNDKQREAVAAPLGNHLVLAGAGSGKTRVLVHRIAWLLSVEQASPYSIMSVTFTNKAAAEMRGRINELMHGSSAGMWNGTFHGLCHRMLRAHYLDARLPEDFNILDSDDQMRLLRRLIKAQNLDEKHWPARQAAWYINAKKDEGLRPKHVETYSDPVEQTWLRIYTAYQEACDRAGMVDFAELLLRSYELLRDNKHIREHYQARFKHILVDEFQDTNSIQFAWLRLMAGPDCHVMIVGDDDQSIYGWRGAKIENIQRFLNEFKGASSIFLEQNYRSTGNILNAANELIANNNERMGKKLWTDGGEGEPISLYSAFNEIDEARFAVGKIKEWRDQGGSLNETAFLYRSNAQSRVLEEALIQAGLPYRIYGGMRFFERQEIKDALSYMRLISNRNDDASFERVVNTPTRGLGDRTLETIRLVARDRGLTMWQSSIALLEEQVLAGRAANSLRRFIELINALEDDTADLPMYQQTDEVIRHSGLRAMYEQEKGEKAQARIENLEELVTATRQFEIPEEAESMTPLAAFLAHAALEAGDGQADDFEDAVQLMTMHSAKGLEFPVVFMVGVEEGMFPSSRTTEEVGRLEEERRLCYVGMTRAMQKLYITYAEMRRLYGKDNFHKPSRFIREIPDQFVEEVRMKAQVSRPASSGRFSQTQVNNNFNETGFNLGQRVEHPKFGEGTIINFEGSGAQSRVQVAFNGEGIKWLVTQYAKLTPM

SEQ ID NO: 44127 - DNA, 2214 bp, Oceanospirillum sp. MED92
  CDS (1)..(2214): transl_table=11
atggatgtaacccacattatcgattctctgaacgatgcccagcgcaatgcggtaactgcgccggtaaaaaatttactggttttggccggtgctggctcaggtaaaacccgcgtgctggtccaccggatcgcctggttgattcagactgaggggatttccccctattcgattatggcggtaacctttaccaataaagccgctaaagagatgcgcggccgtatagaggagttgttggggctaaatcctcaggggatgtgggtcggtaccttccatggccttgctcatcgattgctgcgcgcacactggcaggatgccgggcttcctgaaaatttccagattatggacagtgatgaccagctacgcctgatcaaacgtcttgccaaagagatggggctggatgataagcgctggcctccacgtcagttccagtggtacatcaacgacaaaaaagataacggtctgcgtgccaagaatattgaacctcgccatgatctgaatgaccggcagatggtcgccatgtatgaagcctacgagcaggcttgtgagcgtggtgggatgatcgactttggtgagctattgctgcgttcactggaactgttccgcgataagaacccggcgcttttggaacattatcaggagcgttttcgctacatcctggttgacgaatttcaggacaccaacaccattcaatatggctggttgcagctgctctgtggcggacagcagaagctgatggccgtgggtgatgacgatcagtctatttacggctggcgtggcgcgaaaatcgaaaacattcaaaacctatcaacacacttcccgggcgttgaaacaatcaagctggagcaaaattaccgttccaccgaaacaatcctgcgtgctgccaatgaagtgattcgcaacaaccaggggcgtttaggtaaagagcttcatacggagtcaggtgaaggggatccgatctcgctgtatgcggccttcaacgaacaggatgaagcccgttttatcgtcgatcagatcggaaaatggagccaggaaggtaacctacgtaaagagtgtgcaattctttaccgctccaatgcccagtcacgcgtccttgaggaagccttaattcgcagcggtgttccgtaccgaatctatggtggccaacgtttctatgagcgtcttgagattaaaaacgccctctcctatctacgcctgatgaacaatcgtgatgatgacacctccatggagcgtgtcatcaatgttccgacccgtggtatcggaactcgcaccattgagatcattcgagagcatgcccgtagtcagggaatctcaatgtggcgtgcctccaacgagatcgtcgagcttaaacgtttaccggcacgtgcctccaacgcgctacaggcattcctcgatctgattaaccaaatggcccaggatactgaagatacgctgcttcatgaacagaccgagcatgtgatccagcattcagggctgatcgagcatcacaaaaaagagaaaggcgagaaagcccagtcccgcattgaaaaccttgaagaactggtcactgcggcgaaacagttcaacagccagtgggatgagtttcttgatgaggagttcagctctccccttgcagccttcctggatcaggctgcactggatgcaggggatgctcaggccgatgagtaccaggacagtgttcagttgatgactttgcattccgctaaaggtctggagttcccccaggtgttcctggccggagtcgaggaaggcttgttcccgcacaaaatgtcgatcgaagagccaggacgcctcgaagaggaacgtcgcctgtgctacgtgggcatcacgcgtgcgatgcagaagctatttatcacttacgcagaatcccgtcgcttacatggtcaggatacttacaatcgaccttcccgctttatcagtgagataccttccgagttgatggaagaggttcgtttgaatgccagtgtcagtcgaccaatgacaagccgctacaatgacaatcagggtagcagcctgttcggaagtagttctttgggcagcagcgaagtccctgaaaccaatctggcacttggctcgcgggttatgcacagcaagtttggtgaaggtaccgtacttaactttgaaggttccggtgctaaagcccgggtacaagtgaatttcgactacgagggccccaaatggctggtggtcgggtttgctaacctaacccctctgtaa

SEQ ID NO: 44128 - protein, 737 aa, Oceanospirillum sp. MED92
MDVTHIIDSLNDAQRNAVTAPVKNLLVLAGAGSGKTRVLVHRIAWLIQTEGISPYSIMAVTFTNKAAKEMRGRIEELLGLNPQGMWVGTFHGLAHRLLRAHWQDAGLPENFQIMDSDDQLRLIKRLAKEMGLDDKRWPPRQFQWYINDKKDNGLRAKNIEPRHDLNDRQMVAMYEAYEQACERGGMIDFGELLLRSLELFRDKNPALLEHYQERFRYILVDEFQDTNTIQYGWLQLLCGGQQKLMAVGDDDQSIYGWRGAKIENIQNLSTHFPGVETIKLEQNYRSTETILRAANEVIRNNQGRLGKELHTESGEGDPISLYAAFNEQDEARFIVDQIGKWSQEGNLRKECAILYRSNAQSRVLEEALIRSGVPYRIYGGQRFYERLEIKNALSYLRLMNNRDDDTSMERVINVPTRGIGTRTIEIIREHARSQGISMWRASNEIVELKRLPARASNALQAFLDLINQMAQDTEDTLLHEQTEHVIQHSGLIEHHKKEKGEKAQSRIENLEELVTAAKQFNSQWDEFLDEEFSSPLAAFLDQAALDAGDAQADEYQDSVQLMTLHSAKGLEFPQVFLAGVEEGLFPHKMSIEEPGRLEEERRLCYVGITRAMQKLFITYAESRRLHGQDTYNRPSRFISEIPSELMEEVRLNASVSRPMTSRYNDNQGSSLFGSSSLGSSEVPETNLALGSRVMHSKFGEGTVLNFEGSGAKARVQVNFDYEGPKWLVVGFANLTPL

SEQ ID NO: 44129 - DNA, 2328 bp, Flavobacteria bacterium BBFL7
  CDS (1)..(2328): transl_table=11
gtgcaagattacatatctcaattaaatgatgcgcaacgtgaaccagtgttgcaaaaggaaggtgctatgatcgttatagcaggtgctggatctggtaaaactcgagtacttacattgcgcattgcctatctaatgcaacaaggtgtagatgcttttaatatcttatccttaacctttactaataaggctgcacgtgaaatgaaaaaacgtattgcagacattgtaggtcaaagcgaagccaaaaacttatggatgggaacttttcattcagtttttgcgcgtttactgcgtatggaagcagataagttgggttatccatcaaatttcactatttacgattctcaagactcgcaaagattagtgagcgccatcataaaagaaatgggtctggacaaagatgtttataaatacaaacaaattgcttctcgtatctcttccatgaagaatagccttattaccgtaagagcttattttaacgatgcagacttgcaagaggcagatgcgatggcgcgcagaccacgttttggagatatctataaggaatatgtggagcgttgttttaaagcaggcgcgatggattttgacgatttattattgaagacaaatgaactattaaatcgttttccagaagtacttgccaaatatcaaaatcgttttcaatacatacttgtggatgagtatcaagatacgaatcattcacaatatctaatcgttaaagcgctttcagataaatttcagaatatatgcgtggtaggtgatgatgcgcaatctatttatgcattccgtggcgcaaacattaataacattctgaattttcagcgcgattatgaaggtgtaaaagcttatcgattagaacagaattatagatctacaaaaaacattgtagaggctgcaaactctattattgataaaaataaaaccaagcttgataaagtggtatggaccgcaaataatgatgggcctaaaatcatcgtgcatcgtttaatgagcgatgcggaagaagggcgatatgttgccggttctatttttgaaaataaaatgcaaaagcaactgggtaatgatcagtttgctattctttataggactaatgcgcaatccagagcgatggaagacgctttacgtaaaagagatataccctatagaatttatggtggattgagtttttaccaacgtaaagaggtaaaagatgtactagcctatttaagagttatcgttaatcctaaggatgaagaatctctaaaacgtatcattaattatccagcacgtggtataggtgccacaacaatggataagcttatcgttgcggcaaagcattatgaccgcagtatttttgaagttattgagcatatcgatcgcattgatataggcattgctagcagtacaaaaacaaagcttaaaaactttgttatgatgattaagagctttcaagctctggaagagacgcaatctgtatttgaacttacagaatatgtaataaagaaaagtgccttaatcaatgagcttaaaaaagacggtagtcaagaaggtatttctaaagttgaaaacattgaagagctcctaaatggaatgcgagactttgtagaaggtcaaaaagaagttgatgaagccagaggttctcttgcagaatttctagaagatgtagcgctggcaacagatttagataatgaaaaggacactgatgatcgtgtttcactaatgaccattcacctagcaaaaggactggaatttccatatgtatatattgttggaatggaagaagacttgttccctagtggaatgagtatgaatacacgtgaagaactagaagaagaacgacgccttttttatgtagcactgactagagcagaacatcaagcataccttacttacaccttaagtagatatcgatggggaaaactagtcgatgcagaacctagccgatttattactgagatagatgatcagtatcttgagtacactactcctatggatgattataggtataaaagtgccttgactgaccatttatgggatgaaccagacaagtctaaattaagacaacgcaagcctgtatctggtaaaccacctagcgtaagcagaccaagtgaagatcaaattagaaaattgcgtaaaataagacctagctcttccagcaataatagtaaatcatcaggttttgaaggaactttagaacctggaatgattgtatcacacggacgttttggtcgtgggactgtcgtgaatattgaaggtgctggcggtgagaaaaaagcagaaatcaacttccaagtcggtggtttgaagaaattgttattgcgttttgcaaaactagaggtcatcgacgaataa

SEQ ID NO: 44130 - protein, 775 aa, Flavobacteria bacterium BBFL7
MQDYISQLNDAQREPVLQKEGAMIVIAGAGSGKTRVLTLRIAYLMQQGVDAFNILSLTFTNKAAREMKKRIADIVGQSEAKNLWMGTFHSVFARLLRMEADKLGYPSNFTIYDSQDSQRLVSAIIKEMGLDKDVYKYKQIASRISSMKNSLITVRAYFNDADLQEADAMARRPRFGDIYKEYVERCFKAGAMDFDDLLLKTNELLNRFPEVLAKYQNRFQYILVDEYQDTNHSQYLIVKALSDKFQNICVVGDDAQSIYAFRGANINNILNFQRDYEGVKAYRLEQNYRSTKNIVEAANSIIDKNKTKLDKVVWTANNDGPKIIVHRLMSDAEEGRYVAGSIFENKMQKQLGNDQFAILYRTNAQSRAMEDALRKRDIPYRIYGGLSFYQRKEVKDVLAYLRVIVNPKDEESLKRIINYPARGIGATTMDKLIVAAKHYDRSIFEVIEHIDRIDIGIASSTKTKLKNFVMMIKSFQALEETQSVFELTEYVIKKSALINELKKDGSQEGISKVENIEELLNGMRDFVEGQKEVDEARGSLAEFLEDVALATDLDNEKDTDDRVSLMTIHLAKGLEFPYVYIVGMEEDLFPSGMSMNTREELEEERRLFYVALTRAEHQAYLTYTLSRYRWGKLVDAEPSRFITEIDDQYLEYTTPMDDYRYKSALTDHLWDEPDKSKLRQRKPVSGKPPSVSRPSEDQIRKLRKIRPSSSSNNSKSSGFEGTLEPGMIVSHGRFGRGTVVNIEGAGGEKKAEINFQVGGLKKLLLRFAKLEVIDE

SEQ ID NO: 44131 - DNA, 2172 bp, gamma proteobacterium HTCC2207
  CDS (1)..(2172): transl_table=11
atggacgttacctcgatactcgacaaattaaacgcagcgcaagaagaagcagttaccagcgacaaacagcacctcttggtactggccggcgcaggtagtggcaagactcgcgtattagtgcaccgcattgcttggaagcttcaggtggataatctttcgccctattccatcctggcagtgacctttaccaacaaggcagcccgcgagatgcgcgagcgcatcgatgagttgatggggatgtcgctgcgtggcatgtgggtgggtacttttcacggtttggcccatcgcctgttaaaggcgcattggaaagatgtgaaactgccagaaaattttcaaatcctcgattccgacgaccagctgcgactggtaaagcgcgtaatgcgcagtatggatctggatgagcagcgctggccgccaaagcaggcccaatggtggatcaatggccaaaaagatgaagggttgcgcgccgctcatattcaggaaactggcgatccccatatggcgactatgctgcgcatctatcgggaatatgaagaagtctgtaatcgtctcggcgtgatcgattttgccgaactcttgttgcgcgcgctggagctgtggaaagagcatccagccgtgctagaccactatcagcagcgctttcaacatatattggtcgacgagtttcaggataccaatgcggtgcaatacgcttggttacgcatactcgccggcaaggtcagtggtgtaaccgctgtcggtgatgacgatcaatcgatttatggttggcgcggtgccaaggtggagaatattctccattatgagggccactttagcgacactcacacggttaagctggagcaaaattatcgctccacctcgaatattctcaatgctgccaatgctgttatctcaaagaatgctgagcgtttgggaaaaagcctctggaccgactctggcgaaggagagcccattgcgctctatgcggcatttaatgagcacgatgaggcgcgctatatagctgatcgtttacagtcatgggtcaatcagggaaatcttcgggaagactcggcgattctctacaggtctaatgctcagtctcgggttcttgaggccgcactgttgcaggccgatattccctaccgtatctatggcggtcagcgcttttatgagcgtctggaaattaagaacgccctctcctatttacgattgatgatgaactgtcacgatgatgtcgcttttgaacgagtggtcaatgtgccgccccgcggaattggtgatcgaacggttgagacgatccgcgcactggcgcgagaagagcaaatttccatgtggcgcgcatcggaaaagattgttaccgaaaagcgtatgcccggtagagcgatcaatgcggtcgccgtatttttagaactgatcaatgaaatgagcggacagctggatgagctggagctctatgaacaggctgaaaacgcgatccagcgcagcggccttatcgagatgcacaagcgtgagaagggcgagcgcggtcaggcgcgggttgaaaaccttgaagaattggttggcgcctgtcgcaacttcgaagccgaagataaagacctgccaatactgccgcagtttctcgaccaggtggcgttggattccggtgaccgtcaggcagatgaagatcaagacgcagtgcaactaatgaccttacacagtgccaagggactagaattccccctggtgtttatcgccggcgtagaagaaaatttattcccgcataaaatgtcattggatgagcctgggcgtctcgaagaggagcgtcgccttgcctatgtaggcataacccgcgccatgcaaaaactctatttgacctttgccgaaagccgctcaatttacggtaccgagtcctttaactctgtgtcgcgatttgtgcgcgatattcccaaagaagtgatcgaagaggtccggctgcaaaacaccatcagccggccaactagctatgcttcgaaaggctctgggggattgatgcaaagtgactcgggcgatgacacggggttctctctgggtcagggggttaatcaccaggtttatggtgagggtgttattttaaattttgaaggtaatggaccccgtgccagagtgcatgtgcgctttgctgacgtgggcaccaaaatcttgattttagcctcggccaatctggcggcgctctaa

SEQ ID NO: 44132 - protein, 723 aa, gamma proteobacterium HTCC2207
MDVTSILDKLNAAQEEAVTSDKQHLLVLAGAGSGKTRVLVHRIAWKLQVDNLSPYSILAVTFTNKAAREMRERIDELMGMSLRGMWVGTFHGLAHRLLKAHWKDVKLPENFQILDSDDQLRLVKRVMRSMDLDEQRWPPKQAQWWINGQKDEGLRAAHIQETGDPHMATMLRIYREYEEVCNRLGVIDFAELLLRALELWKEHPAVLDHYQQRFQHILVDEFQDTNAVQYAWLRILAGKVSGVTAVGDDDQSIYGWRGAKVENILHYEGHFSDTHTVKLEQNYRSTSNILNAANAVISKNAERLGKSLWTDSGEGEPIALYAAFNEHDEARYIADRLQSWVNQGNLREDSAILYRSNAQSRVLEAALLQADIPYRIYGGQRFYERLEIKNALSYLRLMMNCHDDVAFERVVNVPPRGIGDRTVETIRALAREEQISMWRASEKIVTEKRMPGRAINAVAVFLELINEMSGQLDELELYEQAENAIQRSGLIEMHKREKGERGQARVENLEELVGACRNFEAEDKDLPILPQFLDQVALDSGDRQADEDQDAVQLMTLHSAKGLEFPLVFIAGVEENLFPHKMSLDEPGRLEEERRLAYVGITRAMQKLYLTFAESRSIYGTESFNSVSRFVRDIPKEVIEEVRLQNTISRPTSYASKGSGGLMQSDSGDDTGFSLGQGVNHQVYGEGVILNFEGNGPRARVHVRFADVGTKILILASANLAAL

SEQ ID NO: 44133 - DNA, 2328 bp, delta proteobacterium MLMS-1
  CDS (1)..(2328): transl_table=11
atgttacattggaccgccatgcaagcttcgctttttgatcaattgaaaccgcccaccgccccagcagccacatcttccctggccgccgccctggagcagttgaacagcgcccagcgggaggcggtctgcgccccgccggggccgattctggtgatcgccggggccggcagcggcaagacccggaccctggtccaccgtctggcctggctggtggagcagggtaccccgccggagcagttgctgctgctgaccttcacccgcaaggccgcccaggagatgaccgcccgggccggctggctgctggatggttcctgtcggcgggtaaccggcgggactttccacgccaccgccaatttgctgctgcgccgttacgccacccggatcggttaccaggccaatttttccatcatcgaccaaagtgatgccgaggggattatcaatcttttgaaatcatccctggggctggggggtgccggccggcgtttcccttcccgccggctgatcctggggatcctgagcaaggcggtcaacgttggcagctcggtcagcgacctggtcgaggccgaacatgagcacctggcggaatttcttgacgatatcctggcgatcaaccagcactaccagcagttcaaactggaccacggcctgatggactacgatgacctgctgctcaactggcggcgactgctgcgcgatgaccgggaggtccgggaagagctggcccagcgcttccaggcgatcctggtggacgagtaccaggacaccaatcccatccaggccgaaatcgtccggttgctggccgcccagcgccgtaacgtgatggcggtgggggatgacgcccagtcgatctacagtttccggggggcggattttcgcaatatcatggagtttcccgaccatttccccggcacccgggtggtgcggctggaagaaaactaccgctcgatcccgcaaatcctggaagtgggtaatgccatcatcgccccggccccggtgaaatatcccaaaaaactcttcagccggttggagggcggcagccggccgcttttccacgccgctcgcaatgaaagcgagcaggcccggtttgtggtggagaaaatcaaggaactgcggcgggagttggacgccagccagatcgcggtcctttttcgttccgggttccactcctacaaactggagctggaattgaccgccaacggtatcgattttgaaaaaaggggcgggctcaaactcaccgaatcggcccatatcaaggatgtcctggcccacttccgagtgctctgcaaccccgccgaccggctttcctggcatcggctgctgctgctgctggacaagatcggccctaaaaccgccgcccggatcatcgatcgcctgcccctgctggaacaagtggccgggccgggggacgggcagcggcccctggatggctccctggctgccctgaaagctttcccggccggcaaagcgtggggggaggggatgcagaaactgttgcaactgctggccgatatcaatgaccccggcctggccccggctgagttgctggagcaggtcctgatctactaccagccccttttaagacgcctttatcccgacgactacccccgccgccagcgggatctggaacaattacggccgttgctggcgggctatgagagtatggatgattttctggccgaactggccctggatccgtcttcaccggaggtcgacgatgacggcggcggccggctggtgctctccaccgtccactctgccaaggggctggagtgggaggcagtttttgttattcatctggccgagggtaagttccctgccaaccaggccgtcggtgccgcccagtatgaagaagagcggcgcctgctctatgtcgccgccacccgcgccaaacgctggctttacctggtctatccccggcagagtaccggggccgatcggcggccgctgttttgtgagccgtctccctttttggcgccgttgccgccggagttgttgcgaggcagtggcagcggtggcgaggcggcggggcggccggactggccctccgcgccgccggccggggatgatccttgggagttggccgccgagaattcccgggtcggccccggcccaccggccggccttccaggctccggtcaacggtcggccatggccggtgagtcggcggcactgaccgtgggcagccgggtacggcaccccttttttggccccggagtgatcgtcaagcaacggggtgggggtatcgtcgaggtcaatttcgaccgccatggccgtaaaaccctgcatctggactacgcccggctggtaagcgttcaccaaggccaatga

SEQ ID NO: 44134 - protein, 775 aa, delta proteobacterium MLMS-1
MLHWTAMQASLFDQLKPPTAPAATSSLAAALEQLNSAQREAVCAPPGPILVIAGAGSGKTRTLVHRLAWLVEQGTPPEQLLLLTFTRKAAQEMTARAGWLLDGSCRRVTGGTFHATANLLLRRYATRIGYQANFSIIDQSDAEGIINLLKSSLGLGGAGRRFPSRRLILGILSKAVNVGSSVSDLVEAEHEHLAEFLDDILAINQHYQQFKLDHGLMDYDDLLLNWRRLLRDDREVREELAQRFQAILVDEYQDTNPIQAEIVRLLAAQRRNVMAVGDDAQSIYSFRGADFRNIMEFPDHFPGTRVVRLEENYRSIPQILEVGNAIIAPAPVKYPKKLFSRLEGGSRPLFHAARNESEQARFVVEKIKELRRELDASQIAVLFRSGFHSYKLELELTANGIDFEKRGGLKLTESAHIKDVLAHFRVLCNPADRLSWHRLLLLLDKIGPKTAARIIDRLPLLEQVAGPGDGQRPLDGSLAALKAFPAGKAWGEGMQKLLQLLADINDPGLAPAELLEQVLIYYQPLLRRLYPDDYPRRQRDLEQLRPLLAGYESMDDFLAELALDPSSPEVDDDGGGRLVLSTVHSAKGLEWEAVFVIHLAEGKFPANQAVGAAQYEEERRLLYVAATRAKRWLYLVYPRQSTGADRRPLFCEPSPFLAPLPPELLRGSGSGGEAAGRPDWPSAPPAGDDPWELAAENSRVGPGPPAGLPGSGQRSAMAGESAALTVGSRVRHPFFGPGVIVKQRGGGIVEVNFDRHGRKTLHLDYARLVSVHQGQ

SEQ ID NO: 44135 - DNA, 2205 bp, Rickettsiella grylli
  CDS (1)..(2205): transl_table=11
atgcagaaggttcaaattttcgttacaattcgcgttatgctaaatcctacccatcctttgttagaatctctcaatgaagcccagcaacaggttgttgccgcgcgtcaaacgcatctcttggtattagccggcgcaggcagtggaaaaacacgtgtattggtccatcgaatggcttggttaatccatgtagaaggtatctctttgcatcatatccttgcggttacctttacgaataaagctgcaggagaaatgcgacagcgcttagaaaatttattggatatccctatgaaaacgatgtgggtaggtacgtttcatggtctcgcacatcgactattacgtcaacattgggaagcttcgggtttaccgcaatcatttcaaatcattgatagcgatgatcaataccgtatgataaaaagaattttgctgagtttaaatcttgatgaagcacaatgggcacccaaaaaagtgcaatggtttattaatcagcaaaaagatgaaggtattcgatcgcatcacgttaaaaactcgaatgatccttataccaaaacgttagttcgactttaccagtcctatgaggaagtttgcgatcgaaatggagttatcgattttgctgaacttcttttacggagctatgaactttttattaaacatcccgaaattttgcattattatcaaggtcgttttcaacatattctcgttgatgagtttcaagataccaatcgcatacaatatgcgtggttaaaattattgagtagcggaaaaaactacttcatgatagtgggcgatgatgatcaatcgatttatggatggcgtggtgctcgtgtaaaaaatatatatgattttacgcacgattttccagagcatcagatcatacgactcgagcaaaattatcgctccacgggtgtcattttagcagcttcaaatgcgctcattacacacaatgacggacgcttagggaaaaagctttggagtagtcgcggtgatggtgacaaaatagcactctatggtgcctttaatgatttagatgaagcccgtttcattatcaaccaaatcaagcaaggtttaaaaaaagaagtgcatgccaatgacattgctattttatatcgatccaatgcacaatcacgcgtacttgaagaggcgctcatacacgcgcagatcccttatcgtatctatggtggattacgtttctttgaacgcgcagaaatcaaagatgcgcttgcttacttacgtctcattgcgaatcgaaatgatgatcctggctttgaacgcgtcattaacacgccaacgcgtggtattggcgatcaaactttacaaaagcttcgcttggaagcgcgcacgcaagcactttctttatggcaagcggccacgtatctattaaaccaacaatgcttaccttcacgtgcggccaatgcactcgctcattttatccaattaatcgataaaatggacgaagaaattaaaacattcagtttagctgagcaaactgaacacgtcctttatcagagtggcttatttaatcattacaaaaaagaaaaaggtgagcggggtcaagcccgtattgaaaaccttgaagaacttatcaatgcgacgcgacaatttattcctgaagagagtacgctttctatactttcttcttttcttgcccacgttgcattagaagccggtgaacaccaagcgaacgaacaacacgcctgtgtacaattaatgacgttgcattctgcaaaaggtttagagttcccctgggtatttttatgcggaatggaagaaggcttgttccctcaccatctctctcatgaagaaccgggccgcttagaagaagaacgtcgcctctgttatgtcggtatgacgcgtgccatgcgtaaactatttttaagttatgctgaagtaagacgcttacatggcactgaaagtcatcatcgtccctctcgatttatttcagaaattccaaaagaattagtagaagaaattcgtctacgcacatcgattattaggccaacacaacccttaaaacgaacacaaaacaccactcattcaatcggtgataccggattttgtatcggacaaaccgtcattcatcccacgtttggtgaagggacgctgatagatgcggatggcaaaggggaacatacccgtttgcacattaaatttaataaagcaggtacaaaatggttggtagcaaactatgctaaattatccacgaaataa

SEQ ID NO: 44136 - protein, 734 aa, Rickettsiella grylli
MQKVQIFVTIRVMLNPTHPLLESLNEAQQQVVAARQTHLLVLAGAGSGKTRVLVHRMAWLIHVEGISLHHILAVTFTNKAAGEMRQRLENLLDIPMKTMWVGTFHGLAHRLLRQHWEASGLPQSFQIIDSDDQYRMIKRILLSLNLDEAQWAPKKVQWFINQQKDEGIRSHHVKNSNDPYTKTLVRLYQSYEEVCDRNGVIDFAELLLRSYELFIKHPEILHYYQGRFQHILVDEFQDTNRIQYAWLKLLSSGKNYFMIVGDDDQSIYGWRGARVKNIYDFTHDFPEHQIIRLEQNYRSTGVILAASNALITHNDGRLGKKLWSSRGDGDKIALYGAFNDLDEARFIINQIKQGLKKEVHANDIAILYRSNAQSRVLEEALIHAQIPYRIYGGLRFFERAEIKDALAYLRLIANRNDDPGFERVINTPTRGIGDQTLQKLRLEARTQALSLWQAATYLLNQQCLPSRAANALAHFIQLIDKMDEEIKTFSLAEQTEHVLYQSGLFNHYKKEKGERGQARIENLEELINATRQFIPEESTLSILSSFLAHVALEAGEHQANEQHACVQLMTLHSAKGLEFPWVFLCGMEEGLFPHHLSHEEPGRLEEERRLCYVGMTRAMRKLFLSYAEVRRLHGTESHHRPSRFISEIPKELVEEIRLRTSIIRPTQPLKRTQNTTHSIGDTGFCIGQTVIHPTFGEGTLIDADGKGEHTRLHIKFNKAGTKWLVANYAKLSTK

SEQ ID NO: 44137 - DNA, 2211 bp, Oceanobacter sp. RED65
  CDS (1)..(2211): transl_table=11
atgcgcgccatggatgttactgaattgttagacgggttaaacccgccacagcgcgaagccgttgcttctcctttaaatcaccaattggttctggctggtgctggctcgggtaaaactcgagtgctagtccatcgcattgcttggctgatgcagattgaacacataagccctagttcgattatggcggtgacctttaccaataaagccgccaaagaaatgcgcagtcgagtagaagaactcacgggaattagtccaaagcatttatggattgggacttttcactccttggctcaccgcttattgagaactcattggaagcaagcaaatctatctgagaatttccaagtcatggatagcgacgatcaattgcgtttgatcaagcgtatcgtgcgtggtttaaatattgatgaagaggtgtaccaacccaagcaggctcaatggtatatcaacgcacaaaaagatgaaggcctgagaccacaacatattcagcctttcggggatcaatgggcacaaactatggtcaccatttatagtgcctacgaagaagcttgccaacgtgctggtctggtagattttgctgagttgttatttcgggctcatgaattgtggctcaacaacccaagcttactcactcaatatcaacaacgcttccgctatattttggtggacgagtttcaggataccaataccattcaatatgcttggttacgagtattggcaggcaatgcaattccggttatggccgtgggtgatgatgaccaaagtatttatggatggcgcggcgctcgcattgaaaatattcagcaattcagcaaagactttgccggcgcacaagagattaagctagagcaaaactatcgctccacaggcaacattctgaaagccgccaattccgtgattgataacaacccaacgcgcctaggcaaaaacctttggaccgaaggggatcagggtgagccaatcgccttgtatgccgcgttcaatgaacaagatgaagcccgctttattgttgaccaggtggaaagccactttaaaaataatgatcgcacataccaagatatggccgtgctttatcgttccaacgcgcaatctcgggttttggaagaagcgtttattcgtgccggtttaccctatcgtatttatggtgggcagcgattctatgaacgtttagaaattaagaatgccatggcgtatttgcgcttactgcaaaaccgacacgacgatgcgtctttagagcgagtgatcaacgttcccgcccgtgccattggtgagaaaacagtagagacgttacgtcaatatgcccgtgaacacggcacctctttatggcaggcactggaacaagccatccgaaaagacctattggcagcgcgagcgaccacggcattgcaaaagtttgaaagcttgattgatgaaatggaagtcacttgtcaaagcatcgaactccatgaacaagtggatcatgtgattcaaacatccggtttgattgaacatcatatgaaagaaaagggtgaaaaagctcaagctcgtattgaaaacttagaagaactagttaatgcggctaaaaccttcgatcccgatgatatagaagcggtggatgaaaacggcgagccagtggatgtggaatacgcgtcgccgcttgccgcatttttagatcaagcggcgctagatgcaggcgatgcacaagcggatgaatttgaagacagtgttcaaatgatgacgctgcacagcgccaaaggtttggaatttcctgtggtgtttatggccggtttagaagagggattatttccccataaaatgtcggcggacgatcccaatcgattagaagaagagcgacgactatgctatgtgggtatcacccgcgccatggaaaaactctacatttgctatgccgaaagtcgccgcatgtatggtcaggaaaacttcgcctcaccgtcacgattcattcgagagatacctcacgacaccatcgaagaagtgcgtctaaaagccacagtgagtaagccagtcagccaacaatttagtgtggagagcgcacaagaagccactggactgaaaataggtcagcaagtgtggcatgcgaagtttggtgaaggcactgtgttagatatggaaggccaaggtgcgcaggctcgagtgcaagtatccttcgactttgatgggactaagtggttggtggcggcttacgcaaaccttcgccccatggatctttaa

SEQ ID NO: 44138 - protein, 736 aa, Oceanobacter sp. RED65
MRAMDVTELLDGLNPPQREAVASPLNHQLVLAGAGSGKTRVLVHRIAWLMQIEHISPSSIMAVTFTNKAAKEMRSRVEELTGISPKHLWIGTFHSLAHRLLRTHWKQANLSENFQVMDSDDQLRLIKRIVRGLNIDEEVYQPKQAQWYINAQKDEGLRPQHIQPFGDQWAQTMVTIYSAYEEACQRAGLVDFAELLFRAHELWLNNPSLLTQYQQRFRYILVDEFQDTNTIQYAWLRVLAGNAIPVMAVGDDDQSIYGWRGARIENIQQFSKDFAGAQEIKLEQNYRSTGNILKAANSVIDNNPTRLGKNLWTEGDQGEPIALYAAFNEQDEARFIVDQVESHFKNNDRTYQDMAVLYRSNAQSRVLEEAFIRAGLPYRIYGGQRFYERLEIKNAMAYLRLLQNRHDDASLERVINVPARAIGEKTVETLRQYAREHGTSLWQALEQAIRKDLLAARATTALQKFESLIDEMEVTCQSIELHEQVDHVIQTSGLIEHHMKEKGEKAQARIENLEELVNAAKTFDPDDIEAVDENGEPVDVEYASPLAAFLDQAALDAGDAQADEFEDSVQMMTLHSAKGLEFPVVFMAGLEEGLFPHKMSADDPNRLEEERRLCYVGITRAMEKLYICYAESRRMYGQENFASPSRFIREIPHDTIEEVRLKATVSKPVSQQFSVESAQEATGLKIGQQVWHAKFGEGTVLDMEGQGAQARVQVSFDFDGTKWLVAAYANLRPMDL

SEQ ID NO: 44139 - DNA, 2388 bp, Synechococcus sp. RS9916
  CDS (1)..(2388): transl_table=11
atgagttttcttgccggtctcaacgacgcccagcgccgggcggtggatcaccatgaggggcccctgttggtggtggctggagctggcagtggcaaaacccgggccctgacccatcgcatcgcccatctgatcggtgagcacggggccgacccagcccagatcctggcggtgaccttcaccaacaaagccgcccgtgagatgaaggagcggctcgagttgcttctggcccagcgtttggcgtccagtcaattcggccagccctggagcaccctgccggcggtggagcagcggcagctgcggtcgcgtatttatcgggaggtgaccaaggagctgtggatcggcaccttccatgcgctgtttgcgcgcatgctgcgctttgacatcgacaagttcaaagatgcggagggcctcacctggaccaagcagttctcgatctacgacgaggccgatgcccagagtctggtgaaggagattgtcacccaggagctgcagctcgatcccaagcgttttgagcccaaaaaagtccgttgggcgattagcaacgccaagaaccagggctggctacccgatcagctggaggccaatgccgagggacagcgtggcaagctcatggccgatgtctatcgccgctatcgcaaagctctggcggccaataacgccctcgatttcgatgatctgctgctgctgccggtgcagttgcttcagcagaacgagcaggtgcgtggctactggcaccgtcgtttcgcccacgtgttggtggatgaataccaagacaccaaccgcacccagtacgagctgatcaagttgctcgtgaccgatggcaaggaaccccaggtgtacgacaactggactgggcgctcggtgtttgtggtgggcgatgcagaccagagcatctacagcttccgtgctgccgacttcacgatcctgatgggctttcaggacgacttcggtgacaaggctcctgatgacgccacccgcacgatggtgaagctggaggagaactaccgctccaccgccacgatcctggaggcggccaatgccctgatcgccaacaacagcgagcggatcgacaaggtgctgcggcccactcgcggcgaaggggagctgatcactcttacccgttgcgacgacgaaatcgccgaggccgaagccgtggtgcatcggctgcggatgatggaggcggccaaccccgagctgagctggggcgacatggctgtgctgtatcgcaccaatgctcagtcacgggcgatcgaggaatcgcttgtgcgctggcggattccctatgtggtggtcggcggtctgcgcttctacgaccggcgcgagatcaaggatgtgctcggttacctgcggctgctgattaacccggctgacaccgtcagcctgctgcgggtgatcaacgtgcccaagcgagggattggcaaaaccacgattcagcgctgcaccgatgcggccaatcagctcggcattcccctctgggatgtggtgagcgatccggaagcggcccgttcccttggggggcgttcggcccgtgggctgttgcagttctgcgaactgatcaacgatctcaagcagcgcattcacgacacaccgccttcggagctgatccagcaggtgatggagaagagcggctatgtgagcgagctgattgccgaaggcacggacgaagcggaggaacgccgccgcaacctgcaggaactggtgaatgcaggtctgcaataccaggaggaaaacgacgagggcgatctcgagggcttcctggcatcagcggcgctggcgagtgatgccgatagcaaagacaccgaagccgaccgggtcaccttgatgaccctgcacagcagtaaggggctggagtttccggtggtctgcctcgtgggcctggagcaggggctgttccccagctaccgctcccttgatgatccggcctcactcgaggaggaacggcgtctctgttatgtgggcatcacccgcgcgaaggaacgcctgttcctctcccacgccagcgaacgacgcctttggggcgggatgcgggagccggccgtgcccagcgtcttcctctctgagttgccggaagccctggtgcagggcgacatcccgcgctcgggcggcgcagcgattcgccgtgagcaacgtttagatcgtctgacccgggtcgatcgcgccaagcccaccagcgcgccggccaatgcggttcgacgccgtcaggccggccctgcccctggcaaaagttggtctgtgggggatcaggtcagtcatgccagctttggcattggcgagatcacccacaccttcggtagtggggagaaggtgtcgatcgcggtgaagttccccggcatggggccgaagatcctcgatccgcgcctggcgccgattgagcccgtgcaggggtga

SEQ ID NO: 44140 - protein, 795 aa, Synechococcus sp. RS9916
MSFLAGLNDAQRRAVDHHEGPLLVVAGAGSGKTRALTHRIAHLIGEHGADPAQILAVTFTNKAAREMKERLELLLAQRLASSQFGQPWSTLPAVEQRQLRSRIYREVTKELWIGTFHALFARMLRFDIDKFKDAEGLTWTKQFSIYDEADAQSLVKEIVTQELQLDPKRFEPKKVRWAISNAKNQGWLPDQLEANAEGQRGKLMADVYRRYRKALAANNALDFDDLLLLPVQLLQQNEQVRGYWHRRFAHVLVDEYQDTNRTQYELIKLLVTDGKEPQVYDNWTGRSVFVVGDADQSIYSFRAADFTILMGFQDDFGDKAPDDATRTMVKLEENYRSTATILEAANALIANNSERIDKVLRPTRGEGELITLTRCDDEIAEAEAVVHRLRMMEAANPELSWGDMAVLYRTNAQSRAIEESLVRWRIPYVVVGGLRFYDRREIKDVLGYLRLLINPADTVSLLRVINVPKRGIGKTTIQRCTDAANQLGIPLWDVVSDPEAARSLGGRSARGLLQFCELINDLKQRIHDTPPSELIQQVMEKSGYVSELIAEGTDEAEERRRNLQELVNAGLQYQEENDEGDLEGFLASAALASDADSKDTEADRVTLMTLHSSKGLEFPVVCLVGLEQGLFPSYRSLDDPASLEEERRLCYVGITRAKERLFLSHASERRLWGGMREPAVPSVFLSELPEALVQGDIPRSGGAAIRREQRLDRLTRVDRAKPTSAPANAVRRRQAGPAPGKSWSVGDQVSHASFGIGEITHTFGSGEKVSIAVKFPGMGPKILDPRLAPIEPVQG

SEQ ID NO: 44141 - DNA, 2175 bp, Vibrio sp. Ex25
  CDS (1)..(2175): transl_table=11
atgatggatccatctctattactcgacggtctaaacgataaacagcgtgaagccgttgcagctcctctagaaaacttacttgtccttgctggtgcagggagtggtaagactcgcgttcttgttcaccgtatcgcttggcttatgtcagtcgagcaagcttctcctttctcgatcatgtcggtcaccttcaccaataaagcggcagcagaaatgcgtggtcgtattgaagagttgatgatgggcagtgcatctggcatgtggaatgggactttccacggtatttgtcaccgcattttgcgtgcacactatcttgatgccaagctaccggaagatttccaaatcatagacagcgatgatcagcagcgcttgttaaagcgtttgatcaaagcacaaaacttggatgaaaagcagtggcctgcacgccaagtttcatggtggattaatggtaagaaggacgaaggattacgcccatcgcatatcgacgcttatcacgatccagtgaccaaaacttatttgcagctgtataccgcttaccaagaagcgtgtgatcgtgctggcttagtggactttgcggaaattttgctgcgcgcgcatgagctactgcgtgacaacaagtttgtgcgtgaacactaccaagcgcgctttaagcatatcttggttgacgaattccaagacaccaacaacattcaatacgcttggctacgcatgatggctggcccagattgtcacgtgatgattgttggtgacgacgaccagtcaatttatggttggcgcggtgcaaaagtcgagaacattgagaagttcacgctggagtttccgagcgtgaacaccattcgtctcgaacaaaactatcgttcgaccaagacgattcttgaagcgtccaataccttgattgcgaacaacactgaacgtatgggtaaagagctgtggacggatggcaatgtgggagagccgatctcggtttacagcgcttataacgagcttgatgaagcgcgctttgcggtcaataaaatcaaagagtggcaagagaatggcggcgcattgaatgatgctgcgatgctgtatcgtaacaacgcgcaatctcgtgttttggaagaagcattaattcaggcaggcttaccgtaccgtatttacggaggcatgcgattcttcgagcgtcaagaaatcagagatgcgttgagctacttgcgtttgatggcgaatcgcaacgatgatgccgcgtttgaacgtgtcgtgaataccccaacacgtggtctgggcgataagacgctagagactatccgtcgtgcagctcgtgatagagggtgcactatgtgggaagccagtctggcaatgctcgatgagcaagtattaacgggtcgagcagctggtgcgttaagtcgttttgtcgaattaatcaccgcgttggaagacgatacactagaaatgccattgcatgagcaaacggaccacgtgatcaagtactcgggtttgtttgcgatgtatgagcaagagaagggcgaaaagtctaaagctcgcatagaaaacttggaggagctggttaccgccactcgccaattcgaaaaaccagaagaagcggaagaaatgtctctgctgacggcatttttaacgcatgcggctctggaagcgggcgaaggtcaggcggacgaatttgaagatgcagtccaactgatgacgctgcatagtgcgaaaggtttggaattcccattggtattcatggtcggtgtggaagaaggtatgttcccaagccagatgtccgctgaagaggctgggcgtttggaagaagagcgccgtctgtgttatgtgggtatgacgcgcgcgatgcaaaagctctacattacttacgcggaaatgcgtcgcctatatggccaggacaaataccacaaaccatcgcgctttattcgtgaattaccagaaacgtgtttggatgaagtgcgcatgaaggcgcaagtgagtcgcccttcaagtagtggacgttttagccaaaccgcagtaaaagaaaacttcaatgagactggtttttcactaggttctcgtgtgatgcatccgaaatttggtgaaggaacaatcatcaattttgagggcagtggcccacaaagccgagtgcagattgctttcaatggtgaaggcattaaatggttagtcaccgcttacgcgagactggagaagctgtag

SEQ ID NO: 44142 - protein, 724 aa, Vibrio sp. Ex25
MMDPSLLLDGLNDKQREAVAAPLENLLVLAGAGSGKTRVLVHRIAWLMSVEQASPFSIMSVTFTNKAAAEMRGRIEELMMGSASGMWNGTFHGICHRILRAHYLDAKLPEDFQIIDSDDQQRLLKRLIKAQNLDEKQWPARQVSWWINGKKDEGLRPSHIDAYHDPVTKTYLQLYTAYQEACDRAGLVDFAEILLRAHELLRDNKFVREHYQARFKHILVDEFQDTNNIQYAWLRMMAGPDCHVMIVGDDDQSIYGWRGAKVENIEKFTLEFPSVNTIRLEQNYRSTKTILEASNTLIANNTERMGKELWTDGNVGEPISVYSAYNELDEARFAVNKIKEWQENGGALNDAAMLYRNNAQSRVLEEALIQAGLPYRIYGGMRFFERQEIRDALSYLRLMANRNDDAAFERVVNTPTRGLGDKTLETIRRAARDRGCTMWEASLAMLDEQVLTGRAAGALSRFVELITALEDDTLEMPLHEQTDHVIKYSGLFAMYEQEKGEKSKARIENLEELVTATRQFEKPEEAEEMSLLTAFLTHAALEAGEGQADEFEDAVQLMTLHSAKGLEFPLVFMVGVEEGMFPSQMSAEEAGRLEEERRLCYVGMTRAMQKLYITYAEMRRLYGQDKYHKPSRFIRELPETCLDEVRMKAQVSRPSSSGRFSQTAVKENFNETGFSLGSRVMHPKFGEGTIINFEGSGPQSRVQIAFNGEGIKWLVTAYARLEKL

SEQ ID NO: 44143 - DNA, 2166 bp, Alteromonadales bacterium TW-7
  CDS (1)..(2166): transl_table=11
atggacgtttcagaattactcgacggcttaaatgacaaacaacgcgatgccgttgcagccccattacaaaacatgctggtgttggccggtgctgggtctggtaaaacacgagtgttagttcatcgtatcgcgtggcttatgcaagttgaacaagcatcagcttatagtatttttgcggtaacttttaccaataaagcagctaaagaaatgcgtacccgcgttgaagaaaccttaaaagcaccggttggcgggatgtggattggtactttccatggcttatcacaccgtattttacgcgctcatcaccgtgaagctaacttaccagaagcctttcaaattttagattctgatgaccaacttcgtatgatcaagcgcttattaaaatcaatgaatattgatgataaaaagtggcctgcaaaacagtttggttggtacataagcgctaaaaaagacgaagcacttcgccctaaagatattcaagcttatgatataaacgagcaaatgatgctgcgtgtatatgccgcctaccaggaagcgtgtgacagggctggtttggtcgattttgctgaaatactgctacgcagctatgaagtattaaaaaataacccgacgttacttcgccactaccaacagcgctttgcccacatgctagtagacgagtttcaagatactaataccattcagtacgcatggttaaagttacttgcaggcgacacaagcagcataatgattgttggcgacgatgaccaaagtatttacggctggcgcggagctaaaatagaaaatataaaacgctttttaactgactttgatgctgaaaccattcgccttgaacaaaactaccgttcaaccgcaactattcttaaagcatctaatgcgcttataaaaaataactccgagcgtatggggaaaagcttatggaccgatggtaacgaaggcgagcctatttctatttatgccgcatttaacgaattagacgaagcccgctttgtaagtagcaaattacgtagttggttaaatgctggtaacgcgttgcaagacgctgctattttgtaccgtagtaacgcgcaatctcgtgtactcgaagaggccatgctacaagaaggcttaaaataccgtatttacggtggcatgcgattctttgagcgtcaagaaattaaagatgcgctatcgtacttacgcttagtaggtaatcgccaagacgacgccgcatttgagcgtgtaatcaatactcctgctcgcggtattggcgataaaacattaagtcatatacgtgattgtgcacgtgctgagtcacttccgctttggtacgcagctaaagctattgttgaacaacagcacttatcgggccgagcagctggcgctgtaacaaagtttgtagagcttgttgagcacattgaagacaagattagcgatcttactttgcaagaacaagctaaatacacaattcaaacctctggccttatggctatgtatcaagctgaaaaaggcgaaaaaggccgcgcccgtgtagaaaacttagaagaacttataagcgcgtgtgatcaatacgaactccctgaagaagaagagtttagctcaccactgcaaggctttttagcctatacctcgcttgaatctggtgaaggccaagccgatgagcacgaagacgcggtacaaatgatgacgcttcactcagctaaaggcttagagttcccgcttgtgtttatggtgggcgttgaagaaggcatgttcccttcgcagcaaagtaatgaagagtctggccgcttagaagaagaacgccgcctttgttatgtaggcatgacccgtgcaatggataaactatacattagccatgccgaaagccgccgcctttatggacaagagaaataccatagtccttcacgtttcttacgcgaaatccctgaagactgcgtagaagaaattcgtattaaaacgcaagtttcgcgaccaccggcagctggtcgctttagtgcatcagtaagccatgccgcctttgaagacagcggctttaacttaggtcaacgtgtactgcatgctaagtttggtattggtacggtacttaactatgaaggtagcggtgcacagtcgcgtgtacaggtaaactttgacgaccttggcagtaaatggctagtaacggcttatgcacgattacaagctgtataa

SEQ ID NO: 44144 - protein, 721 aa, Alteromonadales bacterium TW-7
MDVSELLDGLNDKQRDAVAAPLQNMLVLAGAGSGKTRVLVHRIAWLMQVEQASAYSIFAVTFTNKAAKEMRTRVEETLKAPVGGMWIGTFHGLSHRILRAHHREANLPEAFQILDSDDQLRMIKRLLKSMNIDDKKWPAKQFGWYISAKKDEALRPKDIQAYDINEQMMLRVYAAYQEACDRAGLVDFAEILLRSYEVLKNNPTLLRHYQQRFAHMLVDEFQDTNTIQYAWLKLLAGDTSSIMIVGDDDQSIYGWRGAKIENIKRFLTDFDAETIRLEQNYRSTATILKASNALIKNNSERMGKSLWTDGNEGEPISIYAAFNELDEARFVSSKLRSWLNAGNALQDAAILYRSNAQSRVLEEAMLQEGLKYRIYGGMRFFERQEIKDALSYLRLVGNRQDDAAFERVINTPARGIGDKTLSHIRDCARAESLPLWYAAKAIVEQQHLSGRAAGAVTKFVELVEHIEDKISDLTLQEQAKYTIQTSGLMAMYQAEKGEKGRARVENLEELISACDQYELPEEEEFSSPLQGFLAYTSLESGEGQADEHEDAVQMMTLHSAKGLEFPLVFMVGVEEGMFPSQQSNEESGRLEEERRLCYVGMTRAMDKLYISHAESRRLYGQEKYHSPSRFLREIPEDCVEEIRIKTQVSRPPAAGRFSASVSHAAFEDSGFNLGQRVLHAKFGIGTVLNYEGSGAQSRVQVNFDDLGSKWLVTAYARLQAV

SEQ ID NO: 44145 - DNA, 2178 bp, marine gamma proteobacterium HTCC2143
  CDS (1)..(2178): transl_table=11
atggacgtatcttatattctcaatgatctaaatgacgctcagcgacaagctgtcgcggcttccgctactaatcttttagtattggcaggtgcaggcagtggcaaaacgcgagtgctggtgcatcgtattgcttggctgattcaagccgagggtttgtcgcccttcagcattttgtcggtcacgtttactaataaagcggctaaggaaatgcgtgcgcgcattgacgagctactgggaagctccgctagtgggctcggcgcaccccgaggaatgtgggtcggtacatttcacggcattgcccatcgattgctcaaagcccactggaaacaagcgggattgccgcaaaactttcaaattctcgatagcgatgatcagctgcggctagtcaagcggattcaccgagaattcgatctggatgaaagtcgttggccgccgaggcagtctcagtggttcatcaacggacaaaaggatgagggaaaaagggctgcccacattgaggattacggtaaggatctgaatcactcgaccatgttacgtgtttatttggcctatgaacaagcttgcgaccgacagggagtggttgattttgcggaattactgctgcgtgcgcatgaattatggctgaaacagccggcgatactccagcactatcaggagcgtttcaagcatattctcgtcgatgaatttcaagacacaaatacgattcagtacgcttggctgcgggtccttgccggtaagaatattcctgtggttgcagttggcgatgacgatcagtcgatttacggttggcgaggggcaaaaatagaaaatattcagcaatattcaaaggatttccccaacacccaaattgttagacttgagcaaaactatcggtcgacatcgactattctgaacgcggccaatgcggtcatcgacaataatactgaccgtctcggaaaagagttatggacagatggtggcgaaggcgagctgatttctgtttacgcggggtttaatgagcaggatgaggcgcggttcattgtggagcgtatcgaagaatgggtgaaagacgggcatgaccggtccagctccgctattctttatcgctccaatgcacagtcgcgggtactggaagaagccatgattcgcggaggcataccctaccgaatttatggcggccaacgattttatgatcgcttggaaattaaaaacgcgttggcttatatgcgtctcactaataatcgggatgatgacactgcgacagaaagggttattaatacacccaccagaggtattggcagcaagacgattgaagtgattcgtgcgtatgcccgtgagcataaccaatcactgtggcgcgccgccgtgaatattattgataacaagttactgcctaatcgagcaagtagtgccctacagggctttatcgaaatgatcgatgtcatggacaagaatactgatgacgtaacactggaagagctggctgatcacgttgtcaatgcgtcgggtctaattgagtttcataaaaaagaaaaaggcgagaaagggcaggcgcgaattgaaaacttgcaagagctggttgtcgcagctcgtcagtttgagtcgagtgatgaagctatatcaccactgcaggagtttcttgacagcgctgctcttgacgcgggagagcagcaggcagacgaatttgaggatagtgtgcaacttatgacattgcactccgctaaagggctggaattcccgctagtgtttttggtgggcatggaggaaaatttattccctcataaaatgtcaatggaagagtctggccggctggaagaagagcgtcgactttgttacgttggtatcacccgtgcgatggaaaaactctatattacttacgctgaatcccgccgcatgtatggtaatgagaactataattcaccatcgcggtttatccgtgaaatcccccaagaactaatgcaagaagttcgactcaatacagctattagccgacccgttagttttgcaccgtctcataataattatgctatcccagatactgggatcagtctgggccagcaggtttatcattccatttttggcgccggtactgtactagatttcgaaggacacgggccatcagcccgagtacaggtaaattttgatgatgagggtagcaagtggttagttgtacaatatgctaatcttgaagccatttaa
